United States Patent Application Publication US 2004/0031072 A1 - sequence listing, part 11

SEQ ID NO: 47607 - DNA, 905 bp, Glycine max
  Clone ID: PAT_MRT3847_142996C.1
attcggcttcctgctatcttcatctaaaggcctccttcatgaatccattttaacagtagatttaatgaaatataaaagcagtgtcactgccatttccatcaaaaccatacatctagatagaatggctgctcctactccagttgctattggcacaaggggcacaattggatctcttgtaaagaaggaaattgaatacttctccatgtttgagttggggaactcacagaggcctcagccacactttgtgaacattgtttctggaagaggctattccacttccaggtcaagtttctgggtcttgctaatgacagggaagaggaggaagcgaagagataacaatgtgtttctcccaaaaatgtgttcggttgctgaagtggtagaaagcaataagtggaacagggttcctggttacagctacaggatcctcaaggatgatatcaacaactttcagctctgattgaacacagtttcttgaattagtctgaacttgtatcttgagtgaccaaagacttgcaaaatgttcatgttatttttcaccttgtgatgccacattggacagttttattttattttttattttggggttcatgttgatttcaagttctcagtatttctgatgcctttggtaattgtgctgtcctgccttttgttgctttcagctctgatgtaaattctgtgttctatcgcttgcttaagcagatttgacccaatgcagctcattggtggaaggaaatatggtgcagccaagaagattaaggaccaaatagtatatggatgccaacatatagatctgtgacccttttgtatttctgaacaaaaggttcaagcacaagagttcttatttatcaacatatttgtaattgtacctacatgtctacattaataattttggacttggacaaaaa

SEQ ID NO: 47608 - DNA, 422 bp, Glycine max
  Clone ID: PAT_MRT3847_142997C.1
gtgtattcgcaaagaaatcagcctaatcaccattacaaaaatgcagtgaaatatttgcaactagctctgcgctcagaaccttccgcttcagcagcattacttccattgatacaggtcctccctccttaaaagcagtgtgagaaaggtgcatttggctgcgtgactagcagatagttgtgttgggcagcgccagtacaaagtagtgctgggggcgtgttgcagaccctggcaagtgtgtaatgtgttgtgacttgtgacaaacacataatgtgggagagaataaaaaccggttttaaccaggctgagtctaccagtccttaatgatttagtgctgggttggttacgcagcagtgagttgaatacacatcagtgggtatcataagttcggatcaaccagccggactaacttggtcggtctgagt

SEQ ID NO: 47609 - DNA, 350 bp, Glycine max
  unsure (1)..(350): unsure at all n locations
  Clone ID: PAT_MRT3847_142998C.1
ggcagccaggttgtcgattaangaagatgaagcagagctggcagtttatggggggctggggnctgtatagtggggtggtgatganntgggatgttngctgggtctgcagatctgcatgggcggatgaacttggtcaacgcannagtgttcggctggtggattcagcaagggtatatacactgtgtnnctgaactgtcgcgaacgggtgatagggaagaaaatggcctcaaaaatggaaatgtntnngcgacgccccgccacgggcccataagaagggagaaagcaacnnccagaagtgcntnntgtgctanctatcatnntcaagaagaaccccantnaagggatagccc

SEQ ID NO: 47610 - DNA, 375 bp, Glycine max
  Clone ID: PAT_MRT3847_142999C.1
gaaaacagcaagccagccaggggattgccctctttacctggacccaaatggaccccagaattacaatttctcttccattttaccccctttatgggggactttaaccgccaccaaaaagaaacccttagggccgccaattttatatccaaggccaattaattattaaattattattcttaccttatattaaaccaccataagtggtggtggtggtggaataacctccaacccttaaccacttttgtggacctggtcctgaacccattgaaaccttttcttaaaaaacctttgaatttttccttcaccaccttaaacttggaactagccaaccttttttttcttttgcacctaagggtaattaaacctccacttttg

SEQ ID NO: 47611 - DNA, 712 bp, Glycine max
  Clone ID: PAT_MRT3847_14299C.1
ctactccacgttgtggcgtcccaacggacgagggttgcaatcaacccctctcaagcagtccaaagacccacttgaataccacagtattttgccttgcttatctttatcccacttgcgaggaatctccacaaattggagtctctcgccaagaacagagctcgaatcacttagaatcacaaatggatgcgcaaagactgagtgtggatgatcaagaatgctcaagagttgcttggatgtctcctccatgcgcctaggggtcccttttatagccccaaggcagctaggagccgttgagagcaaatctggaaggccatctttgccttcgatagccgggcgcaccggacagtccggtgcccgattcctttcctcacatggtggcgccccccgctgctccgctgccctccggacagtacggtgcccccttccgactgttggttcggccacgtgtcctgcgctgatcgcgcggccgaccgttggtcctgaccgaccgttggctcaccgagcagtccggtgtacaccggacagtccggtgaattttagccgtacgccgtcggcgaatttcccagaacggcctcttcgtccggggcagcctggcgctccgtacgctgtacggtgcacctccggacagtccggtgccccagacagagacagcctcttggctgtacacagccaagtcttctcttctcttcttctttctgtttctagcacttag

SEQ ID NO: 47612 - DNA, 2073 bp, Glycine max
  Clone ID: PAT_MRT3847_1429C.1
ggggaacagacctgcccgcaataatgaagtgtttctcggtgtccttagcctctttatgggttctccttgctctcttttctctgagtgtgtcctctcaaaatgtatccgagagtgagcagcagcaagctagcattcctccaagaggttggaactcctatgattccttttgctggacaatttctgaagacgaattcttacagagtgctgaaatagtttctcaacgtctccatgatcatggatacgagtatgttgtagtggattacctctggtatagaaggaaagtagagggcgcttatcatgattctcttggatttgatgtgattgatgaatgggggaggatggttcctgacccaggaaggtggccttcttctgaaaatgggaaaggattcactgaagtagctaatcaagtacatagcatgggtttaaaatttgggattcatgtcatgagagggataagcacacaagctgtcaatgcaaacacccctatccttgatacaacaatgggaggtgcttatcaagaatctggtcgagtgtggtatgcaaaagacatagcaatcccagaaagggcttgtgcatggatgtctcatggtttcatgagtgtaaatacaaagttgggagctgggaaagcttttttgagatccctttatgagcagtatgctgcatggggtgttgattttgtgaaacatgactgcgtattcggggatgactttgatttaaatgaaataagctatgtgtctgaggttctcaaggagtttgatcgccccattgtatattctttgtctcccggaaccagtgtgacaccagccatggccaaggatgtcagtggactagtcaacatgtatcgaataacaggagatgactgggataaatgggaggacgtcaaggctcattttgatgtaacaagggatttttctacagctaatatgataggagggaaaggtttgaagggaaattcctggcctgatttggacatgctaccatttggatggctaactgatccaggatcaaatgaaggtccacacagatttagtaaactcactctagaagaaaaaaggacacagatgactttgtggtctttggcaaagtctccccttatgtatgggggggatgtgcggaggatcgatccaaccacatacgaacttatcacaaatcctaccctgctagagattaattactttagctcaaacaatatggagtttccttacatcacaagctcaattaacttgaagcaccctggagggaaggaaagaagacttaagaaaggaatacattcattgggtttgactagctgcagtgaatcaaaggcgaggggttggtctattgaaagtcttaaccaagatcttgaaagaatctgttggaaaaagggtttagaaaacaagcatcaggcccctttctgcgtacacaaaagagaacttcaattcagattagacggggtgagtatgtatcaagaggactatcgagggaaacatcaattagttgcaactgacagaatgaaattttgcttggacgcttctccaagacgaaaggttacttctaaagagttcaagagaggtacattttctccatgcagatgggattcaaatcagatctgggaactgaactccaatgggaccatggtaaatagttactccggtctttgtgcaactgtagagtatattgaagctaatgttaattctggtgggattcgctcttggatcgcaacaggaagaacaggggaaatctatcttgctttcttcaatctaagcgaacagaagacggagatatatgcaaagacatcatatctggctaaggttcttcctgacaaaagcatcacttcatgcaagggcgaggaagtgtggagtggaaccagatgtaataacaacgcaagggacgatatcaatgaacgtggaaattcatggatgtgcactatttgttctaaattgcaactagtttggcatggcttccaattaatatttatctaattttttagggaataatatggaggcatagaactcatcatgaatcatttccctttactgcaatgacagtttccttacgtcacaagctcaattaccttgaagcaccccccagggg

SEQ ID NO: 47613 - DNA, 534 bp, Glycine max
  Clone ID: PAT_MRT3847_142C.1
tctggtttcaggaagcttacgagttttccgcctctcaacttgacctctcttgaaacacttgaactttctcactgttccagtctagagtatttcccagaaatattaggaaagatggaaaacataagggaactttcatttcaatggtgtgagagtttagttgcagttgatgagtcaattggttttctgaagaaacttaaaatattgaatgctgctggttgcaggaagcttacgagttttccgcctctcaacttgacctctcttgaaacacttgaactttctcactgttccagtctagagtatttgccagaaatattaggagagatggaaaacataagggaactttcatttcaatggtgtgagagtttagttgcagttgatgagtcaattggttttctgaagaaacttaaaatattgaatgctgctggttgcaggacgcttacgagttttccacctctcaacttgacctctcttgaacacttgaactttctcactgtccagtcttggtattttcagaatatatgagagatgaaaaca

SEQ ID NO: 47614 - DNA, 502 bp, Glycine max
  Clone ID: PAT_MRT3847_143000C.1
gggtgttaagaagccattgaaaactcttgcagaaaactggtttgaaccaatcttcttgaatttttttatttttttattttaatctaaaacatttttaaaataaataaaagtatatatgaaaatatttcacaaaagtatcaattaatttgtcaacaattattaatttttatcttaaaaaacatataatttagctatttatatttatttacattattaatattaaaaataataaatttaatcatcattggctcaaccataattagatcattaaactttaatgtcttcacaagttcaatcattggcccgctttttaaacattggtctttaatgtctttttggtgaactttgagttcatcttagttagatttgaattttgcaacaaaccactaaccgtgacaacttatcattcgattccattaattaatgccaaaaattagcacttggtgctcaatcaagtctttgtgaaatgatattctacttatcatttttattacttattgat

SEQ ID NO: 47615 - DNA, 1621 bp, Glycine max
  unsure (1)..(1621): unsure at all n locations
  Clone ID: PAT_MRT3847_143001C.1
tttagatcaactgatgtcatttaagtataaccaataatcttaagttcaagtcttgaatatacaactatattaaattctccaataaagctttgccactagttttcctttttaaaataaaaaattacactaagtgtatctttagccgataacttacactaaaccctttcaaaggggagagaacacctaatatgcaaattaactttgaaaatcagcagaaccatgacaaatacctcaaatgatggttaagtgctggcagaaaccaaacagcccaaagcatagtccaggaattctgatgtctgccactcttgatcttatatatataattcacataagaaaaaaggagagagaactagccatatgctatctcctgaagctacttgaagtgtcttccgatgaacccactccaaatgttgtgcagtgatgccagaatctgttccagcatataaaccccagaagtccttggaccttcactcattcatcatgccacatttcttatcatatcatcttcattttttccaggttttagctccaccaatttggccatggctcccacctcaggctgaggaagagtatagaatccacggtggtttctttcgtctcatcttttccttgcattacatttcttagcatatcaagcacgtttttcccaggttttagagctaccaatttggctaagaagtccaacctcaggctgaggcaagagtatagaatccacgatggtttctttcgtccataaattccccgcccggctttgcacctgcttctcctctgcgcctttcaagcctcccccgccggctgcgacccggcgcaacaggtcgtgtcgcctttccctccaacaaatcatccgcttggttagctatgtcatttagatttgctgatgggatatgaatcttcaactcattttcgcctttaaatacaccgccaccagctgcaactcggcgcaacaattcatgtcggctttccttttttggagttctacatagaagaccaattacttgaacctggggtggacattttttggttagatgtgataatactgtctctttgataacttccanacagtgacttgcgcttatcatcctggtcattctcggcaagctggatcatgtagtcaagggccatcatgaaatcagactccatctcatcaactctctttccaataactccttgcgcagccaactccactgccactttctcagattcctcgtccatattcatgtcttccaaaagggtaatcatttcctccaaaacagagatgacttggtcccctcctttaaggagggcttcgcgttgagaagacatgtctgaatgcaactttccattctgattctgctccaattccggatatcctccgcccacatcgtaggcactgttaccattgatggatgccaaaatgcgattcttctttctgttgagttgcttgagctgataagaccacgaagtaaatgtgggacacaaagatcgcaacaaaagggagggataagtgcaagagcaagcaagggatgcaacaaacatctctgaggagtttctcacttcataataataaaattttgtgcctcttgttgcccaaagttttgggttcttcttccttcagggttttggcaagaactaagaatttagc

SEQ ID NO: 47616 - DNA, 320 bp, Glycine max
  Clone ID: PAT_MRT3847_143002C.1
atcaagtggtgccttttaccacaccatggaactgtgactctagcaagcgcagctgatgtcagctatgtattgaccttcggggtggaggactcttagaggacagcacgggcgatcggatcacacttatgcagaatactgccattcgtaactggctgagatgctgacgcttggatgaatggctgacctatggtcaagattgtgatgtttggggatgcaactggcaaaaggagtgattgtgtcttataggtgcatgtggcagtaacaaacagcatcagcccagaggcttatgatgcctgtgcgtgtacagaatcagatctaca

SEQ ID NO: 47617 - DNA, 281 bp, Glycine max
  Clone ID: PAT_MRT3847_143003C.1
ctcgatccgtttttggatcagctgatgtctagggttctggatatgatcttcgtgggggttgaattccttggggcacgattatctgatcctggggtacctgatagctctaggacatagatacatcttttatcatcgtgtgctgcttgcactgacaactgtgtataccggatgtacctgaacatagaccagtattgtggtatggagtctgaggctgcgcccatgacctcctaggaatacgtgagaaagaaggtggggtacatctgtttggtggaacagctgat

SEQ ID NO: 47618 - DNA, 427 bp, Glycine max
  Clone ID: PAT_MRT3847_143004C.1
ggaaaaaggagctttttttataagaaaggtaaaaaatcctttttccaaacattagtaaaaatcccccccgggggaaggagtttaatcaagcattaataatttcaccccccatggggggatgcaaaatatgtgttggaaaaaaaaaaagaaatgattaaatagaggggggggggaaaataaatataggggggggtaaaaaaaaaaatgtgagaaaaccagagtctttgatcaaatcaccaaatatttggttttaaaacttcagggcctactgaaaacccgctttaataaaaaaatcgacggtttaagtcctcaaacatgaaaatagaaatagctgctgtctttttgctgcaacagggcttcacagtttcatatttattttttacaaacaattttcaaactttccttataaaaaaatacaacctttgat

SEQ ID NO: 47619 - DNA, 490 bp, Glycine max
  unsure (1)..(490): unsure at all n locations
  Clone ID: PAT_MRT3847_143005C.1
gggtntggaaatcttttttttttttttttttttttttttttttaaaggcccaaatttccctttttaaaaaaaaagcgggaccaaccctacccattgttggaaaaaaggggccccttgcccaccccccaaacctttttacctcagccccggtgttttatcaaaggggggaaaacccatattttgggcatattgatttcatttttccaccctaaaaaaccccggggggcccaaaaaacccggggggggctcccctccccccaacagggcatttgccccgaaccattttgggcccaaatatgggaaaatccgggagcccccggccaatggttcaaccccccccgggtaaactagcatcccggcccccctccaagttgagtgggttccccacccgaagcattgtttttcttggggggaggcgagccccaacctaaaagggggggggccaccataaaaaccgttggggccccccctatttttgggccggaacccg

SEQ ID NO: 47620 - DNA, 118 bp, Glycine max
  Clone ID: PAT_MRT3847_143006C.1
gtacagactatcatacgagacagtacatatattggaaataagcatggtcagatgttatatgatagcactttgtctacctgtgtgcaacatttgaaagacacatttgcttctcaaataa

SEQ ID NO: 47621 - DNA, 1497 bp, Glycine max
  Clone ID: PAT_MRT3847_143007C.1
gcaaaagattgaggaattctccgtcacctttaataaagtgttatgcaacaatgcaagtttgctacagtttgttcttgacctgtcctatgttctagataaagcaagtgagttcagatttaatgtccttggctacaagggcaccgaagctgaaagtaacagtccagattgcatagataagattgctttgcccgaaaataagttagtacatgacaattcatctggagaaagatatcaaaatggttgttcccatattctcaatccatgttctaatcccgaggttcctgatgatggaaatttggtctcaggctataaagcagatgctgcatcacagaaactgtcaatagaggagtttgaagaattgaaactagagaaagagaaagtagtgattgatctgtcaaattgtactgagaatcttgaaatgacaaagtctcaattgctagacacggagcaacttctggctgaagttaaatcacaattggcttctgctctaaaatcaaaaagcttggctgagacacagctaaagtgtgtggcagaatcatacaactcacttgaaacacgtgcccaggtcttggaaactgagctgaaccatctgcaaatcaagatagaatctctggagaatgaacttcaagatgaaaagagggctcatgaagttgctatggccaggagcaaggagctagaagagcagttaaaaaggattgagtgctcggcagctgatgatgaccacaagactccgcatgagagaaatttgacagctgctgctgaaaagctagccgagtgtcaagaaaccatacttcttctgggcaagcagttaaattctctacgtccacaaactgagccaaatgactcattgtacagtaagataaatccaaaagatgaaggattcacagaagatgaacatactactaatcaaaattttcaagaattaggtcagttggagatggacagttctacttctgcttttgtgcaaagattgagttcggagtcccccttgcatttttccaacagtttatttagcccttcggacagcgagtccaccattccagccagatccccagttcagcattctaaatcaaaaccaaaacaccgacctaccaagtcagcctcttgttcagtttcttctgccactacacctgagaaacatgcacggggatttagtagattcttttcacctaaaggaaaatccggtcattgagctttgcacaggttctattagaattcataaaccgtaagccacttggtgatgacatttggaaagcaccaaggtccaaacccttcatgtttgacagaattgagtttttggggaggtttgtgtaattaaggagggtataccatgagtgccaggtgatttttgtatgtaatggttgtaccatatgtttttttttttcttttgctttttatggttttgccccctctattctgtaatttaagtagcaaaggacaaactttgacatagtatctgaacttttacaggatatattgaatatgttgaacttaaca

SEQ ID NO: 47622 - DNA, 214 bp, Glycine max
  Clone ID: PAT_MRT3847_143008C.1
ggacacttaattcagcggaggttgatcatactctgttgcttgccatcatataaactctagcaagaatcaaatttggacctccattttggtttaataccgggaaaccctccaggaaaaaacagtttgttttaaactaatggtacaaacaatttactttcctgacactaaatctaattctgtactaaaaaccctagagctggagcttttttcttcc

SEQ ID NO: 47623 - DNA, 962 bp, Glycine max
  unsure (1)..(962): unsure at all n locations
  Clone ID: PAT_MRT3847_143009C.1
cacgcgtccgagaaaatgcaaagacatggattggatggatccattgtccatagcataccctaaactaaaccctccattccaaactcaaccaaagtcgttcagagagagtgtttacacaaagcctgaacctcaacctaaagtgaaaaacacacacacttgctagtcccttcacaatcacaaggttgaagaagacatggccgaggatcgcagcctccctccacgcgcctccattccctccgccgataactccgtttgggccgatgtctcccctctcctccaagccgcctgccaagatcttcaagagggagagcttattcatggagacaacttcaatctttttgccgccatgtccgcattggagataatggacccgaagatggattctggaattgcttgtacatactactctctcgatgaagccattgagaatggtgttgctcctgttcctattagtgcggataaaactactgatgttcgatgcatgattgacatcatggaccatctacttgcctgtgaggcaacatggcacaagggtcattcattggcacaaactgtctattcttgcctctatctcctacgacctgaaaggacatcgtcgcatgccctgttgcactcttactgtaaagtcatacgtgcaacctgcaaagcaatcctttcagttgtctcacaagctcgaacacatgaagaagaggatctatttaccatggcatatggccttcctttgagtggagatggagatgaaaagtgtttatcaatgctaaatgctgtcgaagaaacaatatctcgccaattgcgtgcttgtaaggtttcatcgtcaaaaagaagagtgccagaagatattgaaccacttcaaaataatcctgatctggaagaaggctactgcaaagcgctgntgtgtcgattacgttttcgtaagcatttttaccatgtttngatgggtatcaagcgaccccgcggaaggg

SEQ ID NO: 47624 - DNA, 2750 bp, Glycine max
  unsure (1)..(2750): unsure at all n locations
  Clone ID: PAT_MRT3847_14300C.1
cgcgcgcgtcaagttttagagagtgattcgggacactccggtaagcttacggcttccgtgcagtgcgagcgagcgaacgagaagttgtagttattgatttcaatttccaagtcccaaccataaacaaacagacaaatccatttcctcaacaaagaaacacacaccaaaccgcgcgaatcaaaagatggcggatccgatcccggcgccaccaagatccgccacggacctcttctcggatcctctcgacgcccacccgctgtggttcaaaccggcgtcgtttctctcccccgacttcgactccgaatcctacatctcggagctccgaaccttcgtccccttcgacacgctccgctccgagctaaacagctacctatccttcctcaaccacgagctcatcgacctcatcaaccgcgactacgccgacttcgtcaacctcagcaccaagctcgtcgacgtcgacgccgtcgtcgtccgaatgcgggccccgctccgcgagctccgcgacaagatcgagcagttcagaggatccgtcgaggtctcgcttgtcgccatcaagaatcgcttgaggcagagatctgaggtggcctccgctagagagactttagagcttcttcttgatgcgtttcacgtcgtttctaaggttgagaagctaataaaagagctgcccagtgtacccaccgattggtcaaatggagatgtaaatttgtcagagaggaataacttaagcaatggagtttctgcgcagcatgttgagaatgaaatgattatcagagagactcaaagcatgctgctggaaagaattgccagtgagatgaaccgactaaagttctatgtgacacatgcaaagaaccttccttttattgagaatatggagaagaggattcaaaatgcaagtgtaacagtagatgcaagcttgggacattgctttgtaaatggtttggagcaccgagatgcaactgcaattttcaattgcttacgtgcatatgctgctatagataacactaagagtgcagaagaaatttttcgagttactgttgtggctccattgatacagaagattatcccacatggatcatcagctgtggttgctggatcatttggggatggtctagaaaatgattatcaactaattaaggagttcattgataaagactgtaaatttttattggaaatttcttcagctgaaaattcaggtttgcatgtctttgacttcttagccaattcaatccttaaggaggttctctctgcaattcagaagggaaagccaggtgcattttctcccggaaggccaacagagttcttgaaaaattacaaatcaagcttagatttcttggcttttctagaaggctactgtccatccagatctgctgttgctaaatttcgatctgaagcaatttatacagaattcatgaagcaatggaacattggagtatatttctctttgaggtttcaggaaatagcagggtcactagattctgtgcttacaacatccagtcttgtccctgttcaaaattcagatgctggcgaagcaaattatcaaggtttaacattaaagcaaagtgttactttgttggagagtttgagatcatgctggagagaagatgttcttgtcctttcttgttctgacagattccttcggctatccttgcagcttctttctagatactcaagttggctgtcttctggactgactgctcgcaaaaaccataacacaagcactagccctgggtgtgaatgggccgtttcagctgtcatagatgactttatttttgttattcatgatataagatatttggaggagcaggttcatggtgattaccttcaacatgtgcttcagcttttgtcttcatgctcccctgatgttctggaatcaataaggcagagcattttactgagtggtcaatcattaaaatctgtagaaccgttagtcattaaagcagtggtggagtcactagttgaaaagtcagttgaggacttaagacaaatgaaggggataacagcaacctataggatgactaataaacctctacctgtgaggcattcaccatatatttcaggggtattacgtccccttaaggcttttttgggtggggagagagctacaagatatttggtcagtgaaactaggaatgaaatactcctctgtgctgcaactgagattactgaccgttattatgaattagctgctgaccttgttagcgtggcaagaaagacagagtcttcactccagaaaattaggcagagtgcacaaagacgagctggagccagttcagatatcttagataataatgtgtctgatactgataaaatctgtatgcagttgtttcttgatattcaggagtatgcccggaacctctctgcactgggggttgaagcagccaatattgcatcctaccgttcattatggcaatgtgtggctcctgcagataggcaaaacacaattaatctctaagagtttgctcctatggagttaaagcggcttgtagattgttttcctctgggtctagagtttccttttgtaacttaattttgaaatccattatatagctttacacaataatcacaggttatcatggttcttaaaagggaagaaaaaaattattttgctcgtaactgttatctttaaggttctctgtagttactacgatagcagatgtgatattctttgtggcattgtgtttcttatcaaaaaaataaaccaactggaaaataatgaactctntaaaaacccttcacctgtaagacatact

SEQ ID NO: 47625 - DNA, 130 bp, Glycine max
  Clone ID: PAT_MRT3847_143010C.1
gacagaaaggggcagacgcaggtgcccttacacttaattggcccactatcctatgcatgcctttgacttggcctatcgaatattgacagtacgatatatggcatgttgattgcttggtaggtgcgtgagg

SEQ ID NO: 47626 - DNA, 611 bp, Glycine max
  Clone ID: PAT_MRT3847_143011C.1
ctcgagccgcttgtattttatccatttggttgatgctgttcaagagaacaaagttccttattcttcatcatcaacatgagtcgcttcaacagcaagaatcccctggtgagttttgattatatcattcagcataatgttagcaaaatggtttcatgtgtgaagtttcttttgatccaaatagattgacaccatatttgcatgctcaatgttcattcaataatatgtactttcttttacataaagcttaagctaaaattaatttgttacttttcatgagaaatgtgagtgtatttctaaatgggattaatgacatgatattatgatgcagcagtatcatatcctccagcactgtatgttagtgccccaccacctatgggttatccttgtgatcctacagctgtagggtacccccaacaaagagttgaagaaaccacgggtgatgaaagaataaggatctttgtcctcttggacagcttgtattttatccatttggttgatgctgttctttttccttgtattttgaatttttttatgatgtatttaggtattattataagattttttttattattaataagagtaaagttatcctagcacaaagctgtgaatac

SEQ ID NO: 47627 - DNA, 308 bp, Glycine max
  Clone ID: PAT_MRT3847_143012C.1
gatcaggtgttttttttttaaagttttacagtttcaacttacaactgacaaggtttttgttttttatacacttcaaacggagagaaataatatacttttgagagtcatataatactccttttttcaaaaaaacaaaggaaattgcctgtttgctgacaatttgggaaaggggaataaaaagaactaacgccctagaatgacttatggttgttttttttcaaaaaaggggcctagcacccctttgacggcaagctgaaaaaaaaaaacccaacacctttgggttttccccattaatacagaataaaacc

SEQ ID NO: 47628 - DNA, 564 bp, Glycine max
  Clone ID: PAT_MRT3847_143013C.1
gaacaatcaccatgatgattatcgttcttggatttaaccaatcttaaacatggaaacaaattaaagaggaatccttacacagttgggattttgtgttgagacatacagtggaataaatgtacaacaatggcacaaatcctttgcaactatgtttgcaatgaatgatgatgatatttttgtattctaaatcaatgcaaacttgggtctcctttccttctcttctggcatcagattcatctactctcttacaagaaacaaattgttgagtctatcttgaatgtcaaacattccatactcaatgtgctcataagcttggttaccaagaaaatcctgcaacctcccaatgaagtttccatatgctggcaacaagatcttttctatggattctatcattattctccttagctccttagttaagacaaaccacgcagactgaacgttgcatatatcatccaggtgtccgttgaaggaacaaagcttgtttttcattaacttagctgcaacattaggctctgactcattgatgtccagtttcaaaatgttcagaatcttattccatgagct

SEQ ID NO: 47629 - DNA, 709 bp, Glycine max
  unsure (1)..(709): unsure at all n locations
  Clone ID: PAT_MRT3847_143014C.1
ccacgaggtagcaagagagacacgttcttaatttttcttaagaagttatatcaatttggcaacacaatttgattacgcttttgttgtaaaaaaaaaaaaaacaacaaaagagaggggggagcgatgatgaatgggattggtaacatgaagatgtgcaaatcagagagcgcgttgaaaacgttgttgccggagaaacgaatcaaacgtcaagcttcaggggcggaacgtggttgcagtaagggcagcaatggtattgcaacgcaatctaatgtcgatgacaagaggaagatggagaaagctgagaatatcatgcatttgatttgctggggacccacctggtcttagatcttactaaattttatttggggttttattttgtgtagtaatgaggtgtcaggattttataataactcagacacgagctagatccctttacaaatactatttgggtttgtttgttcattttatttttacctttgtaataattattttctgttggttggatttcaaattttgcaatttcacgtatgtgtacatacggaagaagctacgtttatgttcttcaacccctgaatcagtttggagctatttgtttagaggcaaggaagaagaatgtttaagtatatttttagtgtatgtaaatatgaggatttttggttttcagtttgtagctatacgtttatatttcnntatccttaactataagtat

SEQ ID NO: 47630 - DNA, 401 bp, Glycine max
  Clone ID: PAT_MRT3847_143015C.1
gtggtttttttttatgcagtcaataacatttattatggcttgatggctaaaaagaggggcgtcctgattacaattatattactatagtgcacactcagaaactatgcatttccttatcaagcgtgccaacggacacgacagtgctcaagaagcacaccggaacgataaatagacactctcacgacagcatgcgtggagaactctaattcacgttggtgaccgatccatccttggaggatgtgcattttgtatcaggggctgcactgccccgcgagctactgtgcactttcgtgggccgcgactctgatcgctgataacgcagggtgtatgcgactgcatccagataccaatcgccacggccctgtaaaccgagaacacagggtgcatttatcgtaaaagtg

SEQ ID NO: 47631 - DNA, 101 bp, Glycine max
  Clone ID: PAT_MRT3847_143016C.1
gttttcttacttggagtacagcagtgtccagtcggaatgctggattatattcaaaaggaaggtcgttgataccaccccatttatgacggaacatccactag

SEQ ID NO: 47632 - DNA, 264 bp, Glycine max
  unsure (1)..(264): unsure at all n locations
  Clone ID: PAT_MRT3847_143017C.1
ctatgaccncgcccgcgcgccgtcgcctcggaatacggctggagcacgtacccggttactctttttttaagacatactttggcgaaagcttcagatggaccactggcgcggctagtggctttcctgacatccattcctgctcaatttggcattgcgttttgggacaaggcttaccccaatctcatccagtgcctgatgagccccaatatccataaagactattaccgaatcctatcatccctcgctattagtaactttcctaat

SEQ ID NO: 47633 - DNA, 238 bp, Glycine max
  Clone ID: PAT_MRT3847_143018C.1
cataacctagaattgaaaacggtagctcacacagggcgagggtcatgatatgcccatgcaattaaaatatattttatcatgtaagatggcttcttaagaatgtgaaaactatcccttacagttttccattaggagtgaaacagctatgaagcttaatacacttattagtgctactattgattttttacgacttggatggcactcaatattgttattatccctatgcccaatatattaa

SEQ ID NO: 47634 - DNA, 264 bp, Glycine max
  Clone ID: PAT_MRT3847_143019C.1
gaaagccattgtcacagatgtgctaacttcaacaatgggttctagcagattataagacatggtaatacttgcgctggtaagcgtatcatacatgatcattgactcaagggttgtagagggacgtacactgccaaaataagacttattgccttccaaaggtgatatacctactgctggtcctcttacactggtggcaccactgacaaatttgcctgttactctctctccagtgactgaactaccttcagtacctaaagtaccaat

SEQ ID NO: 47635 - DNA, 456 bp, Glycine max
  Clone ID: PAT_MRT3847_14301C.1
aattcggctcgagcggctgcgagaagacgacagaagggctaatttatttcaagataatttgtaataaaaaaatagttgataatttataactaatttgtagctaattatttttaaatatattttttttgtagtaaggactaaaagataattaaaataaaaattttagaaactaaaaaaattactttcaaactatagggactaaaagattattaaaatacaaactataaaggctaaaaaaaccacttttaaactagggactaaaagagaattaaaatgtaaactatagggactaaaaaaccactttcaaattataggaactaaaaagtacgaatcgtgaaactatagagatcaaatgagtaatttaacctaaaaatgataacaaaatatttataaataacatatcaattaaatattttaacaatataataaattaaaatagtaaatcataaatttcac

SEQ ID NO: 47636 - DNA, 1130 bp, Glycine max
  Clone ID: PAT_MRT3847_143020C.1
ctgaaggatacacaccacatatcccatgggcaatagagcgcattcaatgtgtttataagccaaacaggttactttgtttaagcaaacacaagtacaaagtaaaataaaaccacaaaataatgaacttcatgttcataacatacaaaaactgcagcctactcagtaggtaaccacaacactccaactcctgaatagatgtataaatttacattttcagtttagaaaaatagacttttgagagttcagatttttgtttaaattttttcttcttacattctggagaccgaaagctcagctcagccctcttcctcgtttttgctctcaaagcctcccccaaaacatcactcctacccccttaaggctaaggtgagcgtgtccctcacatctgcgcatgtcaagccatcggcaaggcgtgtcacacaaaaggcaccaagacgtgaaacttttgaaaccaaagggacgggcaaaaaaattctcaaaaacaaaacccaaccaaacaaaccatactttgtcacatgtgagagttacagtcgagcagtatttacaaaattaacggaacaacactctgacacatgctccagttaatacctaggactgctgcttgaaaaaaaaaaatgcttcaaacctaatgtcacagcagagtcatcacaaaatagaggatcatcattggtttgcttggctttgctcccccctcccccaaagtgaggatttaactccaaataatacaatagagtatgcaaattatcttcacatcaagaataccccaaggaaaacaaaatccatggcacagatgctgtacaaagatgcagggcagggttctgagggcccaaacccatttttttttctttatgccaacttgatggtctagcgctgaagggagcaagggccaggcatgtgatggagaggatactgaaatgatttatccaataccatgcaaatcaagtcctttggatagaggtgaagaacttggacatggctgttaggcagctgaagtcaaagggaacaggacgggggaggcagggatggtaagtgaaagggctgttggccaacggtccttctactcgtgagtagaaggacttggctctgagatcttccatctgacctaagaggtggcccctcttgcggccatc

SEQ ID NO: 47637 - DNA, 335 bp, Glycine max
  Clone ID: PAT_MRT3847_143021C.1
ttccatccatttctttggttctttgcttttgcttagtgggcttccagctgtattcatggacttggcggagaagcttttctttgcagcatttctcattctttccgtggccattgatggaatgcaggcggacactatggtcactggcactgtcttctgtgaccaatgcaaagacggacagagatccctttttgattatcctgttaatggtcagatctaagtccttcagcatttttgttcttgtctctggttggaacctcaactagtgtactccacatgcacgaaacattttgttttcaagtaatggcttattcacaatcttatttaattatgttttg

SEQ ID NO: 47638 - DNA, 420 bp, Glycine max
  Clone ID: PAT_MRT3847_143022C.1
gcaccagatcatatgaaaaatataatcgattctttcatttgtttggactagtagtcatccgtgaaagttttgggtttaatattgatattttaacaataaatccaataaatcttagtgtaatgttagatatattgattttttttttggaaaagaagtgtgtgcgagctgcttatttcaaagaatagagagatgaaaaacaacttcatgtttactacgtgtatacatttggactttggagtatctggagaaaggaaggaataaaagtatgcacgtatcatgtatggttccatatattaactttatatctcgtttaatttacaacgaaaagggaagaaaattagttttttttttctttcaatacgaagataaaaatattataatttatattatatctcatgttttactattaaggcattatct

SEQ ID NO: 47639 - DNA, 389 bp, Glycine max
  Clone ID: PAT_MRT3847_143023C.1
cttattgtaacgccttactgataattttctttccgggtatttgcttttcgcacatcgaaatcgtataatttggattcaaaatacgcggtttagcgcaggaatgaacgaacaatttatgttgagaatatgagattagacacgtggatattcattaattcacgctcgtgaagaggaatttgccactggattgaatgggctctcacagtcagtgagaccgaaaggcatatgcgcttggagaccttccgagttcttcccgaacaacatcattgctgtatgttggaacgtcttactcgcctggacgctgctctcgtctgttgcgcaccagagtgaaggacatactgtgcaatgaagatccactgggggtgagtgtatgcctaaaaggagcatct

SEQ ID NO: 47640 - DNA, 457 bp, Glycine max
  Clone ID: PAT_MRT3847_143024C.1
agggaaaattttatttgtttttttttttttttttttttttttttttttagggaaaaacacagttcttgattttcaaaaaaaaattttggggggtaatgaggaaccataatttttacacggggtggaagcacaaagtttaaccctgctcccataaaagggaaaaaggtttcgaagaattaaattcaattttacacattatggtttggaaaaaaaataaaggagcgaattttttttgcccaaaaaaacttttttttttgaaggtggaaggcccttaaaaaaaaattaaaaataatgattccccccttttttttttttaataattttccaaacccaaaaaacctaaaataatttttaattggttcctttcaaacttcatacaatttcttttttcaaaaacttttattatgaaacaaaaaaaacatttccccgcaaatttgatttttttttcccttttttt

SEQ ID NO: 47641 - DNA, 138 bp, Glycine max
  Clone ID: PAT_MRT3847_143025C.1
ggtttgtataagtgcaactcatgctagtctatttgattgcaggattccccaagagataaccaattccgagcagacaccgcaccctctagagccttaaacaatctatttgactctcaccaccacaaaggagctcactga

SEQ ID NO: 47642 - DNA, 130 bp, Glycine max
  Clone ID: PAT_MRT3847_143026C.1
aacacctcctggacaacttctcaaatacaatcccacatcaaatgacactattattgttcttgataatgttgcatttgccaacagctttacactctctaaagaccaacattatcttgtactttctaaaact

SEQ ID NO: 47643 - DNA, 179 bp, Glycine max
  Clone ID: PAT_MRT3847_143027C.1
ctccgacaagcctctaaggcttccattgcaggatgtctacaagattggtggtggtggttaagtctgttgagatgcaccatgaggctctcacagaggctcttccaggtgacaatgttggatttaatgtgaagaatgttgcagtcaaggatctcaagcgtggttttgttgcatccaactcc

SEQ ID NO: 47644 - DNA, 935 bp, Glycine max
  Clone ID: PAT_MRT3847_143028C.1
cttccgctttcgctcgctctaacttcctctttctctcgaattcgaagctctttctctgtgtttctctctctctctctctctgtccctctgtttcttttctctctctcatggcaccggcacgtgaagagaacccttatgaaggcggcggcgacggcggattcggcaaattcagaaaacggcctttccgcagaagccaaacgacgccgtacgatcgtccacccacagcgctccgaaaccctaaccgaaacaacggttggttatcaaagctcgtcgatcccgcacagaggctcatcgcttccagtgctcacaaactcttcgcctccgttttccgcaaacgccttcctccaccacaagaagcagtacaggaagtgagggaccatcaccaggaaacagctctgattattgcaaatgaatcctctggcaagcaagtagtaggtgaaactagtgtccaaattaactgttctgatggagatggattaactgaacttgagaagctattaaagcagaagactttcaccagatcagagatagagcatttgacagaacttatgcgttcaagaactgtgggttcatctgttgtggaagaagggacgagcacagaagtggttccatcagatccaattttgcctcgtgaacaaaaggaagaatatcccaaaactccagatccagaaaatgcgattgaaaaccagcttgtttcaaccccatacgttactaaggctatctccactgtttctgttgacgatgttgcttcccctgcggagcttgccaaggcttacatgggtagcaggccttcaaagttgtccccttcaatgttaggattgcgaagttctcccagggaggatccatttctactaaaaaatcagcatgttgctcagaaatcccctgttaagtcaattgtgccgaaggctactaaccttgctagggttcatgaaaat

SEQ ID NO: 47645 - DNA, 451 bp, Glycine max
  Clone ID: PAT_MRT3847_143029C.1
ctttcttttttttttttttttttttttttttttttttttttttttttttgggggaaacaacaacgggtctagatattgctttatgaaatctgaccaccaatggctttatttgatctatcgggagacatgaaggggggcccaaggaccactcctttcattgccaggaactggtttgcccaccaggctggtttcattagggtcactacctccaaaaaattaggggtctcaaagaagataaaaagaatcccctcctggttgactgggacaacccttgggttttgatatttttaagagacaaaagagaggaatgtcccgcctttattccgggaaagccaatgtgatatgatttactcccatcaaccttgaacaggccgttgttcttttaagatgaatgcccaggctttttgttcttgttgaataatgcaaaaatgtgtgccctcacaacattttt

SEQ ID NO: 47646 - DNA, 324 bp, Glycine max
  Clone ID: PAT_MRT3847_14302C.1
cgcttatcctttatggattgaacaaacttgccaccgttggacctgtcaacaccagcgcgactgaaatgtacaacacgagggacatagctaaactggatgcatggaaggccgttcgaggggacatccaaggacaaagcagtgggtgattacatcaataaggtggaacagctgctggaagcacatgacttgcctgctggataacagatggatgacttgctttctgcatactgagctagaaggtcacatcagctttgagagtaacaattgcaaagctttgaagctgttattatcataatcatactgatctctaacgattaagacatg

SEQ ID NO: 47647 - DNA, 1365 bp, Glycine max
  Clone ID: PAT_MRT3847_143030C.1
atggaattgtcatcctctaacaaagtgataaatgcaggttatcatgtatgcacagccataggacgtggccctaaaatagatgttgatattattgataagaaaaacccccacactggtgtcattgttaaaatgtcaaacagtggccctaagtacaactgttcgctagctgtgtctgttctttgcaatttaaatggagtgcaaggaccgcaagctctggagagattaggggcctgtgattatgttactgagctaaagcacccatctggctgtgccatcattataaatgttcatggaggagggtgggggtggtttggcaccttactgatcattgttttgtgcctttttgctgcatatctcttggctggtatagtttaccgatttttcttcctcgggattcgtggtatagatattatccctaaccttgacttctgggttagcttgcctaggagaacacagagtctgtgtacatctttggtgaggaagtttaagggaccgtctgaaggtcaccggacgcacttattctcctgtgaacttctgagattagattttcgattctggatttgtctgatgaattctttaaggctaatctccaaaacgaggccaacattctgccgacaatgcagaaaacccccttttcagataccctatcgatcagctctgggcttccttgatatggaacattccacagaaatctgtaattcttgttttgattgtccctccatgaatttagcatttaacattcttttgtctctctctgaaagaagagaaagaggaggaagaagaagaaaaagaagataaaacaaaaaaagaaggtctagcataattcttatagaaaagaagaattgtaatggagctaatctaatcattttggaagacattctttggttgataatcagataattgaatgaaattgtaacttgttttttgttactttgaccattaattcattcttgtttctcattttgtaatcattcttgcatttctagttagttttatatggatggggtgtatgagtgtatctcttcatgctgttagctttctgccaatgaagcccgggtatattttaaactacaggtctttgaaccgtttgataaattttaatcaagtctttaaacttgtatttgtttttttaattaatgtaagtacgtatgaaatttgatcattctcttactatattttactaattatattgtttaaaatataatagaatgaggaaaagaaaaaaggcggcggccgacgaggggggctcgtcgacgggggaattaattgcggagcggtacctgcaagggtaccagctttccggagagtgagtcctatgagagctgggggtggtcaagggcagagctgtgtcgtgggtgaaagtgt

SEQ ID NO: 47648 - DNA, 209 bp, Glycine max
  unsure (1)..(209): unsure at all n locations
  Clone ID: PAT_MRT3847_143031C.1
gnttgatgcatttaatagatcacatcaccttatttgaaagttttctacacacactattttaatcaacgaaagagaacgttggtccactaccacaaactacgacgccatgggggcctttacaaacaactgcacagggtctgagaacacccaaccggaaactgatgacggaccaacctaaccagtacgataggggaccaacatcgggcccg

SEQ ID NO: 47649 - DNA, 373 bp, Glycine max
  Clone ID: PAT_MRT3847_143032C.1
ctagacacagttaatctccttactgacgggcagaagaactcacacacacacactttccattttttgtggtactgcttgtgactactataatcttcaaatacctttgatgctacacgatgatatgaatccctttatggcaagcatctgtatatcacctagggagtgcaaaaagagtcagacttagaatactgttatggaaggccaagcgattgaagaattgagagccagtttcttatgatccgtctgctaagaaattattacatatgctttcattcagacacatatggtagcaattgatccctaacagcttgtttctttcttgttggattaaagggggtgtgtatgctaaacctgttgcatacattttttaata

SEQ ID NO: 47650 - DNA, 164 bp, Glycine max
  Clone ID: PAT_MRT3847_143033C.1
cccacgcgttcgaccacgcgttcgaaaaacttttgaaagatattatccaattgaaatttggaaaatgactgggataaacttaagaatttaattattgtaatttaatttgtaaactattaaattcgattggtcgtatggacttaataaatttgggtactatgttt

SEQ ID NO: 47651 - DNA, 642 bp, Glycine max
  Clone ID: PAT_MRT3847_143034C.1
agaaggtagaggttcaatcagaagaatctgagatttaaccgcattgaattcatcgtttaaaccagtcaagaaacgcataacatgaagcgtatgatgatgacgacgagcaagacgcatcgcatcacaagaacaacgatgatgacatgtgcaatttggaatcggcatgtaaatttcaagttcttcccaaagcgctttcagatcagaatagaaagtagttacagatcgagtaccttgagtgagagcgtaaatctcttgttgaatttctgaaacacgaaccaaatcaccttgtgagaaacgctctttcagatcgagccacacatcggaagcgttatccatgaaaacgatggatcgggaaatggaaggttcaacggagttgagaatccagctatgaatcaacatattgcagcgattccaagctcggaacgacggatcgaaggcatcaaccggcatcggaattgttccgtcaagaaattcgaacttgagtttggctccgagagcgcgtcgcagagacctcgcccaagaatggtagttggaaccatcgaggagtggtgtgaccttgacggaggagggaccgtcgctaggatgaacaaagaacggactagtaggatcagtagagggatccgccggtggcggtggtgctat

SEQ ID NO: 47652 - DNA, 161 bp, Glycine max
  Clone ID: PAT_MRT3847_143035C.1
aattcggctcgagggaatttccgtctgaggttataccctttgaacccaccaaggagtgcatctaccacggcgtccttaactgagagcaggatgagggcattctggggccctgcatatcgattaagaatcctacaggctgcaatgaggtgataattgtctga

SEQ ID NO: 47653 - DNA, 427 bp, Glycine max
  Clone ID: PAT_MRT3847_143036C.1
gggcccttaaaaaattggggccccaaactaatttatggaggggggaagttcaagcaacgggcggacaaattaaaaggggaacatgaactggagagaaataactaaattttggaatccccaaaaatgccagagatcaaaaattgggacttcaaaacttaaatatataaacctctcatcataagaatttggcgaaggaatcattagggggggaaaatggcactactcaaccttaggggggcccgggattcaaaaaaccattttgtttagcaaaaggccaagttatgggttccttcctcatcctttttggggtgggtgagcatccatttggtcttttccagggacttctgatagatcaacattgggaccacgggccatgaaaggcaagaacattttattaagtgtctccaatttcttaacctcttgggct

SEQ ID NO: 47654 - DNA, 539 bp, Glycine max
  Clone ID: PAT_MRT3847_143037C.1
aagcagacaccccgggaggaggccaaaaccacaataaccccgtcgacccacacgcgccctttctaccacacaaaaccggcaccagaccaatgtgagaagtgaaaaagcccaggggtaccaaacaagaacataaagaacgcgatccaaaacagagcaccagacaaacagaccaacaaaaccacacgaagaagagggggcaccactcctaacctacaactaacatacgcaaaggccaaaccgcacaccggccaagaaacccaaagagcccacccaacccctcgcagagacaaccagaaagacactcccacaaagcctcaaacaacacgctagagccatcccaagagctacactcagaagaaatggaaggaaaacccccaacgaaggaatcccccacaaccatcccaaaaggccagaaaaaaaggccacaaaccacaaacgcaccatgccacaactaccctagccacaaaacaccaccacccaatgccagaaggaaacccaccgcccctttgccaacaaaaaccacccaacacaacaacaac

SEQ ID NO: 47655 - DNA, 374 bp, Glycine max
  Clone ID: PAT_MRT3847_143038C.1
aaaaagtgaatccatgcttcctttatggaaatattcccggcgcatcagtttggaggaattgcatagatcaattgatttttcaagaatatgtatagattctagtaatcatcaagctgatcttgtggcgggaattgcaaaagcttgcatcagctatggaatgctggggcgcaatttgtcgcagttatgcgaagaaattcttcaaaaggagggttctggagttgaaatatgtaaggaattcttagctatgtgtccaatagttcaggagcaaactctaatatacttccccaaagccgggcatatcaggtgcaagttgatcttcttcgtgcttgcaatgatgaagggatggcatgcgagttggagcacaaagtttgggc

SEQ ID NO: 47656 - DNA, 267 bp, Glycine max
  Clone ID: PAT_MRT3847_143039C.1
taacgtgctgaaaaaaggaagtaatttggatttctaacacgaagtttataaaattaaaaagagatgatttgggacctaatacacggaagtataataagggagaaagccaatatctattcacgcctgtgatttttatgaggcatttttaacaaggaacaaacaaacttattccacattcctggggagactattttgtctaactacaaaatgcacccggtgatcaaatatcaattgggtacccggaaaaacgacggattgggtttaact

SEQ ID NO: 47657 - DNA, 304 bp, Glycine max
  Clone ID: PAT_MRT3847_14303C.1
aaaaaagttggaatctgaaaatgggttcaaacgttccttaatgtttttgcaccaacaatggcaaattttcctcccaagagcttttatttttcactctgatttcactggcgcctctgggttttatgtgagaagaaaaaaaagggcgcaattgtggtgaaaaacccccccaatttacgcccctttaaagggggccagatttattgggggaaattgccccttaatagtgaatgccacccattccacccgttccacccaaggggggaaccttcttatgggcctttggggggtcaaacacaaaagcttt

SEQ ID NO: 47658 - DNA, 282 bp, Glycine max
  Clone ID: PAT_MRT3847_143040C.1
ccttatggtccccccacgcaatcacagacacgggggggattttaagactacatgtgcgggatctactactcccttctcctacggccaccaaagctccagcaagaagatagagatacataatggcaagcatagatcacattattggtaaaagcgaacagactatatatgcatgtcacatacaaaggagaaccaacattcaaattactcttgcactggatcccagccctaaggtactcactacgacaccagatcctatctctgactcccatagcaataccctct

SEQ ID NO: 47659 - DNA, 176 bp, Glycine max
  Clone ID: PAT_MRT3847_143041C.1
ggagactggaattacacactatatcttgctattctagtgattgactcatcgacttaattcgtgctaagctcacagatagatgacgctcaaatcacatcattgcgctcggcctgtatgcgtggctcacgctgatcctatgaccctactgacacaatgggagctcgtacactagcacc

SEQ ID NO: 47660 - DNA, 350 bp, Glycine max
  Clone ID: PAT_MRT3847_143042C.1
ggctcgaggttagaggctggctgatggggtcaagagacctgcaaacgtgcaataactgctaataggtacgggaccaggaattggggcagaggtactatcacaccacgagaactagtccttgtatactgaacacaaaacgtgcaccggtctgtggctgtggcaacaagaagctggcatattaaaagtggcggctatggacaatacctgtatatcacaagggtgggcgcgtatgatgatcttgatgagatgaccagggtgccgaatactatcgaccatgaccttattatcatcaaaaagagttggccgctattgaaaccaaagctggaacggaggttgcaatacatggggat

SEQ ID NO: 47661 - DNA, 393 bp, Glycine max
  Clone ID: PAT_MRT3847_143043C.1
cgattttgttgattccatcaaacagaatatgaatgtaaaatacgtttacatgtggcatactttaactggttactggggaggtgtactcccatcatcagatgcattgaaaaaatataatccaaagattttatatccaattcagtcacctggaaccacagggaaccttagagatgtagccatggacatctactttgactccatctacaccacagcttgcaaggtaactgtgggaatcattgtaaaagtcatatagtttttctgggtcaatgattcccactccatatttttccaagggacagcaggctaaaagcccttgctggagtatcaggattttgtcaggtaagcataccgctagggatgtataataacctttccctattaatttctctggtg

SEQ ID NO: 47662 - DNA, 185 bp, Glycine max
  unsure (1)..(185): unsure at all n locations
  Clone ID: PAT_MRT3847_143044C.1
ccttctcttaagtttcctcaagatctgcaaaccatggctctcangaaattctagaaccctcactccggcgggggggccagtccaaacaaaatcttcatcggagggttaaccaaaaacaccacccttaaaacgttcctgaagtactttgacaaataccgggagataacccactcccttataataaa

SEQ ID NO: 47663 - DNA, 325 bp, Glycine max
  Clone ID: PAT_MRT3847_143045C.1
gtcgacccacgcgtccgcggacgcgtgggagcaagtttgcacgcaaggtagtagtggagggtgcttttcctggataaggaagaaatttagtcaaagagagaaagaaagacaacaaagaagggataacatgtttttcactcacttcaaagtttgctagagaaagaaaggaagggtgaaaaaaagaagggaaaaagggctatataggctactactactgtaatagagagactgtgtctcttttgaaaaattctctcactctctctttatgagcaattttgcagtgcttattaaatatggccagaaatggaaatgtttgtttagaaca

SEQ ID NO: 47664 - DNA, 187 bp, Glycine max
  Clone ID: PAT_MRT3847_143046C.1
gcgaaatcgaataagaaatttggctcaaagcctgaaagacaaagcctcggggttcgatgaggggctattcacgaatcgacacgtgtcctccgttcgcgtgcacgtgctacgcgccatcacgcacgccctcgacgagccgccctaagaggaaacaattttcgacgtcctagaggtgaggtcccaccag

SEQ ID NO: 47665 - DNA, 320 bp, Glycine max
  Clone ID: PAT_MRT3847_143047C.1
aaacttagtcagcgtatccacccagggctgattaatggcacctggactgagcgatgatgacgcatggaacaagggcaaccctggcataaacaataggcatccgcaatggcctaacattaatgaaattgtatcggctgaaattctctctatatacaaatagccgaagctatgcgtactgaaaccaaaaagacagtacaaacgcatgtttttaacaaagaacgtaaaaggaaagcactttgctatcttgctggtcacatgaacagtaggacgtctactatgaataaggactcacgggacgattacatacacgatggaacaag

SEQ ID NO: 47666 - DNA, 433 bp, Glycine max
  Clone ID: PAT_MRT3847_143048C.1
gcaccttcttgggcttggggggggggggggggggggggggggggggggggggggggggggggggggggggggggacgagtacaggcccacaactgttggaaacattcaaaaaataatacccaactcggggaaataaaggccttgcggggaacgggattccccagctggaggaggtaccgaagaaacagtttaacgcctattagggggaaccgggtaaggtttgtgggaaatttcggaaaaggggggtttaactaatggtggaaaaactaggcggaattggaatataaaatcattggggttttattaaaagagttccaagaaccctaacggatttagggaatagggctacagggggtaaaataggagttgttgcctcggccatggcattagggcttgcccggaaattttctcggggtttggttgcaaactttgg

SEQ ID NO: 47667 - DNA, 1204 bp, Glycine max
  Clone ID: PAT_MRT3847_143049C.1
agcggcgcgccgccttcccttctttctttttttttttcttttctttttttttctttttttcttttttttaacacaaaagttcaggtagcagttaagatagcaacaagcttgtgagagtacaaagttatattccctgtaagctacaaccaacatgtgatgaaatacagaaggggaaaccacacaggatagtacattgattatttcacttcactactaaaatcagttttcttctaaaaatctacagtgactgctcgtattcccttgaacaagggaagcaaaagatcagaagaaagctctgctgccataaaacacacgagaattattgctctttgatggctgtagtttctgctcagtggttgaatttcctgaactagttggttcactttccaagtccatagggagcttcatttttgctagtgactcagtgaattgctgcatgcttttcatgtacatgtctactatatcctgctgcacgacctttggctcgggttcaatgttcacagtcacaacaggcttagggaatgattcactaggaaccccacttgaggaatcactctcactatctttggtatccacatttttgtcctctttggtgcctgaaacttgctcctgaatgggagacttggaagcagcagcatcagatgattctgagtttgctggcactgaaggggaagaaaccccatttgttgacacactgctaggaggggaatcaaccttagttggctgaacagactcaacactgcatgctgagaagctttccacaagccgaacaccggcttcggaactctggttttcagcatcagaagtagccaagctatcggaacattgagtctcctcacacggaataccgaagtattctgaaaccatcaagtggtcttcattgacaatcttcggatccgggaactcgattttgtctaaatccctggccagtgactcggacgtttctgagtcctgcactgcggcatctgtggccaccttgttcggcattgcagaaattgtcataacatcaggtgaagcaccagtgtaagaaagcgacaactgaacaaaacccgaaggagaatggaatagatcagttgaagaaagagagaactctttctcaagtttcccattctggactagtacttcagacaagggtaccaaagcaaaaccaagcaactggtcttcaagatagttcttcaccctgctaagcatccatatctcacac

SEQ ID NO: 47668 - DNA, 349 bp, Glycine max
  Clone ID: PAT_MRT3847_14304C.1
ccttgggggggattaaaaataaataaaaatgctttagggaattaatggtcctttttttcccgggcccgtaaacttaataaccggggggggaattttccctttttcccaaccaatttcttttcttttaatggggggaattaacattacttgaacatttttttcaattaaaaaattaaattgaaaaaaccggcctttctttccaggtttggggttttcctttccaacaacctttttattactaaaattatttttttttttagttagctcctcatcactggggttttttttttgggccgcttcttttttttcaggtttagcattcttttaacaatactttttaacccttttt

SEQ ID NO: 47669 - DNA, 1895 bp, Glycine max
  Clone ID: PAT_MRT3847_143050C.1
ggaggggaaataagatttcaaaattattggcatccaaatcaagagaacgacaaaggaagaaggtaacacaaaagttcatgtagcagttaagatagcaacaagcttgtgagagtacaaagttatattccctgtaacctacaaccaaccaacttgtgatgaaatacagaaggggaaaccacacaggatagtacattgattatttcacttcactacttaatatcagttttcttctaaggatctacagcgactgcctgtattctcttgaacaagggaagcaaaagatcagaagaaagctctgctgccataaaacacgcgggaattattgctctttgatggctgtagtttctgctcagtggttgaatttcctgaactggttggttcactttccaagtccatcggaagcttcatttttgctagcgactcagtgaattgctgcatgcttttcatgtacatgtctactatatcctgctgcacaacctttggctcaggctcaatgttcacactcacaacaggcttagggaatgaatcaataggaaccccacatgaggaatcactctcaccatctttggcatccacatttttgtcctctttggtgcctgaaacttgctcctgaatgggagacttagaagcagcagcagcagcatcagatgattctgagtttgctggcacagaaggggaagaaaccccatttgtcgacacactgctagggggggaatcgaccttagttggctgaacagactcaacactgcatgctgagaagctttccacaagctgaacaccggcttcggaactgtgattttcagcatcagaagtagccaagctatcagagcactgagtctcctcacaccgaatgccgaagtattctgaaaccatcaagtggtcttcattcacaatctttggatctgggaactcgattttgtctaaatcccgggccagtgactcggacgtatctgagtcctgcacggtaccatctgtggccaccttgtttggcattgcagaaattgccataacatcaggtgaagcaccagtgtaggaaagcgacaactgaacaaaacctgaaggagaatggaatagatcagttgaagaaagagagaactctttctcaagtttcccattctggaccagtacttcagacaagggtaccaaagcaaaaccaagcaactggtcttcaaggtagttcttcaccctgctaagcatccatatctcacacttgagagatgcatcaacagtcctaacatcaatacgaagattctcgttgaaaacagggttccttcctcctccattgatggttttggtagacatggtggtctcaggattactggtcagacaaatcttagcataaacatcttgcttgtggtatatgcaaatgttttgaatgtccctggcctgatgtatgtaaacatcaagcactccaagaaactcctctacatttgacatgacaacttccttgccattcacttcaatgtccttggaaaaaggactagagtttcctgggaaaacatcagacttgtgcttctcactctcacccaacactgagctcctgaagggtgacacaacagattgtggggaatccattatgatatcaacagtaactggcaacctggcaaaccacaaagagctggttttgggttgaaagtcaaagtcttgggggtttggtgtgtcgcaaaatgaaatccaataatccacaatcagaggatgacccagttcgtgaatcgaggtgaaagaacaaaaaaagctgtgaactttgtttggtgtcttgtggaaaggaaagggatgttgttgttgctgactggtgctgagaaatagaatgaaaaatgttttctgggagtgtatggatccgtgtagggaacatgctcccccttttgtcgtcttctcgcagccgtcggacgcgtggg

SEQ ID NO: 47670 - DNA, 730 bp, Glycine max
  Clone ID: PAT_MRT3847_143051C.1
acttaatcccatgcattcccacattccctttcattccaacaccatgaccaaaccaagaaacctcaatctcaccttcctcctgcaagacatccaaattttggagattttccttgcagttcttagtcttcataatcattcattcccttagacaaaagaagcatcatggcctagctgtttggcctgtccttggaatggttccttctttggtgacaggactcagaaccaacctgtatgaatggatcacagaagtgctcaaaagacaaaacgggacattcagattcaaagggccttggtttagcaacctcaactgcattgtcacttctgatcctcgcaacctcgagcaccttctcaaaaccaagttccctctctaccccaatggagggtacttcaggaacacagttagagaactactaggagatggcatattcaacgcagacgacgacacgtggcagaagcaaaggaagacagcaagcattgaatttcattcaaccaagttcaggcaattaacaacagaatcattgtttgagcttgtccactataggctcttgcctgtgttagaagcatcagttaagaaatctgttgcaatagacctccaagacattctcttaaggctaacttttgacaatgtttgcatgatagcatttggtgtcgatcctggttgtttgcaattgggtttgcctgagataccatttgctaaagcctttgaggatgcaactgaagccacggtgtt

SEQ ID NO: 47671 - DNA, 450 bp, Glycine max
  unsure (1)..(450): unsure at all n locations
  Clone ID: PAT_MRT3847_143052C.1
aataatcatcaatctatgacatagttaacaaacaaagtcaaggagcataagacacacacacaaagtgcacattatcacttaaccaacaaaaaactaaaagacaagaaaagaaaagaaaagaaaaaaagcatagctaagtgtaagaaaaatcaaggaatgactaagctgtgtgaaacggaattgacagtgcaaagacctgacatgagaggcagggtgtgccagaaaatgcttggactgctgggaggtaatcagaaaatctgaaacacaggtgccaaaaaagggagaagtaacaattttaagttttgatcttatacattccacgagttttgatcaggcaaccaatgttcaagaaattgaagaaaatgtgcgaaacattgataactcaaacacgggtgagtagtatcacaaccagattgacggctcctggtttacactntaaggggaacaaag

SEQ ID NO: 47672 - DNA, 271 bp, Glycine max
  Clone ID: PAT_MRT3847_143053C.1
ggattacagaatgcggaaatcggtacgggctatgtgagaaatactctgagcgaaaacaccacataatcctttcttgcattttacggccattgtatcttcactctctaactggtcttgaacatgtgcctgatacttgctacacctggagacagatactccttacttatgacgtgctacctatagcttcttgtcatttcggcggacgctgcccttgcacaaatgccttaccagtaaatgtctgcactggatatccacaacaatacttcacatg

SEQ ID NO: 47673 - DNA, 357 bp, Glycine max
  Clone ID: PAT_MRT3847_143054C.1
aaaaaaaggccttttaaggagttaagtggaataataatactagaaccaggtagcaggtgggaatcttttcctttcacttttctacaagctttggacttcaataccattacgctgaaaacaagttcgttaagctggggtaatccattatggtaccagaccaatattctgaagggttggattgctttgctttacaacagaaatttaattaatttaagggaccatcacagggacaagaaactgagcaaaaggtatgcacagtttcattagacagggtttggttgttcctgatagcaggggaacattctcctttaaaccagactcataataattagtccacagcggaatcttccaaattca

SEQ ID NO: 47674 - DNA, 159 bp, Glycine max
  unsure (1)..(159): unsure at all n locations
  Clone ID: PAT_MRT3847_143055C.1
gtcttatgnncgcgtacgtnagctcgganttcggntcgagcntcttnatccaagntccgaatttntcgnaccaaacncaaatccnttntcaccccttncacnggtgtggttcntnttnaccccctcttcntgtnctntccgtntgcagantatgccggg

SEQ ID NO: 47675 - DNA, 3595 bp, Glycine max
  Clone ID: PAT_MRT3847_143056C.1
cttccctacttatccctaaccatacacctggtgatggattaaatacagagcagcatgcagcatgtccaaaagagcatgatgatgtatggtacagagcgcaacaggaggccttgcatcatcgccgaatttgctgtacgacctgaatcgatttggagatcatgttccttgagatgatcacaaaaaaacgtttcccttccaattatctctgtcaccgtggattctctctccacttgtgtcaaaactcaagcgtgggtttttgggaagtgggtagcttgtggggtggtggtttaaactttgatccgaggaactggcaagatctctagtctcttggaaattgggtttgtgcagatgaagtccactatggctcagaatcagagtaactgggaagctgataaaatgcttgatgtttatatttatgattatttgatgaaaagaaaattacatgccgctgcaaaagcttttgtcgcagaaggaaaagtttccacggatccagtagcaattgatgcgcctggaggatttctctatgagtggtggtctgtgttttgggacatattcatctcaaggacaaatgagaaacattctgaggctgctgcagcttacattgagacccagcaaacaaaagctagagagcaacaacttcaaatgcagcaattgcaacttatgcagcaacgcagtgcacagttacagagaagagatcctaatcatcctgtccttggtggttccataaatgccatgaattctgaaggaatgttgggacagccaccagcaagtgtgttggcaatgaaaatgtatgaagaacgaatgaaacaccctcattcaatggattcagaggcatctcctactcttattgatcccaataggatggccttactcaaatcagcagctagtcatcaaggtcaattggttcatggaaattcagggaatatgtccactgcattacagcaaattccagggcggactcctttaaccactgacatcaaaggagaagttaatttaggtgccactccaaagagtttgcctatggatacatcagtttatcgacaagcaattttacaaacaaaatctgggctgcagtccaggataaagttacaagtcttatctctagctcgcgtccgctttacaaagtcccctcccacaccactctaacatctacttacagaagcacaccacaggaactagaaaatccatacaatcttcaccaccaaaaagaaaataatggcaatggccagtgcaacaactctagccacaatcactgttgtggcggctagccccagtgttggcagcagaaggagtgggaagaggaatgtgaacttcatcagagggttgaattcttttggagggttgaaggctcagaacaatgtgacattactaggccttcctgtgtgcactgagcagtgctttgcaaaggtggtgagctcattgaaatatccatcatcatcatcacgtaaggggagaggtggaggtgctgccttttcaacatgcaatgctgctggtgagattttccagattgcagccatcatgaatggccttgtgcttgttggggtggcaattgggtttgtccttcttcgaatcgaaacgtttgtggaagagtctgagtgagaattgcatcaaacttttaattcagtttttcatatatggatttttataaacgaaaaaaaaaagcgaaaaagttgtatcttgcgttaattcttggtatgacgtagaactagcccagaatcaatttgttttggcatcacaacagcaacaggtcttggcacaggctcaggcacaaaataaccttggaaattctaattatggtgacatggatcctcgtagactttctggtcttccacgaggtagcttaagtgcaaaggatggtcagtctactagaaatgatggatctatttgctcccaaatgcagtcagattcacctaagatgaagattgctcagtcacaacattcattatcttctcaacagcaggagcaattacagcagcagagtaacagaaaaagaaaatctggagctgccaatagcactggtactggtaacactgctgctccttcccctacttcatcaccatcaacacatacacctggtgatggattaaatacagcaagcagcatgcagcatgtccaaaagagcatgatgatgtatggtacagaggcaacaggaggccttgcatcatcgtcgaatttgctggacgacatggatcgatttggagatgttgatgctttagatgataatgttgaatcctttctatcaaatgatggcggagatggtgggaatctctatggaacagtgaaacaaagtccagctgagcaacagaaagagtcttctaaaggtttcacctttgctgaagttggttgcagaagaacaaggaacagcaaagttacttgttgtcacttttcttcagatggaaagtggctagccagtgctggagatgacatgaaggttgacatctggaacatggacactttagaaacagagagcactcctgcagaacacaaatcagttattacagatgtccgttttagacctaattcatctcagttggcgactgcttcaactgataaatctgtgcggttatgggacacaaccaatccaagccgttgtctgcaagaatatagtgggcattcatcagctataatgtctcttgatttccatcctaagaagactgaagttttctgcttctgtgatggtgaaaatgaaattcggtattggaatattaattcagccacctgcacccgtgtaactaagggagctagtgcacaagtcaggtttcagcctagactaggacgtttcctggcagcagcttctgataaaggggtgtcaatttttgatgttgaatctgacacacaaatttacaccctccagggacatcctgaaccggtgagctatatttgctgggatggcaatggtgatgccttggcatctgtgagttcaaatttggtgaaggtttggagtttgacctcaggaggagaatgcattcatgagttcagctcccctgggaaccaatttcattcctgtgttttccatccaagttattcaactttgttggtggttggaggaatttcatccttggagttatggaacatgacagagaacaaaagcatgacaattactacacatgaaaatgtaatatctgctttggctcagtcttctgtcactggaatggttgcctctgcaagtcatgacaactatgtaaagctgtggaaataaaattcctgatttaggttctaacatcgcatatattctttgtcagtagtactgtatatgaaagaaatcagagacctatattgaaagcaaaaaggggtctctgaaagttttcttttttatttttatataatagtggcaatgaggtttgagtctatccaaacctcatcactagcttaatcttagttggtttctcccaccgttgatgttgtaataaggtatactagactattagtacataaatataaaaacaattttgcttttagaatcctaggcactgtcaacttagacattgcaccaatctgcaatgcaatttttatttatatggttaatatattttatttggattgtgagaactattggaactttctcataaaaaaaaaaaaaaaaaaaaagaaaggt

SEQ ID NO: 47676 - DNA, 290 bp, Glycine max
  unsure (1)..(290): unsure at all n locations
  Clone ID: PAT_MRT3847_143057C.1
cttcaacaaggacctnggntgggatgaanactggatctacctgggtgggaccnncatcggtgcagctcctgcagcactctacnaccaggtcgtaatcagggccattcccttcaagtccaagtgattcnntcaaacggttcatgcttaatcaagttgggnnnnnnnnnnnnnnnnnnnntcaagccaatgtttgtgggttttggtttcattcntaagatgatctgtttatcncttntcttcttttaaaattaaagtcttgtatcttgtatgtaaagatgtaaaattatgat

SEQ ID NO: 47677 - DNA, 325 bp, Glycine max
  Clone ID: PAT_MRT3847_143058C.1
aaaaaaaacaaaaacaaaaaaaaaaaaaagaaaaaaaagaaaaaaaaaaaaaaaaaaaaaaaaaaaaaaagaaacaaatgccaacgaacaaccaaacgaaacaaaaaggcccaagaaaacaaacatggaccgtaccctactagcttaccgagcaaccgtacactgagcatgttcagaacgcactagtaaccatggtcataaattgcttcccaagatacaattgaatgccgataccaattacacacaaacattcaactccagactcataaattttacatcctaaactgcctaaaaggcgaactccctgaaattattaccgcttcac

SEQ ID NO: 47678 - DNA, 468 bp, Glycine max
  Clone ID: PAT_MRT3847_143059C.1
gaaattaagttaagcaacgcattaatcttgcatcgtgaaagatactctaagtccatcctcttgcaatacaatgttgtctaactttcaatcttcatttagatacaaacttggttttgctttgacttctctgaccccttcctactaatatactatcatatgaatttttaattgtgaaaacaaaaataactaaaatcccagcagttcaatctaattgggatttgagtgtgttaactctttggtctgtttgaggttccattttgttttgtgtctggacttcgtttaatattttattcaatgctctattacctttagaagggtgctactattagtgaagatttcattaaattcaattgagctgagagctttgattgaattgaattgaaaacacaataaaataataaatgcaattgggttgagaacagcatttcaaagtcaaaaggtgaaatgaaactatgaacaagttgtaag

SEQ ID NO: 47679 - DNA, 505 bp, Glycine max
  Clone ID: PAT_MRT3847_14305C.1
ttcaaataccttcttcaattaagatttgaaccaataaatgagttcaagctgcggaagaacccatggattcaatggggacttggccaaatcctcatccacctcaaccctaacttcacccacctcctctccttcttcaacaacaacctcggaaaccaccaactccccccaatcaataatcttcacgaaaaaacctcgtaccctccgaaagcgaccgaaccaaaccttcaatgaagccgccacactcctctccacagctcatccgaacctcttctcaataaaaaacctaaaaaaacccgaaaagttcaccaaaccagtaacagaaaatattagccactcgtcagaaccgttattactgttcagagagtgtgaaaataacgacaacgacgcgttctcttttctccttgaaagcaaacgtggtttccaaacggagtcgaacaaggtcttcttcggcgtgcgagagaatattaataagccttgcgaattgagcacttcagtgccgaattgc

SEQ ID NO: 47680 - DNA, 208 bp, Glycine max
  Clone ID: PAT_MRT3847_143060C.1
cgtcggtgtacacgtggagacgcaaatcttgtctgagtccttcaaaggcatcatggcagcaaagggaaaagtatctcatagaaagacacaggacggggaggacaagaaacggcacgcgtatccggatagagctgaggctcttatagctgcagccggaaccaaagatatcgctgaactgtcgcaaacttctggtggacacactgcaagt

SEQ ID NO: 47681 - DNA, 543 bp, Glycine max
  Clone ID: PAT_MRT3847_143061C.1
taaaaatgcctacccgcttctccaacacccgcaagcaccgcggccacgtctcggccggtcacggtcgtgtcggcaagcacaggaagcatcccggtggtcgtggtcttgccggtggtctgaggcaccaccgatcgaactttgacaagttccaccctggttacttcggaaagctcggtatgcgccactaccacttgctgcgcaaccagtactaccgccccaccatcaacatcgacaagctcatctccctgcccgaggcccaggtcgaggcccccgagggctcggtccccgtcattgacctgcagcacctcggcaagttcaagctgttgggcaagggccgcatcgacaagccgttcatcgtcaagacccgctttgtctcggcgctcgcagagaaaaagatcaaggaggccggcggcgtcgtcaagctcgtcgcctaagcgagttgtcgcttcgcttcgcttttgctccaggatccaagatcgagggtttgagagagagggagagggagcatactaggcacaagctgcatgcagcatgtatcacgac

SEQ ID NO: 47682 - DNA, 391 bp, Glycine max
  Clone ID: PAT_MRT3847_143062C.1
gaactcttggtcttggagcacctttcttttctctctgagttagagcttctttttcgtttctctcatgcctgtggagtcttcaccctctctctctctctctctctcattcaccctgaaaaacaaggtttctgaggtttaatggctacctttcatttttgaacccctcttttgctctctctccgagtctgagcctcgctgttcagactcgctttctctgctcactcaaaaacctgaacccctttcctttcttgcatttgcccctgggttgcttcccaaagccccaccccattagcccaagatccaaagaccccctctagcctattctctggttttttccttgcccaatttctcaaatcttcctttaaccctttccttgcattttccctttttt

SEQ ID NO: 47683 - DNA, 159 bp, Glycine max
  Clone ID: PAT_MRT3847_143063C.1
cgtcagcatggaattcggctcgaggccttattaaagaccaatggttaacttttgttttgaagggcggtcttgctagaataaacagtgatgagatcactgttttagataatgatgcggacaatgggtgtgacattgatccacattaagcacattaaactc

SEQ ID NO: 47684 - DNA, 1723 bp, Glycine max
  Clone ID: PAT_MRT3847_143064C.1
caagtttgttcactccacacaaaagcaaccatatttttcagttttcacacctaaatcctttgacccatcatcactattaatctacaagctccatgttttgtttgcaatccgcttagtcaacttgttggtatcatcagagctttgtgaaacataaagttaaagcagggcatattgcagagggagcaaaccgaatatttcaaaacttgttctactttttattatcactgttgcatttatttcagatatttagtatttgcctacaagtttgttctttagtttaaacacagacaagacgactctttatggcggctataaccaatttgaacttttcttccttgtgtaaaaaaaggttttgtgtgcgtttgtgcgtgttggagttggctttttgaagtgggtgcatgctgaagttatatgtgtatgtgaaagatgaagaacaatagagataaagaaaagggtaacgacgttgaccagagttacagacagcatcacacgttgtcaatgccaatgatgttttctggtttgaacagagagaaggagatgtcagccatgatctctgctttgacacatgtggtttgtggagaagatgagcatcatggtgctgattactctcttcttaatcacaatattaataatactaatagtgcagttgttggtgatgatgattttactgtaacatcaaatatggcttctggttctatgccaccttcttctacttgttcatctcaaggtggcaactctgttctcaagagaagacgggaatatgataatacaaatgatttctcacgtggaggttcattccctgctatttcaacaattgctgaaagttcaagcacggtaacaagaagaacggcgaatacagtatacgattacgaatacagaacagagaacgtgaaagtagtggaggaagaaccgaggagaaaatacagaggagtgagacagaggccatggggaaaatgggctgcggaaataagagaccctttcaaagctactagggtgtggttaggaacatttgaaaccgctgaggacgcagccagagcctacgatcaagcttcattgcgtttcagaggcaacaaagccaaactcaacttccctgaaaacgttagactcagacaacaacaagaacctccgttgaacttgaaccctccaccaccacctaatcatggggctattttgtcaattccttcaaccactgttcacactgaggctcttcagggttcacttggttcaagcaatttttatgagcattcttattcgcatcttcatgagtttcccgtgagtctctacgatcagattgcagagtcaacatctactactatggcttctcatcatcttcaatttttgccgccagcttcttcctcaactatgactatgacatctccgcaggcaccaccttcgatttatcctacgcatccagcggcatggtcttctggttatagttataatagctcttcttctgcttcggggtgatgtaaattgcgttttatttcaagtctctctcgtttttgccccttgtattgtatcattgttactctcctctgttttttgcatttgcaccacgaccatttccatccaggagtggttttttgtgaccatgttattatgatcaagcaaatcatataattcacagttaacagtttagtatctgtgtataatagagttttatttatcctcccatcacatttctccaaacaaccatatcaatcttatatctcttccttcttct

SEQ ID NO: 47685 - DNA, 273 bp, Glycine max
  unsure (1)..(273): unsure at all n locations
  Clone ID: PAT_MRT3847_143065C.1
acgacgaagaacaccccaagaggggccaaaaaaagaaggcggaacacaaaaagaggagaagagcaacagaaatctctttagggggggnagaaccaacaccggggcctttttttcggacaaaaagccctactccccagattttgtgtgtgccaataaaccgcgggagggacaacatagctcgccaggatcagccaatagctctttaaagaactgcccgtgaggaaatcccacgacctcctcaaaaacgagcatattccagcaaggagctagggg

SEQ ID NO: 47686 - DNA, 412 bp, Glycine max
  Clone ID: PAT_MRT3847_143066C.1
ctttagtgtacaccttacgagacttaagaaaaacacaggacttgattgcactactctctgccccttacacatctgcatgcatatttgatccatgaaggtgacgtatttaacatataataaaaagccttaatgaacatgtacatcatgagcttatgaaaccaccttcaccgaccaagatcattagtgcaaaaacatggatatgctgtgaatgagagagatgatgttactgtggtcgcattagaaagcaagagaatatcccttgtcggtggaaataacactgccgccagattttgcactggctaaaacaatactcattccacaacctttttccttccataatctctggtggttgtaaacctatttaggactgctgctacacaaaacacacttgtcatgaaaaatctcaacactg

SEQ ID NO: 47687 - DNA, 461 bp, Glycine max
  Clone ID: PAT_MRT3847_143067C.1
aaaaaaaaaaattggttaaccaacagcttcttttgaaacaccaaacttattttttaagggtacccaaaaaggctaacatgctttgacaaaaaaaatttcactttttttttaggtcggatttctcaaaattttacccatacaacagagccggtaccaaccaattgaactttgttttccaattttagcttgagcaaaaaccaacttttttaaaagaaaacacattatttttaaaaaaaatttttttttctttgggaggcacaaatgcagttccattttcaaccccctttactggttttttgctaaaaatgggggaaatttgagtcaaaactttaacaaaagccttctttacattaaaagcccccaaaactgagggttccatgaaaaaaaaggattttttttcaaaaaaagacttcccatttttagttgacccccctaccaggggacaaaaggctgatttgttg

SEQ ID NO: 47688 - DNA, 945 bp, Glycine max
  Clone ID: PAT_MRT3847_143068C.1
accactaccaactcgacctcaccaactagaagaagaagaagaagaagcagtgttaaagaaggaggagatgcccgtacccacagccagctttcccatgcccatgccatgtgttatttcgtctgcatgcgcctaacttcactcttctttctcacccacccccatttcatttcttcgtaagagaaaaaaaaaaaaagaaaggagatggaaggcatcaccgccagcgtgtgcaggggcgtgaaggagtattggaggaggaaggggtacaagaggctaaacgggtcgggccggaggagaaggaaccgggtggagcttgggagcacccgaaccgggaagggtcggttctggaggtggaggatcagactcgcacccaagatccgaatcaggaaaatcccatcgccgaagaagatggtgctgtgggttcgggacgcgtacgtgaggatgatgctgggcctggccaactcgcggatcatgactgtgagcgcctcagcttcgggcttcggtgggaccctcgcaggtgcggacacgtccttcgctgggttcgggcgggcccctcccaaggagtacgacgagaagaccatcatccagatctacaagtccctcctcatggcgcatggtggtccattagttcctcgtgacgccgccgcaacacaaatccggtgaccctaacggtaacggtaatgcgccaacccgtcaaagcacccttttttcttatcaattgttcaataccttcttacagttacttccctcgatcgaccatgttaatttctttctgtcattctatattttgtgatgagggtttaattactttttaacgtgattctatcaactcgatagattcgtcttttctcaccgcccctattcctaaactacatgtcaacgtcaccggattatacacagacgcgaaattgtattattatctatgaagtaaggacactccaatttctt

SEQ ID NO: 47689 - DNA, 565 bp, Glycine max
  Clone ID: PAT_MRT3847_143069C.1
ggcaaacatcagtgtcttccttcctctcagaatcgggctttctcttctccacctctataagctccttcaatctactcatttccttctccttttccgcagccttattcttctcatcccctaccatcttgcaagcttcagcagctttcttgctctcggaatcagcccttctcttctctgcctctataagcctcttcaatccactgatttccttttccttttcaacaaccttattcttctcattctctagtaacttgcaagcttcagcagccttcttcctctcagaatcagcccttcccttctccgcttctataagcctcttcaatccaccgatttccttttccttttcaacaaccttattcttctgattctctagtaacttacaagcttcaacagccttttttctttcaaaatcagcccttcccttctccacttatggaagctccttcagtctaccaatttccttttcccaatcagcttggaaggtcccattctcatttccaccaccgccatgtcccagctctgttatgggagtaccaatctgagactccaagctgcaattttcact

SEQ ID NO: 47690 - DNA, 645 bp, Glycine max
  Clone ID: PAT_MRT3847_14306C.1
cccacgcgtccgcggacgcgtgggctcaaacaactattctcccatttttttgcagtgggttgattgtgtttcgcaattattacggatatatccttttgcttttgagttttctgcggctttcctggtggacttcgtagactgcatgctttcttgtcgttttggaaacttcttatgtaacagtgagaaggagaggcagcaattcaatgttttcgaggcatgtggatgtctgtgggtatacttggctgatttgcggacatcatcaggaggttcccatgtgcatcacaatcctttttatgatccaccaaagcataatggtcctcttctgcccccagcagcagcattagcccctactttgtggccccaattccaccttcgttgggcatgtccagaagaagcacaagctggggagattgaagcacgatgcaggaagatagttatgaaatatgctgagatgcagaaggctaaagaaatggcagaaaggaaagctaaagaagttacaaattccatggagtcgttgaatgctgaattacgacgtgagaagcagctaaacagctcagctatgaacatggccaagagtatgagcaaagaaaatatggccataaagcgtgcaattcagtcaatggggtgcaaggttcatgtctctgg

SEQ ID NO: 47691 - DNA, 430 bp, Glycine max
  Clone ID: PAT_MRT3847_143070C.1
gggttccgagttcaaaccctaggaaaaggaggcaaggaatttgcaacgttgaaaatcctcacccccctcctttcacatttttggtgtcgacatgatccgctagcactaattggaatattaggagtaaacccttcgaggggggaaaaccaaaccaattcaaccaaatgcataccatgcctcctaaaggcaccctaactttaatattccttcaccatgatgtcctttctttcaacaacagagaacacacgttaatcacaccctctccccacaatattcacatatgaaaaaataagttacatggtgaaacttcaaagaaaaggaaaaccattgaatgaagtacgacgttaatgtctggctgatttttctttttattattattattatcattattcctattactattataattatagatggagagaatagagag

SEQ ID NO: 47692 - DNA, 508 bp, Glycine max
  Clone ID: PAT_MRT3847_143071C.1
ccaggaaggtttcccgtcatcactgtatgacgtcctccttctttgggggggggggggggcaaaataaacgcggtaatgcaaggcgtaaaaggcagtagcttacgatttaagtgtgacggagaatgcaatagtaaggaatcgaatatggatcctaaaagagtgtaggtgaccacgtgaggacaaaagattcagcgtaaaacaattggaaaagtaccataccagcgggcaaaatgtagggtggggggtttcttggctactagtacacgttggccgtggtggaatgttatcaagtggtggagtgtgaggtgggtgtgttggtaggcgtggttggcagggtgtgatgggccgagtaacgttaggttgcagaagttgcgagggacgtgtagatggtggagtaggtgtaatgcaagtagacagtaaattaaatttacccatggcttattattaaaagcacggtccaatggcaacataaagatacgcggccacagtgggtatcggagataggtgg

SEQ ID NO: 47693 - DNA, 187 bp, Glycine max
  Clone ID: PAT_MRT3847_143072C.1
tttaggttctttaataatatttttggattaggtatactcttctgagggtacaagtgaagtctatgtgtcacacttcagacccttcacaagtttacatagacccagtgtgacaaccgggctgacttcacatcagcacacatcatgtcaacaatatgaacattatgcacaagttcacaaaattcaaaag

SEQ ID NO: 47694 - DNA, 577 bp, Glycine max
  Clone ID: PAT_MRT3847_143073C.1
gaaatgtaaatgactgtgcggaagatagtttttgttgatccaattggattataatccgtttatgtaaatatctgctcgtaattttgtgaatattacatttcaaatttattaatcagattgcttttatcataaagaaaatagatgttttaatataagatagttacttctacaaaattaacaaaaattaacaattttaaacaattaatttattatataaacaaacatcttaaaatttgaaaataagctacaattttctaaaacagtaaatttgattatacattaaactataaaatatatgatttaatatattctaacattataaaatataaaaacaaatttacaatagttggacagttaaaaagcataaactcttgctttgttaaataataaggataaatgaatataacaagttgataattaataccaacaacaaatcgttaatttgaatggtatttgactcaattccttaaataagactcaatctcttcaaaataagataatagaggagaaaattcttctataagtgatcgaccatgttttttaatggagattaatcttcatccatttttttattttt

SEQ ID NO: 47695 - DNA, 448 bp, Glycine max
  unsure (1)..(448): unsure at all n locations
  Clone ID: PAT_MRT3847_143074C.1
aattcggctcgagtacggctgcgagaagacgacagaaggggaggtacatgtttattcactttaatgatactgatgccctttccattcatcttgtacttcattgtatgaaacatgtcctaatgcttgtgataagtttcgtttgtgaggagtgtggctaagttggccacacttcacttgtcttgagcaccatgatttgcatacagttatgatactgatgctttgtctttctgaaatttctagtttcgtaaaacaatattaagatcttctttaccataacttttctatagaatgtcattaaaaaaagttatgctaagccttccttacgaaaagtggaaaaaaattggtgctatttaaaacttcttatgaagcttttctagttttacatatgcacagtgatgcangacanagggggtcannatataattaaatgcttggtttctttttgggc

SEQ ID NO: 47696 - DNA, 376 bp, Glycine max
  Clone ID: PAT_MRT3847_143075C.1
gtaggcgtacacgttttcttatacgggatcggaggcgtattttgggccggtaatttgggccgacccgggaaggcggaacaggttcccgtagggggaccagtattacatatggggggacgaatggaaatagggggtaactgtgggaaaaggtgatccctggacaaaatcgcaaaacatacaaactggaaaaaaaaatagaaaacccaggggtaaataataaaggcgggggcgcaaaataagggggctaagcaaaatgaatggtttccagccgacaaaccggttttcaccagggaaacaaggaatgccccaagcctcaaagaaaggccaactgccgatagagaggccagttggatattgttcccaaggggggaacggg

SEQ ID NO: 47697 - DNA, 322 bp, Glycine max
  Clone ID: PAT_MRT3847_143076C.1
cgtacgcgtgggtaatcatctaacttccttcaactcaaggtgcgtggagcaaatgagcctggggccaggcatgcaaaaggggcagatttgccactgtggtttctgtggaactactttatttgtgggatttatattttggttggtaattgtgtccttcaacaagaatcttgccttgatctttacatcgagctcttccgttatccaaatggtcaatgagctggcaatgttgttagcttttactggtcttcttaattgcattcaaccagttctttcaagggtggcagttgggtctggtcgtcaagcaatagtggcttatataaac

SEQ ID NO: 47698 - DNA, 242 bp, Glycine max
  Clone ID: PAT_MRT3847_143077C.1
cattctcatcatcaacaagtgtatctgtaaccatggcttccattactctatattctacaatcccttgttaggtatgctcaggaaaaagtgggattttcagttctacaggacatacgagataaggtgaggtggtggtgttggtgttttaggggtgtatgggagtgggacttggagatttgtggttttagagtatgtttggtatgcgatatgatggtaagggtatggaggaatgtgttttgttg

SEQ ID NO: 47699 - DNA, 190 bp, Glycine max
  Clone ID: PAT_MRT3847_143078C.1
gactcatgcagatgacactgtagactaagggagcgttgagaacaaacagagctatgtaaggatgctgagctgctccgtcgctcagacaccacatgttcgacgcggcgcttccgacctaggaagcgaagactatccggatcgagaatatggctgcgactctgaaccacagtggcaggctcattcaatacaa

SEQ ID NO: 47700 - DNA, 217 bp, Glycine max
  Clone ID: PAT_MRT3847_143079C.1
ataatttcacgaacttcgagaactggtgcttttttctaaactcaaaaacagggttttctttcgtagtatcaccgaagagaaagtgattctttagtggtctttgcaaaggctgaggagaaagacgctttctacgctggaaggaaaagggatgggtgttggctctacaagtactgcagagacaagcaacctttactttgtatgttggtgggtattgacc

SEQ ID NO: 47701 - DNA, 851 bp, Glycine max
  Clone ID: PAT_MRT3847_14307C.1
tacggctgcgagaagacgacagaagtggggtgatatatattgaaattctttagttgtaactgacaaagttttctgagaaaataaggattattattgagagaatggctggctcatcggaagagggacaagtcattagctgccacaccgttgaagaatggaacgatcaactccagaagggcaacgaatccaagaaactcattgttgtggattttactgcttcttggtgtggaccatgccgtttcattgcaccattcttggctgagctggctaagaagttcacaagtgtcatattcctaaaggtggatgtggacgaattaaagagtgtttctcaagattgggctattgaggctatgcccacttttgtgtttgtgaaagagggaacgcttctggacaaagtggtgggagcaaagaaggatgagctgcagcagaaaatacagaaacatgtggcttcagctagtgcttaatctagctcaccttcagaaactttatatatgcgctttcttttcataatcttgtactagacttatgttggtatttctgttattgcaccaatcagcttttcaaaggtgatgactcctatcatctatttctgaatagtagtaactggtcctttcttccgtcttaaataatagtggatggtgctatatcatgaatcttaattacatagaccttcctgttttcccttttagtattaaaacatatgggaattctattttactggtaacagtttcttcttattggtatgtttagaacatgagagagaagttgaagttgaagaatgaataatgggatgcaaggttgttgattactaacctttctcttctttaaaataaataaagcaatggatggtt

SEQ ID NO: 47702 - DNA, 1552 bp, Glycine max
  Clone ID: PAT_MRT3847_143080C.1
aaattattacggaggtccacatggggaccatgttgtgaggatgcaacaaaatggaatgggtcctggtggcggagggtggggtgcaccaccaccacctcctccaatgatgatgagtagtgctgagtttagctccaattactcgacgggaccggccccgttgcctcctccctcaccaaaccttgctctgggcctcaaagggggcaccttcacttacgaggaattagcagctgccaccaacggattcaatgatgcaaatttgataggacaaggtggattcggctatgtccataagggtgtgttgcctagtggaaaggaagtggcagttaagagtcttaaagcaggtagtggccaaggagagcgagagttccaagctgagattgacatcattagccgcgtccatcatcgccatctcgtgtcacttgttggatactcaatttctggtggccagaggatgttggtctatgaatttattcccaataacacattggaatatcacctccatggaaagggtaggcctaccatggattggccaactagaatgcggattgcaataggatccgctaaagggcttgcttatcttcatgaggactgtcatcctcgtatcatccatcgcgatatcaaagctgcaaatgtccttattgatgatagcttcgaagcaaaggttgctgattttggattggctaagttgactactgataataatactcatgtatcgactcgtgtcatgggaactttcgggtacctagcccctgaatatgcatcaagtggaaaattgacagagaagtctgacgttttctcatttggggtcatgctattggaactcataactgggaagcgacctgttgatcacacaaatgccatggacgacagcctagtagactgggctcgaccacttctgactcgtggactagaggaggatggcaactttggagagttggttgatgcatttttagagggaaactacgatcctcaagaactgtcaagaatggcagcttgtgctgccggtagcattcgtcattctgccaaaaaacgtccaaaaatgagccagattgtaagaatattggaaggagatgtctcactggatgacttgaaagatgggattaagccggggcaaaatgttgcttacaactcttcatctagctcagatcagtatgacacaatgcaatacaatgctgatatgcagaagttcagaaaggcagtgttttctaatagcgaggaatttggcaccagcagtggctccagtggtgaagtaagccagaagcagcaacggctctagattgcggaactagtgagattagcaattctagtattaattgctgataacacacgtgaaaggaaaaaatggaaaaaaaaaataaaaaaatcaagagtgttgctgttttttattgtttcattggcatgggaagtgaggtctcaatttgtagagaactgaacttgacgccttcgtttcagggtgtgtttgatgaggcatacaatcaatgttacttcggggtgtataggcatacatttggaatggagtcttgaacataaatataactcctattattaatgg

SEQ ID NO: 47703 - DNA, 289 bp, Glycine max
  Clone ID: PAT_MRT3847_143081C.1
cccaaccccaagaagggttcctcagggttgttgatacaatacattggcgggcgccgcctgctcattcggaattctactaattgcagtcccagacccctaccacccagcatcaactacgcccacccagcaaactgctgcacctcatgcattgcggagcaatgcgacactatttcaataaatattggtaagtcttgagaagcggagtactggagttgtgctgacgagaaaccaggcgatgaactatgatgcctgctgcatggccccatgaacaactgctttgacaaattcc

SEQ ID NO: 47704 - DNA, 265 bp, Glycine max
  Clone ID: PAT_MRT3847_143082C.1
aactaatactaaaaaatggtggggagggtttaaaatcaagaatttataaaccccccctccgtatacaataacacattactacaaaccaaagagggaagaactattctcatacaattaaaaattacaccatgtatgaccggtcctcaaatcaaaacctactgtaattcgaaaaccataagctgacaaatatatactttaataacaaattttacaaaaaaacccttgaaacttagtaattgatctattaactaaaaataatggaaaa

SEQ ID NO: 47705 - DNA, 393 bp, Glycine max
  unsure (1)..(393): unsure at all n locations
  Clone ID: PAT_MRT3847_143083C.1
gggcgcncccatcccacctaacccnantatccgcaaggctgcaccaaagagccnnaagcccagcaaaccnaccccacccccccanccccacaccaccaacaccccannccccaaaggcccaangnncnaaccaccccccccaataccannncnncccccaccccaannattcccaccccaanncaaccaccccaccnnnaagcacanccacccnatccccaanccaccaannccccnnnacaaaaccnnacccaaaancctnnaacagaaccncccacacacacacannaccccccccccccacncccccaaccaaacaacccccaacccccccccccccacccccaccaaccccccnccacccacccanccctaagaaatataaagataaaa

SEQ ID NO: 47706 - DNA, 447 bp, Glycine max
  unsure (1)..(447): unsure at all n locations
  Clone ID: PAT_MRT3847_143084C.1
aacaaacaagaggggtttgccttgtgccgtttgtgttgttttcgggacgaagaagaagatggtgtcaggttctggaatctgcgcaaagcgggtgtgtggtggacgcgcgccaccacatgnctgggtcgtctagcccctccatcgtgcgcgaaggagccttctgaaccggccacaaagtggnntggtcgttccgctgtgaaagagatattgctatctcgggccggcgctggtgtaggccacaagaactgaaatacctgtgaggcttccttttcgcaaaccgcattgaacacccaaacccctccccattggcccccattcccactttcccgttgccccccttccaaagaatcttncttggccgcacccgtttcgttgggaaatgaatacccaaccacaaagacaaaaagcggtggggggaaagcttgcctccttgcctccgtttttgaa

SEQ ID NO: 47707 - DNA, 537 bp, Glycine max
  unsure (1)..(537): unsure at all n locations
  Clone ID: PAT_MRT3847_143085C.1
ctgatcatcgtctagctatctcgatcgaactgtccaaggtcctgtcactctattgcgacgtgtgcaccaggccaatgggcatacaagcgtagctgcgaccaactcttgatagctctttggggcggctggtaagctcgaactaacagctaggcgttaggtatgttcccagcataaccacccgaagcgagaaccagaccataacgtgcctattcccagagaggcgtttaanaggcgaacattgcctatctactgtgtaacagagttcggtaagctacagaagatgccaggccaaagcacataacgagccatggcaattggacgttcatgaagttaaacacntacttattaccattggtttgtgttattttgggccatgggaagcaacagcagcacaagcataggcacacacaaagcgtgtgttacntgcntaacaagaaatcgtgtacccaacngtcaccattantaaaacaaactatgccaccaacagttagtgcgagggcaggagcagcctacgtgagcattaaagcaaacacaaac

SEQ ID NO: 47708 - DNA, 453 bp, Glycine max
  Clone ID: PAT_MRT3847_143086C.1
aaagcaaaatccccttcccttaaaaataaattttaaatttttatacaaacaaccggaattgggaacaccacaataccaggcccgggaacaaaggagatccgttcaaccttggaaggatcctggatacccaaaacataggcgggggtttaaaccccccccccccaaaaggccccccaccccgcgattgggctctttatttaacaccatacaccaccattcctttttttttttccccaacacccctggggaacgaacctcaccaataaccctatttagaagtactataaagaaaaaaggcctttttttcctgggaaaaacatgggaggggggggggcctttttagggggggggatccgccagggcatgaaaagagggcccggaatctggggaatctcgaaggattccccgccgccctcctggggggtctcaataaggggggtcaaaaaccttaac

SEQ ID NO: 47709 - DNA, 284 bp, Glycine max
  unsure (1)..(284): unsure at all n locations
  Clone ID: PAT_MRT3847_143087C.1
ctcccaaaggtttaacctttctgactgtgattttattcttttcaactctgtcactnantccggatagtgtnctttaaaggcaagaaaatgcctcttttatcaacttctacaactaatcattccctccacctatttacatcatcacaaaacatatctatcttttctactaacaccacaagaacacttctttctccttactcaaaacatctttcattactatacttttctcatttattattcttcactgttactaaactccacaataaataacttttcttataaat

SEQ ID NO: 47710 - DNA, 449 bp, Glycine max
  Clone ID: PAT_MRT3847_143088C.1
cccacgcgtccgatattgtccaatcaatgcagcggctatatgtgaccatgtttccctgcagtgaatgtgctaagatcataatccaggttggtaaccttgttctgcttcaagtatatgttttgatgaaccattttgcagatgagatctgcattttcttaacaaagcatcatataacttttatgagagtagtacactagcacctgccttccttactctgtgaattaaatatagttgataaattgcttcatctgtcttagttccttctcctgtgaggtctgttatgtatgctgaattggtatcatttacaactgttacattgtcattatgctcaatactacagtaggcggccttatgaggggggaaacttaggttgtaatgtgaataactgctttttagtgttaagttgataaaaattgccataatttatgatttttgtattagctgataat

SEQ ID NO: 47711 - DNA, 467 bp, Glycine max
  unsure (1)..(467): unsure at all n locations
  Clone ID: PAT_MRT3847_143089C.1
acggctgcgagaagacgacagaaggggcttcagatctattggtatattccaacattaaaactggccaatatatatgagaattgagaactccaagttatttaatcttcttgtgatacacaatttgattctaacataaattagacctcttcttgtgttactctttagacactccactaatccaacttaagtcattgtacaagcacaaatggattttctgcggtgcttgctattggttattattcttccgttgtgttattctattgatgctgcatgttctaatggaaaatgcaagcttgacgatgaatgctcgtctaacggtgattgtggagctggactctattgtttctcgtgtccacatggcttttcaggctctaggtgtgtgagatcttccatcacagatcaattcaagctcataaatgactctctgccattcaacaagtatgcattnttgacaacacacaatgctt

SEQ ID NO: 47712 - DNA, 489 bp, Glycine max
  Clone ID: PAT_MRT3847_14308C.1
tttgttaatcacaagaaaatggtgcaactaaagctcatagccttaaccttgttggtgttgtggtcatggtggagctttgagggtacagttggagaccctcaactctttctactcaaatgggagtgcggcgtagtctcggtacatgacttgtccaacttcaaccaaaatcgtaacgcaattttggcagacctgagagcgcaggtgagaaaccaaagcaagtactttgccacggctgaatcaaccagcggagcagaccctgtttatgccatgttccaatgcaggaactacctctccaaaaatgactgtgccgtctgctttgccgtcaccgacaccaatattcgtaactgctccgtcggaaatactggccgtatagtttatgacggctgcttcctcaagtgcgagaacaatgacatctttgaccacagtttcatttctggcctccacacactctgtggaaatcagactgcagatgaaagcacaggttttggt

SEQ ID NO: 47713 - DNA, 959 bp, Glycine max
  unsure (1)..(959): unsure at all n locations
  Clone ID: PAT_MRT3847_143090C.1
gttgcgtaaaagttgtaagganaaagatagcaaagaaacgcaaagaaaagttcttcaaacaaaatggaggattgttgttagaacaaagactatctactggtgaagttaatgttgacaaaactaaactctttagcttaaaggaattagggaaggccactgatcactttaatataaacagaatacttggaaaaggaggtcaaggtacagtttacaaaggtatgttagtagatggaaaaattgttgcagtgaaaaaatttaaggtcaacggaaaggttgaagaattcatcaatgaatttgtcattctttcacaaattaaccatagaaatgtggttaagttgttgggatgttgtttggagactgaaatccctttgcttgtttatgaattcattcccaatggtaaccttttcgaatatatacatggacaaaatgatgagttaccaatgacatgggatatgcgtttgagaattgccactgaagttgctggagctctattttacttgcactcagctgcttctcaacccatttatcatagagatgtgaagtcaacaaatatattattggatgggaaatatagggcaaaagtagcagactttggtgcatcaagaatggtttccattgaagctactcatctcactactacagttcaaggaacttttggatacatggaccctgaatatttccatactagtcaattaacagataaaagtgatgtctacagctttggagtggttcttattgaacttttaactgggaaagagccaatatcttctgcaaaacaacaagagcttagaagtttggcttcatatttcctccatacagagaaggaaatatgaagccaaacttctaagctcttgtcgttttgcagaatatttccttctctgtatggaggaaaatcgtctttttgatactccatagctgatgacatttctttgattctgttaaatgactagtatggaatt

SEQ ID NO: 47714 - DNA, 493 bp, Glycine max
  Clone ID: PAT_MRT3847_143091C.1
tactatagggaatgcgggaacgcgtgccggctccgggccggggtccggggttcgaggcacgcgccctcgcacttttacgctggcagcaggaggctggagattgtgctcattgcgggtggttcagaagctcttgatggagcatccggagtatacacgagaaggggttagtttttcccaggtaggatatgaaggtccagggccattacaagggcactcctggtggaagcgctgcaatggacgctcctgtttatatgaagcctgtgggtctggagagcctcagggagcgaattcctgatgatgacaagatgcataatgctaaggttaaagacttggcataacttctgaacctttgacaaagggccgggggggacccaaaacttcttactgaagggaagtcccctttgggtaggcgcattcctgtattaaaggttcgcgcaggggagaattacctacaccaaatcccctaattggcacagggggaagttctgtgttt

SEQ ID NO: 47715 - DNA, 165 bp, Glycine max
  Clone ID: PAT_MRT3847_143092C.1
cctctttttttttttttggaagctaatataaaattccatagatatccttctgaaaacaatacaccttacattgcatataatttctttcctaaagttgctggaataggacaattattataccggccattacagcttaaacgtgaaaattaatagtacaaatgctta

SEQ ID NO: 47716 - DNA, 110 bp, Glycine max
  Clone ID: PAT_MRT3847_143093C.1
gaaaatcagctattgatcttaaaatcagataaagatgtacttgaagcatattttacaaatcactaatttatgacatagctaaaatgtacttaacttagatgaattgtagt

SEQ ID NO: 47717 - DNA, 674 bp, Glycine max
  unsure (1)..(674): unsure at all n locations
  Clone ID: PAT_MRT3847_143094C.1
ccacgcgtccgcttagttaaacatggagaaatcaggctctaacagtcctaaatctgctttgaaggttgggaaacttagtttttttcttttttctttttttgttatattccctcttagtagtagaatagcatgtcctaacggtttcacttcttttgtattttccttaattttccatggaaaagtttgtgaagaccacatctcagtctgcagctcaatggagcagtactaattcaagaggaatggtgagattatgcctagctttaccctcacatatatataagccttaaaaagccctccttatttcattgccacatttagttgccccttaaaaaaagtttagcttccatggcatgcatggatggttttgggtttagaatttacattccatcaatagtaggacacacagaagtcattgaaagatagtatttctgcacttgtttagagtatgtttggttttgcagttgtaaaattacgtttgaggctgcaaaagtaattttgctaatagatcagaacccttgcttttgcgtttattttgcttttattcgttgaattgaattgaaacagacgtcacagtatttccaattgcaaatcaaacatgcctttagntgnttaattttcagttcatccttaagttggaaagttatgaagcaactgcatcacctctgaatgacagt

SEQ ID NO: 47718 - DNA, 2124 bp, Glycine max
  unsure (1)..(2124): unsure at all n locations
  Clone ID: PAT_MRT3847_143095C.1
aaataattatgtcctattggtggccataactccaaaagtggtggtgtgaacgcttgacaaagagtggttgcagtggcaaacaaactcatnagatcctccaaacctcaagcttaggctataaatactcaaatttgtggccatgttatgtactagaatccgaatagactaaaggggtgttttgaaaagatggagcagaaagaaaatcatgctagaaggaaaaagggagggctcatcacaatgcccttcatctttggtaatgaggtttgtgagaagctggctgtggtaggtttcaacacaaacatgattagctacttgacaacacagcttcacatgccattgaccaaagcagctaacaccctcactaactttggtggaactgcaagcttgacaccattgcttggtgctttcattgctgattcttatgccggaaagttctggactgtcacccttgcttccattatataccagatagggatgattagtttgaccctatcggcagtgctaccacagtttaggccacctccctgcaagggtgaagaggtgtgccagcaagcaagtgcaggacagctggcaatcctctacatctcactcctcctcggggcactcgggtcgggtgggatccgaccctgcatcgtggcgttcggggcggatcagttcgacgagtctgatcccaagcagacaacaaggacatggacctacttcaactggtactactttgtcatgggtgtagcaattcttgtggctgtgactgttttggtgtatattcaggacaatattggttggggaattggccttggaatccctaccattgcaatgttcctctcaattattgcattcattgtcggatacccgctttaccgtaacttgaacccgtccgggagcccgtttacccggttagtgcaagtggctgtggctgcatttcgtaagagaaaggtcccaaatgtgtcacaccctagtttactctaccaaaatgatgaactagatgcctctatttctatgggagggaagcttcttcacagtggacagatgaaatttttggacaaggcagcaatagttacagaagaagatgacaacaaaacacctaacttatggagattaaacacaattcatagagtggaggaattgaagtccataatcagaatgggtccaatatgggcatcaggaattctcctcatcacagcttatgcccaacaaaacacattctccctccaacaagccaagaccatggacagacacctaaccaaaacctttcaaatcccagctgggtccatgtctgtcttcaccatccttaccatgctcaccaccactgccttctatgaccgagtcttcatcaaagtggctcgtaggttcaccgggctggaccgtggcataagcttcctccacagaatgggcattgggtttgtgatctcaaccttagccacattggttgctgggtttgttgaaatgaaaagaaagaaggcagctttggcccatgggctttttgaccacccacatgccataatcccaatctcagtgttctggcttgtccctcaatacagccttcatggaatggctgaggcctttatgtcaattggacacttggagtttttctatgaccaggcccctgagagtatgaggagcactgccatggcattattttggactgctatcgctgctgggaactatgtgagtaccattatggttactttggtccacaagttcagtgctgggtctaatgggtcaaattggctccctgacaacaacctcaacaaagggaagttggagtacttttactggcttatcaccatattgcagtttctcaatcttatttactacttggtttgtgccaaattgtacacctacaagccaattcaggtccatgacaaaggggatagcaattcagaagggaaccaaattgagctctctaccacggtttaagtgtggtgttgtagggattaagtggtttagatttagagtttcttacccttttagtgtccatgcttagagattgggagtctcacgtgttgtatataaataataaatactaatattaattactaaaatagttgaaaaagtgcttccattagcttgtatacttaaacatgtctttactataaataatgattgttgctacaaaataacaga

SEQ ID NO: 47719 - DNA, 523 bp, Glycine max
  Clone ID: PAT_MRT3847_143096C.1
cttcgttctttttttttttttttttttttttttttttttttttttttttttttttttttttttttgtgttttttttttttttttttgtttggtttacccttttggtttccttttaaaaaagacggggctagaacaaccccccggaaaaaaaatgggccccccaaaataaaaatttgggacaagattagggccccaacccagccctttgggccaaaaatggtgaggaccaggaacaaactctttggacctcggcaaaaacacccccccccaggggaaaaggctttggaacccccattgccaaaggggggcaaaaaagacgccccccgggtttcccctggaaaaaaagccccccccccggggttatctgcgggggggggccaaattttcccaaaaaaacggggaccgggggaccggggtgccaaaaaccccctttgggaaaaacaagggggggccccaaaggcccccgggcccaaaaaggggccccccccaaaaggggggtttccgcccccccaaaaagggcccc

SEQ ID NO: 47720 - DNA, 188 bp, Glycine max
  Clone ID: PAT_MRT3847_143097C.1
tttgttatttttttttttttttcttttatttgattgggtcattattcatacatcactacaatttaattgtttacaaagagacagggcagtgagagtgaacgataggcgggctctagccatggtacaaacagaaacatggcaatcatcgatctgttcgtagaacaaaccatgaaaatgtataggcagaa

SEQ ID NO: 47721 - DNA, 260 bp, Glycine max
  unsure (1)..(260): unsure at all n locations
  Clone ID: PAT_MRT3847_143098C.1
gggggggggggagggggggctgngaagctcagggggggggggtagggttcgcaggtgctccccgatcagaaggagttcagtgggggtctacagggcggaggggcaaggccaagcctggatgtccgtgtnaagatcgcagaaaggggggggggggggggncccgntnngatgaatcgctgcgattgccttagggggtggggaaatacgcccgagccgtgtgtgntggctgggtgcgtcctggtgtgaccctcgggggcagg

SEQ ID NO: 47722 - DNA, 438 bp, Glycine max
  Clone ID: PAT_MRT3847_143099C.1
tcttagttcactgggttgatttgattctgagatctgttttttaattttttattttttattttttgaaatgctctgggatctgtctgttactctgttctcttgtataaattaaaattcctaaaactatagatctttactacaaagtgcaaattataggtttttaggaatctaaaaaaaggtgaagcctcgaagggctatttctttgtttttttttgggggtttgaggctaatgctttttgatgtatttaagtttataaatcaaaaagcatgtctaaaaattttcataattgaaaaaaggaaaaaacttcgatgttttagtgttttatttttttaatttgaaaatggtaatttatgaaaataattctaaaagaatgttaaaatgctattgttattgaaatggtgtcattttttttatcagcattgatatgatatgggtag

SEQ ID NO: 47723 - DNA, 312 bp, Glycine max
  Clone ID: PAT_MRT3847_14309C.1
gatggggggggccgccaatctgttcctggggggccccttattttttgggtaccccctttaaaaggggggccctcaaaaaaagggggttgttcaaatatggcccccccccgaagagactctacgtggcagagactttgccccgacttggctgtttttcaaccctggtttgagaaatcggaggctgggggaaaaaaacctcaaataactgggttgaaagaggggggtctttggcggggccccaaagaaggaaagtccgccctttgtaagcccctagaaggaaaaccctgggggggggggggcccggaaacccgg

SEQ ID NO: 47724 - DNA, 736 bp, Glycine max
  unsure (1)..(736): unsure at all n locations
  Clone ID: PAT_MRT3847_1430C.1
gaattcgagctctgtacccggggatcctctagagtcgacctgcagatcatggtaccaattataacgggccaaaattacaaatctaattataaattggatataattactatttgttagggagaaagtaaaatataatcaggtcagagcaccaaaagttgccacatcataataaaaccacaaacaaaatgtaggaattaatgactgaagcaccttttatataagaaaattactaattcttagaatgtaagtttaggtctaactcaatcccaaaagttaactcataggataagggattatctcccacttatatatttaatcttgactttatctctagcagatgtgagacttgaattttttccaatactattagacttggtgcgtggacgacatgatgggtggcccatttaatggatctagaataagctctgataccatcttagaacgtaggtttgggtctaattcaaccccaaaagctagcttataaggtgtgggttgtctcccacttgtatatcttttcttggcctcacctttagcagatatgggacttgaattttttcctaatagtaataatctgtaatctatatatttgaaagggaacagataatgacggccttaagtgtgattgatgaactattgctgcatgttttgattaattggattaatcatgaaaaaaaatactctcataactgattatatataaaaanagaattggggatgactaatacacattaattaa

SEQ ID NO: 47725 - DNA, 323 bp, Glycine max
  Clone ID: PAT_MRT3847_143100C.1
caaacatgaattgggaaaagatttaccacactcgagcgaatgcgattaaaagaaagcataatgtgctatacacctctcttttaatgttacacaactggaacccatcatgaaaccccagctaacaacctacacgctgaaccaaactgaactttacccgcttttgcacggccaacaaataagaaactaactaccttaaaccactaacaaaaatgatcatatatcacacctggaaggaatggcacaataaccacacattccctataatataactcggttttctagcctaagatatcaacctcatatagagctcgaacggaaaagaa

SEQ ID NO: 47726 - DNA, 185 bp, Glycine max
  Clone ID: PAT_MRT3847_143101C.1
aagataaaatatcctattttaaaatacacatagactacacatagcataacatagactgaagtcattaaacattagttataacttgaaaaacaggatctaaaatcctaatgagtaccagagacaccaaatcacgtgcttttgtgtgtgttacatcaggtttagcaccatgcattcaaacaaactcc

SEQ ID NO: 47727 - DNA, 380 bp, Glycine max
  Clone ID: PAT_MRT3847_143102C.1
cgttattcgtcgccacgcggcagaagaggagcgcataaaaagcacttggaaaaccctacgaagagcagcctcaggcgaagcacgacccatgcatgcaggtaagatcaagacaggagatcctcggatcacacgtgatttgcgaaagcactgagatggaaggcctggcgttcaacatcaaagataacccttaccttgtctaggcttgggggatatcagccttcctaggttggtcgaaatcaaccagacagagattgcgaaatgcttgctcgctgaccctagctggaactgcgaagagaaggcggcatgaaccagtgggctagagaagacagtaatctgggggaatgtggcttcttcgttgttgctaaacaggctgttggatt

SEQ ID NO: 47728 - DNA, 490 bp, Glycine max
  Clone ID: PAT_MRT3847_143103C.1
ggagggatcgaaatgaagccatatccactggtgctgcccatttggtcgcttatggccgcctttttctggctaataatccagatctccccccacgcgtccgcctcgatgctcacttaaaccaacccgatgtcaccaccttttacacacatcatcctgtgctttcttcaacccaaccccaagtaatgttattatgattaccagttagcactcatcttgcactatcacaatccctccacttggacttgtataattaactaactaccatcatcttctattatggctttcctttccctattcaaaccatattctgtttcggttaaaaaaaaaaaactccttataaaattttgtgtttaatcattaaaaaaaaaaaaaaaaaactcgagacttgttctgcattgttcgtgaattagcacctaggagaagatgcagtgcccaaagacattttgatgcttaaaaaagatggggggcccttttaaaggacccaattttt

SEQ ID NO: 47729 - DNA, 290 bp, Glycine max
  Clone ID: PAT_MRT3847_143104C.1
tcctgtatagcgggcgcgatctacgcgttcgtccacgcgtacgatacaattttatcaatacatacgaggacgaggtacatgatgatacattatgtatcattttctcagaaagcctctctactatctaactattaaaagcttcgcccagatgaaagctcgctgaaggtaaattttcattaacaaattatcacagtgagcggcattgtcgccgaaattgttcgttgtgacaactttggatcaaccctggatggcaagaccaaggggagcagcatacagaggcatcatgttct

SEQ ID NO: 47730 - DNA, 729 bp, Glycine max
  Clone ID: PAT_MRT3847_143105C.1
gttttcccaagtccccggcgccccctactcctccgcattcaacccccggaaggtcctccttcacgcgctctttcggtgcatacttctcacgctcctcctctcaggttcaaccccgcccctccgaagtcctcgacctcctccgtctcgtcgaggacctccgcgagagagagtctcgcctcaaaacagagcttctcgaacacaaactcctcaaggaaacactcgccattgttcccgttctcgagaacgagatttccataaagaactcgcaaattgaaagcaatgccaagaagatggaacaactggaggctgagaatgagaaactggggaacgagctccaagaactgaagctccgaatgaaagaagagaaaacagagaatctgagaaaaatacaagctttggaggatgagatagcggagctcaagaaaacggcgtcggatcgcgtttgcaaggcgctggtaaacaacgagcattcttcgcttgaatgcaagtcgttggaaaacgacgagcatttgcaaacgacgagcattcttcaagcacatttggaggtgccagtgaggccaaattttattaggagtttaaagaaaacggcgttggattatagaagcttgaaccacaaacagtttgaagctactgttgttgttgcggattttaaacaagaggtggcggaaagtcaaaggccgcgccgtgactcggaggaactcatcgattctattgagtccaacttaacca

SEQ ID NO: 47731 - DNA, 652 bp, Glycine max
  Clone ID: PAT_MRT3847_143106C.1
aaatgacttcgtgtcaccataagattcaactaataggagtttggctcctttggtgcacgactaatgtctcagctagcaagtgggaacacttaggcaaatctttcttaattttgttggtttgtaccttgatgacttgtttggtgctttactttgtctgctttattagttctgttttagttaagaatacaaaagacaaggcagatgaatcaagtagatgtgtggaaggagaagtcctttctgatcttaaattttgaggcatatttaatatcttatatgttaaactttgtcttgtacatttttgggttgagctcattgatctcctaattctctccatttttctatgattgctccactgatttcacattacatgtacacttggtaccattaaagagagttcgatatagaaaattagacttgattttgttgggtacatattgtttcagcacactcccatcaacagcatcatcataccctactctacccctggggccatactttaagcagcacaagccactcctatattccaaaccatccaaattcaactctctttcaataaatggccacagaaggatctgtgatctctttgatttgcatcaggagcaagtaccttatgaagtggcctggtctttggcaaaaggagattgtcagggaa

SEQ ID NO: 47732 - DNA, 1288 bp, Glycine max
  Clone ID: PAT_MRT3847_143107C.1
ggtaacaccggttgttcaaaactataaatcaaaagctcagagaacccatcccgccgccgccgtgtgctccgaccgccacctccattcgccgtgtactctcactcccttaataattattgatttcttctcttactttttgctctcgctggagttgagtgtgatggtataggttaataggaaagaaaaactaagtgaggaaaggtgaaaaaagaattaattagagtggaagagtgtggttattttctgatttgagaagcaaataccaaagagtgaagaacaaaagaaaaaaatgttgtacataattggtttagggttgggtgatgagaaagacatcactctcaaaggtttggaagctgtgaagaagtgtgacaaggtttacatggaagcctacacttccctcctctcctttggtctctccaccaatggcatctccaacctggaaaaactatacggtaaacccattattcttgctgacagagaaatggtagaagaaaaggctgatgaaattctctctgaagctgatcatgcccatgttgctttccttgttgttggggatccttttggggctaccactcacactgacctggttgttcgagcaaagaagatggcaattgaagtcaaagtagtacacaatgcatctgtgatgaatgctattggagtttgtggtctacagctttaccgttatggggagaccgtttctataccattctttacagagacttggagacctgatagcttctatgaaaagattcaaagaaacctatcaatgggactgcacacgctttgcttgttagatattcgtgtgaaggaacccacactagaatctttgtgcagaggaagaaaagcttatgaaccacccagatatatgacaataaacacagccattgagcagctcttggagattgtgcaagcacgtgaagaacctgcctacactgaggatactgagtgtgttgggcttgcacggcttgggagtgaagatcagatgatagtagctggaacaatgaagcagttgcagatgattgattttggagcacctttgcattgccttgttataacaggcccgacccatcccgtggaggaagaaatgctggatttttacagatgcaggacatagatacaacattaagacagcaagaccggtgtaatttagcaaaatagacttcatttttttttgttgtaggagcccttgtattttttttcttcctgaaacactttttggtttctaatcagggccaaaagtgaactaaattcattggtgaatgaaaaattatgtttagcgtgtttgaag

SEQ ID NO: 47733 - DNA, 421 bp, Glycine max
  Clone ID: PAT_MRT3847_143108C.1
tggatcctctagagcggccgcttttttttttttttttttttttttttttttggactaaatttcattacataatttcaaatttattacagggaacaaattggaatttaaagctaaaatatttttacaaaaactaacttgtaataattactcctaataatttccaatggtcatctaatcaccattgataccgatatgatcacacccctctgccattgatgaattctacgacattgaatctttttatcttcaaatccctcttttggtcacagttctaacatacaatttgcttgcttatgccccaacttccattctatcaccacatcgattgtcttttttaaaggaccacccatagcacatcttatgataaaaccttcttttaacatcccatgagttatgaatttatgtccagaacctttttatt

SEQ ID NO: 47734 - DNA, 451 bp, Glycine max
  Clone ID: PAT_MRT3847_143109C.1
tcgtcacccccaccagtacgtaaaggcccagacgattacttctcgacaccttcacctttttcatctcctactgcgccataccatgacacataaccacctccgtgatttcccagcgggccgctcccaagtacggggacaaagcatgtccaccttcaggagagacatatgctaccacaccatgacctatctacaggtccgtgtgaaaagcggcagcaccattggggatcaatcatgtggtagtcgtaatcgagggataaaggcacgctgtatgtggagtcacgagatacatctatcttcgtgtccaagttcttggaagataagtatgaatgggtggtctgttgcctacaatatccgagattgtggccacggtgggcctctatgactgaaggccattttgcaacgacaggtcttatggagttcaagagacagacagatcataacagggtagaga

SEQ ID NO: 47735 - DNA, 123 bp, Glycine max
  unsure (1)..(123): unsure at all n locations
  Clone ID: PAT_MRT3847_14310C.1
acaaaaaacngcgggggaaatttaagaggctagacccgcattgccaaaaaaacaacgaactttgacagaagcggaaccagaaaagactaacaataactgcttaaaatcccgagccgaataccg

SEQ ID NO: 47736 - DNA, 646 bp, Glycine max
  unsure (1)..(646): unsure at all n locations
  Clone ID: PAT_MRT3847_143110C.1
cttatgaaggcgcttgtatgatanctgaaagactcatgcaaataaatcatggatgggtagtgttgatgcatccacgcaggacgctcactgtaggcaacctgactgagaagctatgttcatgaagggatcagtggaaacagactttggaaatgggatcaaaggttaaaggctacatatgcattctgtctactttatgaaccacacttaaagctgcttcccgcttatgggatcttatataccaaacttgcctgcttttggtctcaaagatacttatgtaaaccaattttgcatatccctagaagtcacttaacctacaagaagctctaccatacgtaattatgttttacattctaacactttactgagaatcctctttatctctgacagaagcacgctggctaactgccatcaatccaactcatatcgagcattatattacctcctcctgtcatattataacgtaacttcgttccttcatcccacctcccatcaccggcatatatattagaaagcataaccctatagacattatcggcaggactactttcaaaaagctgatgtgctacggcttctgacagctgacaatttccacaaatattacagcatgataataatgctactaggatagccttgtctacaggttctg

SEQ ID NO: 47737 - DNA, 725 bp, Glycine max
  Clone ID: PAT_MRT3847_143111C.1
aagcgaatagaaatgcggtggtccgtgctcctccatggatgggaagcctaacccgtattcctcctccacggacctcctccgcgacgttcaagccgccttgaaacgacaccgtcctctcggttcaatgcagtccaattgcataagaccaaggcgcacgctacttcctcaaagaagagcatctagcacttcttcttcttcttccgatgtcaccaattctcaagaagaagcttcttccaaggattcgctcaacgccgtcgtcccttctcaaaacctagactctcagaagaaagtccagttttcagttccaagcaacgctgcctcgcaggatggaaaggccactgagttggagaatttatcttctcacatgagttcgcttggattcgcagaaatggagtgggttgaaggcagccaaatcgaagcatggtcgtcgtcgtcgtcgcttggatgcaaccagcaggagagtgttcagcaggcggggattgacgcgagtttgaaatgcgagagtggagtgagttccgtgctgccgaagagaagcgtggttactccggatcatttgcagcaattcagaagttttttgagtcagccagcgacgcaatcttcggtggtcggacctacttgtgccacaactacatctgttcattcaacttcagcgccaatgctgaattcaacacacggtattctcatttccgtcaatattgtggctcaagtgtggctgctgagccttt

SEQ ID NO: 47738 - DNA, 1513 bp, Glycine max
  Clone ID: PAT_MRT3847_143112C.1
ggagaactagtctcgagttttttttttttttttttttacagcacgaaaaagatagcttggcgtgcgtataatttgactcaactcagttcatacacgagtgaaagactgatatgaaacggaggtagagaacaaggtatatagaaggcgcacaaaattaattgccataattagtagcattacttgttacactggacaatccacagttcaacatgatggtaaaagttgaataagcattacactacaaccatatcataaaaacaaacataagaaagtaaaaacctagtggtctcagaatcctcgttaaaatataggaattacgtgcctagagcaacattggtgagttaatattggtaaccaagtagcactgttcattctgactcaggagaaccaccagggaccaaaatggcaatgttgtttccattgagtaaaatctgatcaagcttggttatccgtctcccttcagcagtgatctcatattcagtaacatcttcaaggaccatgttgacataaacatcaaagcctctaagagtaccaacaagctccttgtcacccttcattatcacccaaattttcgaacctatacaccggtcaatcaactctgatgggagaagctgtgacggattgttggccatggaaaatcaattgccgaatttctcaaaaacaagtttggttcggaagaaaccgaattggtatctgaatctgagagaagaagcgagattggagatgcaatgaccagccccaatcgggcggtaaattccgtccaaggctaaatactggcgagagaccgataccgtctaagggaagaaaaagattatggtcgtgagagagagggtagggagcgggagagaagagagaaggatcgtgaccgtggaaggcgaaggagtcactcaaggagtcgaagtagaagtagggatcacagggaacatgatggcggggactacagaaagagacatgctcggagtagtgtaagtcctagaagacatggagatggacttgaggatggtgagccaaagaagaagaagaagaaagaaaagaaagaaaagaaggatgatgggactgaccaccctgatccagagattgcagaagcgaacaagctacgagcagccctgggtttgaaaccactgagggtctgatctggcagagtggcatgaatttggtctgggtttgaaaccactaaataccgtgttaccttgtggctgcttgctttttctgtacatccctgattagctgttatcaagtcagaaggataagtttgtcatgtacgtttacttgtgttgctgcaccagctcaaactcgtatgtccatagccgtgttttgattgtcttgattttaatgagaccatatcgagaggttctggtgtgaaagtttaactacagaaagtttcagctgccttgtcttaatcaaatttatggtttggatattcgaagaataccgctagcattcgttagtggaatttggataaaatatattgtttacttgaaagcattttaatttcgggtgattaaataaaaaa

SEQ ID NO: 47739 - DNA, 710 bp, Glycine max
  unsure (1)..(710): unsure at all n locations
  Clone ID: PAT_MRT3847_143113C.1
ccagagttgagtgctccaataataccatggaagctcaagcgtcgttcttgtttattagcttgtttttctctctggtgttgcatttgcttgcaaagtattattacaagccaaaaaccaccctttctcacaaactacccccgggaccaaagaagctacctctgatagggaacctgcatcaactagcaatggctggttcacttccacatcgtactctccgagaccttgcccttaaatacggacctctcatgcatctccaacttggtgaaatttcttccgtggttgtatcctcccccaacatggccaaggagataatgaaaacccatgatcttgcttttgtgcagaggccacaatttcttcctgctcaaattttgacctatgggcaaaatgatattgtttttgctccatatggggattattggagacaaatgaagaaaatatgtgtctcggagcttctaagtgccaagagagttcagtctttctctcatattagagaagacgagacatccaaatttatagaatcaattcgaatatcagaaggttcaccaatcaatcttactagtaaaatttactccttggtaagttcttctgtttccagggtagcatttggcgacaaatctaaggaccannnaaaagtttttgtgtgtgcttgaaaaaatgatattancgggggggaggatttgaacctnacnatttgtttccttcgatgaaac

SEQ ID NO: 47740 - DNA, 371 bp, Glycine max
  Clone ID: PAT_MRT3847_143115C.1
caactattgatcttgtttacttagccgcttcagcgtagcaacgtgagcatcttccgagactaaccgcgcatagatctgctcctacctcttcctagaggtagtgttatttgataataacgacttcaatccggcgaagcacgcggagattgctgtgcctaatctgcaggtgataaagctgacgcatatctgtaaatgcagatagtgcctctgggacacatttgcgtggatgcactattactgggtcctctcccgcgctggaattgagttccttaggacttacgtcaacctttcataccatattgtacctgtcactcttcaaatacaagccaagcgcgccggaagacccttcggtggcccacccggtgatcgcc

SEQ ID NO: 47741 - DNA, 204 bp, Glycine max
  Clone ID: PAT_MRT3847_143116C.1
cacagaagggactcgcagattcaaacgtttccaggtgaggctgacgcatctctctctgcgttcatatgggagctgggcgtggagtcccagcgcacttgaggggtgagggacaaaaccttatgcagtcacaaagcctcaatcgcgcacttttccccgttcgttacaatgacacgttctatgtctatgcattcccttccgggtgaa

SEQ ID NO: 47742 - DNA, 342 bp, Glycine max
  Clone ID: PAT_MRT3847_143117C.1
ggaatgcggctcgagcgcaagtatttccagcagttaatataacctgttttttactggcacagcaaacttggatgggacctttatctcaaaccagagaatttacttcttgactaagcacgaaaaccttaaaatctccgatttcagtctctcctcgctgacagagcagcttatgtaccattgactcaccacacccaactgaaggacttctccttctataaaccaaaattgatatgaaaagcggcgatcatctttcgataaactacttacaattatgcaacaggatgattgactctacagtgattgaaagtctacttcttccactcgtgttatacttgacaatgt

SEQ ID NO: 47743 - DNA, 223 bp, Glycine max
  Clone ID: PAT_MRT3847_143118C.1
catcgattcctagggctaatattttccgactttcatctagtcgattttacactgggtcccgataaaaaagatctctcatctacctagtcccagacaattttctgatgcgcatggtcatttctattctaaatgcatcatgagcgatctcttcattcatgccttcacatgtgttgccttcacgtctttctgcacctcaagcgccgatgtatgtaacagtacacct

SEQ ID NO: 47744 - DNA, 465 bp, Glycine max
  Clone ID: PAT_MRT3847_143119C.1
cggctgcgagaagacgacagaaggggcctacacacataaatgtaaaagtaaaaaaaatacgtatacccaccgtttgtttgtcataggtaaaattcaaaaatatgtacttattattatttggtataggtaaaagttaaaataacttctacttacaaatgtttaatgttggtaaaatttcaaaaaacttatacttacaattatttgatgttagtaaaatcctataaaattcattggtgtacatatagtttaaagtagtaaaatcgaattggtcccgtcatggggagttaatctaaccccatgtatatcacgatcgactagatataatagcctttttaaacatcagcaataatactcaataaaagatcaatctagagttcgaataatataatttttagatgcatgacaaaagagaaaaaggaaagccaagagaaaaatgacaatatcacttttatggaaatagagatt

SEQ ID NO: 47745 - DNA, 1481 bp, Glycine max
  Clone ID: PAT_MRT3847_14311C.1
cccacgcgtccgcccacgggtgtatacagtttcggagtgttgctcttggagcttctcacaggaaaggctcctacacatgccctcttgaatgaggaaggagtggaccttccaagatgggtgcaatcagttgttagagaagagtggagttctgaggtgtttgatattgaactccttaggtatcagaattctgaagaggagatggttcagttgttgcaacttgcagtggattgtgttgttccataccctgataaccgtccttcaatgtctcaagtgattcaacgcatacaagagttacgtaggcctagcatgaaagaggctactcaagaccaaatccaacaacttgatttgatcaatgatatagatgatgcgtcttctagatgagtttgttatgggtttgtgtacaaggataaacttctacatggtcattattgtcttggacaatctctatgtgacatataatcacatttttctcaatttatgaaaaaaaaaggttaatattgtgttacatgaagatcagcctaaaactatatgatttcagaccatgtaataatttctccaaaaacatgaatgttcttggctttgtcaagagccccatcttttgcttcctaaatcctgtgcttatgttttattttgtttttaagcttgggccataatttgcttcagcacccaactctgaattttccttcaatctcaattgtactggttcacatttttttcttctgtatcaataccttgagggagtggatatctactccattagttattgcaaaaatcttgctgatgtaattactactcaaacatcagctctgctgtcctttctctttgttgttgagagttagaagaaggctctgcaagaagcataggatgcagcatctttaggatcaatcaataggcattccctgaaggcgtgatcccatatcctgtcaccagtatcccagtcagcaccaatcccgtctttaaacggagacagcacctacatatggtctctacggtaccccaaggactgggatcctacatacaatttcctctcgagccgaattctggtcagaatcagcatttctaccattattatttgattccggagcagaggcagagttgttttcgccattatctgcttcatcaacatccatttgatcaattgctcccacaacagagggaaacacggccttgggagcatcttcaccagcataaccagctttacaagtgtgtgaacccaagtcaactactatagctgatacttcatcaccgccatacatggctgtgactgtgctacgagcttgacaggggaattagggtttttgaatttcagggtttatgaatttcagagtagagaatggtttttgaattttctctctctagggtttcagtagagagagaagctgcggcgacaaggagcgccgccgcgggaaattccggcgagatggtcggaggaggaaagtcgaagactcgaagtaaggagcgcgcgcgatttgaagcacaag

SEQ ID NO: 47746 - DNA, 273 bp, Glycine max
  Clone ID: PAT_MRT3847_143120C.1
ctcacacttccgttttctacctccatctattacatatcatccaacaacctccattgggtgggcttttactaaagaagcgtcttctctctacaaactacaccatttctatataatcgatcctcatttactacacatactaattccaacctatttagctccatatttcttaaaatattaattctacccattttaccccatttatattttaatctttctataaacaatccacatttttttaaccttttaaatctcttttaacctactattacacca

SEQ ID NO: 47747 - DNA, 365 bp, Glycine max
  Clone ID: PAT_MRT3847_143121C.1
agtgcctacatgccacgaaatgtcttcaccaaagtgggcatccttcttcataaaccactgccgttaatgtaggatttagcataagatgtcccagctcctgatgaaccttttgaaaaattgtaaaaagaaatggatgtctgggaaatacaagttaagctaaccctacaatgcctttaggcgctagaggactgtcctccattcagatacatgcgccactgaatcatgaattgtctaaaaaaacccattggtgctattccacgccaacaagaggtcttccccccacctattgcgttccctgttgaaaccgcttgtggacaaaactggtgcctttggacccaacaaaattgccatggattttttttttt

SEQ ID NO: 47748 - DNA, 1039 bp, Glycine max
  unsure (1)..(1039): unsure at all n locations
  Clone ID: PAT_MRT3847_143122C.1
attgcgtccgctggtccggtgcaaaaatgggtacggtgtctcttctcaagtgctacagaccctttttctctatgcttttccctcactccgctccacccagactccacgccgccatcttcaggagcaaaaacttttctttttgcgccacctcgtccccgccgttgacggcggagaagggttgcggcaaatccgacgccgagtgtcccaccttgccggaggtgtggctgcacaacaccatgagtaggacgaaggaactcttcaaacccaaagtggaatccaaagtgggaatgtacgtgtgcggcgtcaccgcttatgatcttagccatattggacacgctcgcgtatacgtcaatttcgaccttctttacagatactttaagcatttgggatttgaagtctgttatgttcgcaatttcactgacgtagatgacaagataattgctagagcaaaggagttaggagaagatccaatcagtttgagctggcgctattgtgaagagttctgtcaagacatggtaactcttaattgtctgtctccctctgtggaaccaaaggtctcagagcacatgccccaaatcattgatatgattgagaagatccttaataatgggtatgcctacattgttgatggggatgtgtactttaatgtagaaaaatttccagaatatgggaaactatctagtcgagatctagaagataatcgagctggtgagagggttgcagttgattctagaaagaaaaatcctgctgattttgctctttggaagtctgcaaagccaggggagccatttttggaaagtccctggggtcctggaagacctgggtggcatattgaatgcagtgccatgagtgcagcttatcttggttactcttttgatattcatggtggaagaatcgaccttgtgttttctcaccatgagaatggaattgctcanagntgtgctgcatgtaagaaaagtgatataagtatatggatgcacaatggttttgtcaccattgactttgggaaaatgtcaaaatttttggggaattttttcac

SEQ ID NO: 47749 - DNA, 517 bp, Glycine max
  unsure (1)..(517): unsure at all n locations
  Clone ID: PAT_MRT3847_143123C.1
gntcttgttcgcgggcggccgctcgggaggagggcggctttcgtgcgcgtgcgtgcggcgggctgggctcttgctgtgggggggcctgtgtgggtggactgggcggggtttcgcgggggctggggggccgtgggggggcccagcgagtgggcggggggcgtggcgcttgcgggaggggggagggttgggctctggtcggtgtccggtcgtcctggcgggcgtggggttgttctgggtggtgggtgggtcgggggctggggggggtgcgtgggggggcgggggggggggggggggcgcgcggggtgcgggtgtggggcctgcgcggtggcggccgcggcggggggtgggtgacctgtgtttgtgggcncgttcgccggcttttcccgccccgctgtccgtcgggggctcccttttggttccgttttaagctgggcgggggcggggggtggtgtggggggggggtgggggggggcgggggggcggggtggggtgggggggggtgggggtgcgggggggg

SEQ ID NO: 47750 - DNA, 280 bp, Glycine max
  Clone ID: PAT_MRT3847_143124C.1
gactggaggaagggggcgtataggagtgccctgtgtcatgggcaccaagaccacgtgtgtaatcatagacactgggtggcgaaaacttcacgaacacttcacaatgtgtcaaaccctgcaccaaccaatactcctatacttaatcaacccacaggagtggtcctctatcaaagtctctacaaaaccctgcttaagcttgtgtggtaacatcatcaaaaaaagaatagagagactttatgtaattcaagtagatcgagatcgcgaaaatgacgaactgcat

SEQ ID NO: 47751 - DNA, 329 bp, Glycine max
  Clone ID: PAT_MRT3847_143125C.1
cgaatcccggtcgaccaccctccgccagtgtcggaggctgcgaagacaaacagggggttgatgtggctaatggtgggggatcctgtatttcacaaaaaaaaaaagcggcgctctagaggatcgcgcttcttagcgtgcatgccatactcgcttgctatgcgtcatctatttaatcagtggccgaattaacaaagtggccactggaaacacctgctccgaactaaattgcttgcacaataatctttttgcagctatgtatatcaaaggcggtctatcgacttccaacacctgtcacttgaatgggaatggacctcatgaaatggcataac

SEQ ID NO: 47752 - DNA, 354 bp, Glycine max
  unsure (1)..(354): unsure at all n locations
  Clone ID: PAT_MRT3847_143126C.1
ccacgcgtccgccgtgaccgaccgcggtgacggttagngttacatgaaccgccgcttccccgaggggcaagtctccttctacagaggctggaggcctcgaccgcgtcggcgacccacagtactggaccaccatcagcgcctgcctccgcgacggccacgcctgcgccggcatgaggcgcctcgcgcgggaccccaacactggcatgctcgtgccggagacgcccaccatgtcctacggccgcaacctctcccctgatccagcctggatgctgcaagccaccgacgtcttgtgcgatcagatacatgaacgatacttactggacacaaatcctcaacgtaccgacggagaccaac

SEQ ID NO: 47753 - DNA, 1318 bp, Glycine max
  Clone ID: PAT_MRT3847_143127C.1
tccggccgggtttttggccccttaatttccagcaaaatcgttctctgtcttttgaagcagctgttgcccattgtgaagtatttgttctccgtcatctcgcgtcgttagttcattgaactcactgcattgagtggatttggtccaagttgagtttagaaatggatggccatcatcagaagcaaaaaaacaagtacagtataattgttcctacatataatgagcgtctcaacattggtctcattgtttacctcatcttcaagcaccttggggatgctgattttgaaattattattgtggatgatggcagtcctgatggtactcaggatgttgtaaaacagctgcagcaagtttatggagaagatcggattctgttaagagcacgccctaggaagctgggtttaggaactgcttatattcatggcatgaagcatgcatctggaaattttgttgtcatcatggatgctgatctatcacaccatccaaaatatttgccaagcttcattagaaagcagtcggagactggtgctgatatagttacagggactcgttatgttaaaggtggtggtgtgcatggatggaatcttatgcgtaaactaactagcaggggggcaaatgttcttgcacaaacacttttatggcctggtgtctcagatttgacaggatcttttagactttataggaaatcagtgcttgaagatatcattagttgctgtgttagtaaaggatatgtctttcaaatggaaatgatagtacgggcatccagaaaagggtaccatattgaagaggtcccaatcacatttgttgatagagtatttggaagttcaaagcttggtggatcagagattgttgaatacctaaagggcctagcttatctcttggtgacaacataaaaggataaatcataacaactcgatataccttacattttggggaagaaaaagagatataaattttgttgttcatttacttatatattgaggacatcaaatttactgctagaatctccgtaactttgctttttcaatttagcaggaagcatctgtatgattctctgtctataactgtgtgaaactttacaatttttagattttatgaacttgtgacttaggctgaggtcttctctgtttcgccccttctaggcgccaagacgccaactgtaaaattctgctccaactattgatttaagtctcaaagtctttgtagatgaccatactaaagcttgacttgtaaaaattgaattttcatatagagtcaactagtcatccatggtttattctttttttttttggggtcatctcatccccctttcattcattta

SEQ ID NO: 47754 - DNA, 209 bp, Glycine max
  Clone ID: PAT_MRT3847_143128C.1
gtttaatctctaatactgggcaggaaccagtgaatataaaatcacagcggaagccatgagagcgataaaaacgagccccaccttgtacttttaaatgacacatttggagtgaaacgctcacagcaaccaaaaactaatggggaaaattctcacactatccctaacttgatatagaatcctttatctgtcgcggatacttatcttcccgg

SEQ ID NO: 47755 - DNA, 127 bp, Glycine max
  Clone ID: PAT_MRT3847_143129C.1
ggtgaagtttctgaagcctaacttggcattgatcgctctgcctggccgttacgccgggcgcaaggcggcgttcgtgatgacctacgacgagggaaccatggagcgcccatactgccactgcctcgtc

SEQ ID NO: 47756 - DNA, 358 bp, Glycine max
  unsure (1)..(358): unsure at all n locations
  Clone ID: PAT_MRT3847_14312C.1
tgatgcgaatctttataccttaaacgaatttccagaatcaaatacaatgaccactagcaaatttcttcctcattctagaaagactattgatattgaccaccttgcgcaccccttcctcacgactcacgacgttgcacatgcaaacgattaaaaaaaatctcccatgctgctatatttatattatctaggccaaattgtgctggaaacgtctactttgacaataactccctattcttagactaccatcctaatccctatccaatggtcttcactactgcggctgaatgaggcactctatactgatgagactctccangatcacttagcaaacgagccatctggatgagaatataaaata

SEQ ID NO: 47757 - DNA, 301 bp, Glycine max
  unsure (1)..(301): unsure at all n locations
  Clone ID: PAT_MRT3847_143130C.1
nangggnngncnnncgaatgtaagcncggnanncggcttgagngntnnccgcnnnantanaggacatactntgcgnnntccnngntttgaaaaanagcntcaatggggnngtccnccaatncgtaggtttcntacgaatcttcttngaagnngnaanggaggnggncnccgccgncgtcgccaannacgagatcgaagncgncnacgaggagctcgaagnggtggcacgcnacgtcagctccgacgacgacganaatncgccggagnagcgnngaagnnnnganagnanaccggagnngga

SEQ ID NO: 47758 - DNA, 208 bp, Glycine max
  Clone ID: PAT_MRT3847_143131C.1
gaaaatgaaaactgcttctgctttgcaagcgatgcaacttagtttaaagaaaccaagttgtatttaaaaggagcgtgaggctgcaaaaagagaagctgagagagcgcctgtcatacaggaggttcctgttgttgaccatgctatggtggagaagctcactagtgaaaatgagaaactcaagaccttggtgagttcattggaaaaaaaa

SEQ ID NO: 47759 - DNA, 1218 bp, Glycine max
  Clone ID: PAT_MRT3847_143132C.1
tttaggaaaatccatctatcagttgttggctccagttatgtgcatgatactatggatgaatcaccaaatgataatgatcttaatttcatgcataactcagatcaggaaattagatccaatttggattcaagaactgggaaatgttccacttctggaaagcagtcatcaaaagaagagcttagtagatgtaaaaatatctgtgcctacccgtcttataagatttccaaagcattctggccccactgggcgtatcggatgtttgactcttattcgcttgcacaaagggctgcagatatgtggaagcgaatagttgggatgcctgacatggatagtctcattaagaagcctgatattttatcatttcacatagccagtaaaatacctgtgtctgagtctacaaggcaggagcttttggatattgatggcattgcatataggctgcgcagggaaattgaattactagagagcattgatcttatccggtgtaaaagctgcgagactataattgcaaaaagaagtgatatgttggtgatgtcaagtgagggtcctcttagtgcatatgtgaatccaggtggttatgtgcatgagataatgactctttacaaggcaaatggtttagctctcgttggatcagcagcaacagattacagttggtttcctgggtatgcatggacaatcgcaacttgtgcaacatgtaaaacacaaatgggatggctttttacagccaggaacaaacaactgaaacccagctatttctgggggattcggagctgtcaacttgcagaggaaatacgccaaaacctttagtttgatatgtatgcagtcatctatccaaagcttagtgaaagccatgttcaagtaacactgcatggttatgtatataatgcaactttcttgtagcacttcgcttgttggtatacttatattagtaaaatatgttgcaacagcttggaagaaataaagtcacacctgaagatatttttagatgggaatttttgcaaactcttaaagctgtgctgtttacagttagatgaatatttcgctaaaaaaagctgcatgcctgttttgttagagtttttttggtctggtctgcctacaccgcaagctaaaattggtttgggggaatcatgtaatgtatgaattaactaaaccattatatatatatatatatatatatatatatatatatatatatatatattgttttagatcttcagt

SEQ ID NO: 47760 - DNA, 648 bp, Glycine max
  Clone ID: PAT_MRT3847_143133C.1
aagagaatggttgggatgcctgacatggatagtctcattaagaagcctgacgttttatcatttcacatagccagtaaaatacctgtgtctgagtctacaaggcaggaatttttggatattgatagcattgcatataggctgcgtagggaaattgaattactagagagcattgatcttatccggtgtaaaagctgtgaggtaatcattgtctaaccaaagccccacagttttgcacttcttattgcttgtgaataaatatagaggcaatttgggattgtacaattctgtttcaactttcatcaaatgcagaaaatactgtttcttcctctttttttaccttaaaatttgcagactataattgcaaaaagaagtgatatgttgatcatgtcaagtgagggtcctcttagtgcatatgtgaattcaggtggttatgtgcatgagataatgactctatacaaggcaaatggtttagctctcactggatcagcagtagcagatcacagttggtttcccgggtatgcatggacaatcgcaacttggcaacatgtaaaaacaaattggatggctttttacagccagggaacaaacaactgaaacccagctctttcttggggattcggaagctgtcacttgcagaagaatacgcca

SEQ ID NO: 47761 - DNA, 441 bp, Glycine max
  Clone ID: PAT_MRT3847_143134C.1
tgaaattaattatttgaagggtagagtcaaatatagtagcaattgctacatgtattgaatctgctttgagtgctagcctgttcctgggtgcgattgtggttgccggaactattggacagcacttctggtgtttggttatggcattgatgtgcgatggagcttctcgtggtcaaggggtggagtttgatgactagtgtgatttgtttggtgcacttatggaggctcgaagataaagaacaccattgcatgacctttattagagttaagccagattacaaaatgaatttgtaaataaaagtcaacattatttcaatccaagcaaagcttttcccaaaccactgataattacttttcagccggcagcaataccattgcatatgaagcagattatgcaagatccaagattgagttgaaaaagctaaatttgatttgaatataatt

SEQ ID NO: 47762 - DNA, 127 bp, Glycine max
  Clone ID: PAT_MRT3847_143135C.1
acgggattaattcaagtttttatcggttataaaacgccagaaaggcttgcagtcctcgtatgacgccgatttcttttaatggtataagagtataaaattctctcataatagcaggcaaaaaaggtta

SEQ ID NO: 47763 - DNA, 260 bp, Glycine max
  Clone ID: PAT_MRT3847_143136C.1
ccatgacagtttatgcgacgatcgtccgcccgaacggtgagaccttgcgcggtatgcagaaagagaatgacgtacttattttcaacatattcactgccgaagcgatctgcaaactctatgcgtacgaaactaagaccacgttgtatggaccagctgatataacaaagaaattgtctggtggttttatataactagtgcggcacattacatagctgaatgcaggtttacttcagaataggagaatttctcaagaaaatttt

SEQ ID NO: 47764 - DNA, 405 bp, Glycine max
  Clone ID: PAT_MRT3847_143137C.1
ggctcgagattcaaagtcgggtgtctatgttggattttaaggatattttatcaccggggctagtgccatatatgacggtgggcgtgaagatgctgaatttcctataacaaggctcaagcgcaaagggactaaaacagtacttgagtcaggcgacaggtaagaggctgttgcctctgtagcagatacacatggaactgaaaatgatagtgtcaactgatctttccgtccagaacagaactctggatttagttcctctctgaaagcggatggacatgatgtttctctgagtggtgatgggatatatgatgcacgctctttagctgtgactgatcttgggattgctctgtagaatgaagctcaggacaatgctgcctaggatgcagcatcgatcatacttatggggac

SEQ ID NO: 47765 - DNA, 517 bp, Glycine max
  Clone ID: PAT_MRT3847_143138C.1
aaaaacaggccccaaaaaaacaggacccccctttgggggggatttgggccccaccaaattaaggggggttgggaaaacaccaccctgggttacaaaaaaaaaaaacttttttttccttgggccctatggggccccccgggggggggccaaaaaaaaattttaacccccttttttttcccaaaggggcccccccccaaaaggaagggggcctcaaaaaaaaccccggttttccaatcattcttttccaaaaaccaaaaaaaaaaaagggaaccccgggttgggggccccaaaaaaaaaaaaaaaaagggaaaaactgtttgaaaagctgggggaaagggccccccttgaaaaaaaacaaacccctttttttttcccccccagtttaacccccttttttttttttttttttttgggggaaaacttttccataaacccccccaataatcctttacccccttttgggttatcccttttggggtgggggcggggcaaaaccaaatgggggaaacaaaccaaa

SEQ ID NO: 47766 - DNA, 2857 bp, Glycine max
  unsure (1)..(2857): unsure at all n locations
  Clone ID: PAT_MRT3847_143139C.1
tttgctgtttggagatgtaccattaattaatttctatggttttaatggtgtttacatggttcaggatcctatctacagttgtgtgttgattgtacttttcagtgtatattttgcttgctcctacaattctataagtttcttttcactgcatgcatgattacattggttatttattggtaatataaaataactgtttaattaaatatttgattattttacactnttaccccaggagaaagagagaaagtaataatggaggaatcgttagggcagaaatggaagcagccagagttcgctttggcatcagtttccgacctctctttggctccttcttcttcggcttcgccgggaattgctcgcttcaactctgacggtctccaaattcatcaccaatctcaccagattccattcaatgttgatcctcgaactgttcagttattcaaggtgagtcctgttctatcggtttgcttggtggaaggatccgatgttggtaaaaagggaaacgtgccaaatggaactaatacaacttctaaaagcaaatttgatgaaaagatagagtcatcttctgcaaaaatgtattttcattattatggacaacttctgcatcagcaaaatatgctgcaggactatgtgaggacagggacctatcatgctgctgttcttgagaaccgtgctgatttcattggtcgtgttgtagttgatgtgggtgctggtagtggtattttgtcattatttgctgctcaagctggtgcaaagcatgtttatgctgtggaagcatctgaaatggcagaatatgcgcggaaacttatagctggaaacccaacactggctcaacgaattacagtgatcaaaggcaaagttgaggatgttgaattgccagagaaagcagatattctgatctctgagcccatgggcaccttgttagtcaatgaaagaatgctggagtcttatgtcattgccagagataggtttctcattcctaatgggaaaatgtttcctacagtgggaaggattcacatggctcctttcagtgatgaatatttgtttgttgaaattgctaataaggccctgttttggcggcaacaaaactattatggtgttgatttgacgcccttacatgggactgcctttcaaggatacttttctcagcctgtggtggatgcttttgatccaaggttgttaatagctgctcctatgttccatgtgttagactttaccaaaataaaggaagaagagctgtatgaaattgacattcctctcaaattcacagccactgtgggtgccaggctacatgggttggcatgctggtttgatgtactgttcaatggaagtactgcacgaaggtggcttaccactgcccctggttcacctacaacccactggtatcagttacgctgtgttctctcacagctcaataaatgtaatgacatcacaagagaacactggaatactgcacgtcattactcactttgctaagatgcataaagtcaaagaaaatatatcagatagccggggatcgggtactgacaatatatgtcatggcaggacaagaaatcactggcaggatgcacttgattgctcacactgctcagagttatacaatctatttaaaattgtcagctaaaacgtggggtcctggtgctgaacaaggagggattcttcaaacatcatcctgtaaacttgatctcaaagaaccttactatagaatgtctcaaccgcaagcttatccattagcccaagatcagcaacctcaaccacttttacagacacaggatatacacatccaatctcaagagttggatgaagtggagatgatgcaacagccttctactaagtcgtgtgctcagattgactccctcatgcagaatgcatcataagttgatgaatactaacatgaatcactaacatccagttgggggaatgtgtccgtctttatttggacataccccttgcctgtaaattcatcaatgttgctcttgttatctattgagtggttgtgctgcagatcctatattcaattcttaatttatcaagcaatacattgaatcctcaagcctggtaaagttgggagcctatgtaaaattattttttaggtatagaatttgcctttgtaagggcagtatcaggctcacgtgaatgtagaaagggaaaaacgcttttttgtttatatgagcgggtgtaaacattgcttttgccaactattgaagttgaagccgagttgcttttgaatgtgtcatgggcaggacaaagaaattgctggcaggatgcacttgattgctcacactgctcagagttatacgatctttttaacattgtcagctaaaacgtgggttcttggtgctgaacaaggagggattcttcaaacatcatcctgtaaacttgatctgaaagaaccttattatagaatgtctcaaccacaagcttatccattaacccaagatcagcaacctcaaccgtttttacagacacaggatatagacatccaatctcaagatttggatgaagtggagataatgcaacagccttcgcctaagtcgtgtgctcagattgactccctcatgcagaatgcatcataagttgatgaattctaacgtgaactttctgtttgtaacatgaatcatccagttgggggaatgtgtccgtctttatttggacatgccccttgcctgtaaatcaatcctgtattgaattcttaatttatccagcaatacattgaatcctcaagcctggtaaaattgagagcctctgtaaaattattttttaggtattgaatttgcctttgtaaggactatcaggctcacatgaaggggaaaacgccttattggttttatgagcaggtgaaaatattgcttttgct

SEQ ID NO: 47767 - DNA, 484 bp, Glycine max
  Clone ID: PAT_MRT3847_14313C.1
acggctgcgagaagacgacagaagggatatatgataattttttaactttttacaaaatcacttcaaaagtcacatattaataatttatgattaaataataatttttttttatactggtagtacattattattaaacttattgaaaaagtatatttatttatagaaatttaaaggtatgagactgttagtgtgtttaataatcttaattttgtaaaattaattttaattaatgttgaatttaatatgaaatataaaaaaatatttcaaaaataattttatactaaaacttaatagaaaaatctcgataattacaggagttaaatttttaatctttaatcaaaagcacttttaagaataaatttgattttaacatgctatttgaactgacaatgcaaaaaaattagaaaaccacgttcgtaattagtgggcatgggttttacatttgtaagctccaacgttactccaaacacaatataaaataact

SEQ ID NO: 47768 - DNA, 293 bp, Glycine max
  Clone ID: PAT_MRT3847_143140C.1
gcgggtatcagttggctggatgtttgcatccaattcaatgcaggtaataacttcatattggcgaacaacaaaaatcatacctttgatggcttcggtatcaacaatttggattggtataaacctgaacattttggaccccactacttggggggatcaaaatggaagatagcatacctgggcccattggtggaagtggaacccttgggggaattttcttttcaaaggattcaagtgcatgggccttgcttctttgaaagacatcaggggggggattgaacagatcccctcatctg

SEQ ID NO: 47769 - DNA, 262 bp, Glycine max
  Clone ID: PAT_MRT3847_143141C.1
tgcatctgcgcttatacgacaaaaaggtgcgtggtgtaataaaacaacgtaagggttcttctgtaaaaaaactaaattacgcatgtgtgcaacgtcataaagtttctataccgatacttatatatattttaatgggcttcgttgatcatacgtttttaaaccgaaactttcgttaaataaaactttcaattcttacaaattacctctattggtccacatttttttataattgtttttatttttatttcattttattttcaaa

SEQ ID NO: 47770 - DNA, 1723 bp, Glycine max
  Clone ID: PAT_MRT3847_143142C.1
cttcccggtcctcacccacgcgtccgacttgccacaccaccgccgccgcaggagacaacaacaacaacaacacgttccattctcgaggagagagtggttgggttcgatggagaaggagttggtggaattgtacgaagcggcgaagaaggcggcggatgctgccatctccggcgacggcaaacatgaggaaagccgatgcatcgatgcgctcgagcagctcaagaagtttcccgttaattacaagattctcgtcaacacccaggtgggtaaacatcttaaagttttgacaaagcacccgaggctgaaaattaaggcctttgctattgacctaattgagatatggaaaggcataattatcaaggaaacaagcaaaaataaaaatgggggctctgatagtaaggttgagtcggctaatggggagaaatctaaagctgggaaaatgcaaaagagtccttcggtaaaggttgaaaaaggtgaaactgttaaggttgagaaaattgataggaatggtacaacaaagtcaagctcagaaaatatgaaaaaggtacaaaacgatgtcaagaatgagaaaactgatcgttctgcaagtgtcaaggtggaaaagatagccaaggaggaaaagccagtttctggagcaaagaaaatgtcatccagttctgccgctcccccaaaactaaaaactatgattaaatctaatgatgcaacacgagacaaaataagggaaattctccacgaggctttatccaaggttactggagaagctgatgaagatcttgtagatgtagtcaataattctgatcctatccgtgttgctgtgacagtggagtctgtattatttgaaaaatggggcccttctaatggggcacaaaaggtcaagtataggtccttaatgtttaaccttaaggattcaaacaaccctgatttccggagaaaagttctgcttggtgttattgagccagagcaactgatcaacatgagcacagcagaaatggctagtgagcaaaggaagcaggaatatcagaaaatcacagagaaagctttgtttgaatgtgagcgtggaggtccgccaaaagctacaaccgatcaatttaagtgtggccgatgtggtcaaagaaagaccacctattaccaaatgcagactcgcagtgctgatgaacctatgacaacctatgtcacttgtgttgtctgcaataaccgttggaagttctgttagtgcagttgtgattagtgagtctcactagagctgttgtcttctgttactgatttagggtatgaaggtgcgagtatcatggttccgaattgcaatcgtgccagaattttccatcagactgtttagatgtagaaatttttaggcagaaaaattgtactttttattctttcagttttaactcaagttttcgcattattgtagtttgctgtaactttacaagtgattgcaccaatgtttttctcaggttctactcatcagtaactaagtacttaacctaatggcatccaacctatacgattagttaacagaatggtcagttagagctaggttttattcataaacactaagtgcattgtacttaattttctttgtaagcttgcagcacactttacaatgtagtctcttcgtttcattttaattttgaaaacagcttagctttagttgcaatgcgttgcttgtaagctgcgaaccctttcaatgcatctgtagttcagtgaagaactcttacctttt

SEQ ID NO: 47771 - DNA, 233 bp, Glycine max
  unsure (1)..(233): unsure at all n locations
  Clone ID: PAT_MRT3847_143143C.1
ctcgagccgattcggctcgaggcatggtggaagctagagtaataactgcngaacatggtcaccgtttctgtgggggctctacccaggttctcatgatgttcgatttctcttattcttacccatcttcttataataaatatttatgatgacgtgtttcaggttctgtctcagacggagtcagtatataagacacctgctttctaacggtggtggagcagaggggtgtaggttca

SEQ ID NO: 47772 - DNA, 291 bp, Glycine max
  Clone ID: PAT_MRT3847_143144C.1
attcattcgctgatcagttttaaactaatttaaaaccacttcagaaccggttcggttctgaaaagaattataaactggttcgaaactagttcagttcagaactagttcaaaactggttttctaaaccagttcagtttcaaactagtttgaaaaccagttcgcagatttgggttaaaaacaaaactagttaaaccagtttgaaaaccagtttggttcggtttttttccaaaccggtttttgcacagccctcctccacatatgattaccagatcatgcgagccttttataatt

SEQ ID NO: 47773 - DNA, 279 bp, Glycine max
  Clone ID: PAT_MRT3847_143145C.1
gaaacatagaatagaatagaatgagaccgaaatgaaaatgaaagagaaatgagcattggcagtaggaagcaggcaaggcttcacagatttggccaaaccagttctacactcctccacaaacacccaagatgtgtgatttggcgatcatcaaaatgaaccaaatttccagaaattaaaaattcagaagagttttttgatgttgagaggctgcaacacattacttaaaattcgtcgttgaaatcaaaacagagagagagagagagagagagagagagagag

SEQ ID NO: 47774 - DNA, 276 bp, Glycine max
  Clone ID: PAT_MRT3847_143146C.1
ctcggatttcggttcgaggttttaccggattttggtaaataatatggatgggttttattggccattcccggccagggttttcaagtttaattcaagggttttgaaaataaataaatcctactggatatttattttggatttatgggggtatttcacatgctgcagtcatggatgaattttggctcatacataaagtgtagctttgaaatggggtagcttgatttgtttgaattaactttgcattttgtgactgaattactcacatgctctttttta

SEQ ID NO: 47775 - DNA, 886 bp, Glycine max
  Clone ID: PAT_MRT3847_143147C.1
acgagttttggcccatgcgtgtgttcctcatctcaactcactcctttataattgctgcgtcgacaaaaaccctaactcttaatcttttttctcttcctttcacctcctcagcagtcgtcagaaagactccataacccaaaaatgcctttcaagaggtacgttgagattggaagggttgctcagatcaactatggcaaagagtacgggcggctcgtgatcattgtcgatgtcattgaccagaatagggctcttgttgatgctcccgacatggtgaggtcccaagtgaacttcaagaggctctcgctcactgacatcaagattgatattaagaggattcccaagaagaaggatctcattcaagccatggaggctgctgatgttaagaacagatgggagaagagttcttggggcagaaaactgattgtgcagaagaggagggcatccctcaatgactttgataggttcaagataatgttggcaaagatcaagagggcagctgttgttaggcaagagctcgctaagctgaagaaaagtgcctaattttcaattttcaaattttgttttgaatttccttcagttagtacattttggttgctatatgaatttttatgtatcaatgagagacatcctagaaatgcttattttgaaatcattcgtgttattggttgatgctagttctcccaatatcattgttagaatatcaggtccgttttggcttttgcttgcagatgtttgaatattggtttttgaaattttataaaaccttgagctaaaattcaaatatgtgagctggaactgctttttaattttcctcattaagatgttcttgtttttgataaaaaaacaaacatcttcacaaactagtaatattattcttcgaatccat

SEQ ID NO: 47776 - DNA, 459 bp, Glycine max
  Clone ID: PAT_MRT3847_143148C.1
accaggtcaagtttaattttatatagaaaaaaagctttctatttaagctaattcaccataactttttcaaatgtacacgacgagattcttatccataggatgaattcaatattaatgtattgtaaatggcctgttctcctatgtaccttaatatttttctagagtagttcaaaggtacagaataacaatattagcaaatgatattgagttgtactatgtctgaagacaattaatggtgctcaaacctctggtgtactcaaatctcaaaaagatcaatgatgatggggatattaacagaaaggaactgattcaaatgcaaaaactatcacactgtttatctttattaattttttatgtctcttcaattcagaaagcttgctttttttttctgatgcattcatataaaatgtatcttctcagttttgttgacgtattgattattttgtcactgaaggatca

SEQ ID NO: 47777 - DNA, 989 bp, Glycine max
  Clone ID: PAT_MRT3847_143149C.1
acaatgactctcggcaacggatatctcggctcttgcatcgatgaagaacgtagcgaaatgcgatacttggtgtgaattgcagaatcccgtgaaccatcgagtctttgaacgcaagttgcgcccgaagccattaggccgagggcacgcctgcctgggtgtcacacaaaaaaaaaaaaaaaaaaaaaaaaaaaaaaaaaaaaaaaaaaaaaaaaaaaaaaaaaaaaaaaaaaaaaaaaaaagaaaaacctttcacctcttcagcagtcgttacagagactccataacccgaaaatgcctttcaagaggtacgttgagattggaagggttgctcagatcaactatggcaaagagtatgggaggctcgtggttattgtcgatgtcattgaccagaatagggctcttgttgatgctcctgacatggtgaggtcccaagtgaacttcaagaggctatcactcactgacatcaagatcgatattaagaggatccccaagaagaaggatctcattcaagcccatggagcttctatgatgttaagaacagatgggagaagagttcttggggcagaaaactgattgtgcagaagaggagggcatcccttaatgactttgataggttcaagataatgttggccaagatcaagagggcagctgttgttaggcaagagcttgctaagctgaagaaaagtgcatcataggcattatatcatgtgcaattttcaaattttgttatgaatttcattcagttagtactttttggttgctatgagtttttatgtatcaatgagggacatcctagaaatgtttatttttaaatcatttgtgttagtgaattatcgccagttctcccaatatcattgttacaatatcaggtgtccgcattggcttttgcttgcaaatgtttcaatattttggtttttgagatgttattaaaatcttaagctacaaaatgcaaatatgtgagcagggactgctttttaatattcctcgtt

SEQ ID NO: 47778 - DNA, 329 bp, Glycine max
  Clone ID: PAT_MRT3847_14314C.1
ggctcgagatgggattgaaactggttacattttagatgataaaaaaacaattgatgtgtttgacattttggacggaataccatctcttgatttatttgtccaggtatgctatgcatgtaaataaactggcttcaatgagaattgtgtacaatttattatttgtaaatcgtgctctggtaacagaagattttcttaggcgtgaattacgattttgagacgacctctgagctagggattaactaggccactgacaacaccggtgagagaactgtggttacacgaaacaatgctgtcgctcgttgttataaacagactcagcgatcagattg

SEQ ID NO: 47779 - DNA, 545 bp, Glycine max
  unsure (1)..(545): unsure at all n locations
  Clone ID: PAT_MRT3847_143150C.1
aactcaaaacaactggctttcattgaataaaaaggaatgtagctcttgatacacttattaaatcactctattatttcactcggtaataaggggaaaaaaagccctttgacattcattcgctggggcccacccatttcaaaagttaaaaaagaaaacccctgtttaggccttaaaataccataactggaaacccggggaaaaagttttggaaaaacacccgcccggggggcccctgggggagaatttttnaaancccccccccacaccccccttttttttttaaaaaaaaaaaattttttttcccccaaaaaaataccacaaaaaatggtggtttttttttttgggggaggggtttttttttattcccccgccgggggtgttttataaaacccctcaaaaaaaaaatattttcccctccccacaaaaaacaaaaaaaaaaaaggggcgcgccccccccccctttttttttttttttctcccccccccgagggggggggggtttttttttttttttttttcccccggagagaaagagagggagaaga

SEQ ID NO: 47780 - DNA, 2551 bp, Glycine max
  Clone ID: PAT_MRT3847_143151C.1
agttggtgaggagggccccgtgggtgtcggtactgcgcagaagattagttgtgcttaattttaaagttgatttatttacacccaaactgaattaactatatatacacaaactcgggtcatggccatggattaattgaatagatgagtgatatctgaagacaagtgcaagaacagcaaagttttagaaagaaaacggtaactaacacacaatggaactaaaaatgacaagcatgcatgagacaataatcaagcgaggttgtcttcggtggtggcaagggaaggcgaaagcgaagtgcgcgagcgagcctcatcgtaatcatctcccagaggagactcttccactctgatctcctcaatcatcttcacaacctccaacatgcacggcctcttctccgcctgcgccgccacgcacgccagtcccacgtgcagcatcgccaccaactcatcctctatgttcttgtacctcagcagctcctggtcaaacacctccgaagtccactcttctttcaccaccgatttcacccacttcggaagatccacctcagcctcacgcgccggagaagtgtactccttcgacggagcccgacccgtcagaacctccaacagtagcaccccgaagccgtacacgtcagcctcctgcgacagcctcttcacctcaacttgctccggcgccctgtaccctcccaaccttgcaatcgcgtgaacagggtttaaaagcagcgaaaggccaaagtcagatattaaagcgacgccgtttttgtcaagaagcacgttggaagatttcacgttcccgtgaggtatctttgatgcgttatactccgcatgaatccgtgccaaacctctagctgcacctaacatcaagcttattctcgtggtccaatctaacggaatccttcctggtccccggttcccatgaagaagagcatgcaagcttccattggggagataatcatagacaagaagcttttcttccttagcgtaataataagctctgagtctaacaatgttggggtgcttgagcttccctacaacatccatgtactgttcaaactcgttcctctcgcaggggttagcgtctttgagtctcttcacagccacggtgcagccgtcatcgagcaccgctctgtaaaccgttcccaagcttccttttccgagcatctccgccgaagctcgaagcagatcctccaactcaaactggttcctcctatcgaaaaacacaagcttgcttcgttccgtctcagtgttcgtcccatcactatctctatccaagtttccaccgttcccatacaccttcttctcgctcccagaactactcccactttttctcttcgcggtctcgctccccaccaccgaaccagaggtggatcctctgcgcaacaatgcgccaccgcgaacgacgtcgccaccagcaccgccacgcaaaccgccaccacgatcgccacgatgacaccggcgctcaaccctttctttctcggagtgtcaggaacggttacgctacttgtttgcgggaacgagctcggttttgcagggacggttattgtagtctctgtgtctggctctgtttcggagcatttgggtagcggggtggacccacagagggcgtggtttccggagaagcttacattgccgaatttggtgagcatggaatcggggacgtggccgcggagttcgttgttggtgacgttgagtacggtgagattaaggagggaagcggaaaggtcggggacgtggccggagagtgcgttgttctgtaacctcaacgtgaggaggtgggttagtttcgctagttgtgtggggattgggccgcggatgttgttgtcggagatgtcaaggcggaggagaaggcggagcgaggatatctccgccggaatctcgccggagaaatcgttgcgggagaggtacagtagttccaggcttgtgcagtttaagagaggtgaaatggtgccgtttaagcggttttcgtggaggtcgagaaagcgaaggtaggttagtgtggagagggtatcaattgggccgcggaggttgagggaagggagagtgaggcccactactctgccgtttggggagcattccacgccgcgccacgcggcggagcaggcgtcggcgccggtccagttggtgaggaggttgccgtgggtgtcggtttggagacggaattcggtgagagcgagtgtatcattttgccctgcagcctctgcagcaacacagaggatgcacaagcacaaggccagtgccaggaatatgggacaatgacaaacttttttcatgtgctggtctgggaagggagggaacgagtgtggtggtgttattaatttaaaagaatttcagatttggactgagaaggaaaatgtgtcatgaggacggagagagtgtgtgattgaggaaaagtgttgaagctgttgttattataggtcatggagaggtaaaggtaatgggatttcgaaggtcgaaggggtgggtggtagtgtctatgattgctgttgtcctcttcttcataagaatagaatcagtgacaagaggatgctttttcttttgctaggctttttatgct

SEQ ID NO: 47781 - DNA, 521 bp, Glycine max
  Clone ID: PAT_MRT3847_143152C.1
gctgcatataattaagggatgacaagatataagaaaccagtgttcgttattttagaaataggtgaatatatgtgccaattgaatataacttcgcaagtagagttattatgataaaaagggcaataagataaagcagtttggcatgtgctttaatttagtttttcaatgcttggtctcttacaaatggcttataattccaattgaagcattccaatctatgtggaatgggtattcgattggtatttgggctaatcgaatatccaaatatatccctcattacctttaagatgttgaaataccatcaagaatacctagagatccctttacaaggggtactcggattttcggcctaattgaacacctaagtgtcaacaacatctaaatacctagatgtcccttcagaagaggtactcaagtattcggtcatatcagttaccaaagtacactcaaactccaagcatgccaagatgctcattcaagaaaggtacgcgagcattcggccaagccgagtacttgagtcc

SEQ ID NO: 47782 - DNA, 443 bp, Glycine max
  Clone ID: PAT_MRT3847_143153C.1
cctctatatggggatccatagtggatatgatttacaaacgaatccaatgaacgcctcacacagttatatatcaactgcatcaactgggagggaaactggcctgtgcacagagtgtcgatacactgagcccgcgtaatacctctttgctggtaccataccttctccaggggatgaaatcgccacacaatggtgggcccttcggttgtccgaattggggctgctttcacggacatgatggtgcctcctgtaatgacaattccacttggccgcaaagggtttcacctgatgcccattgttgcctccctataatgttcctgtcagtgaaggtgacacatggccattttctgttctgtgctcactgatacatctatgcgaacattgcccatactgtcgatccttgtgaccgcttacctacatttggtactaagctgtgagccatctga

SEQ ID NO: 47783 - DNA, 531 bp, Glycine max
  unsure (1)..(531): unsure at all n locations
  Clone ID: PAT_MRT3847_143154C.1
cacggnaagagttgagatagagaccgagcaaccataccccacacccacgcatccttcttctcttgtcatttccccacactctctttccctccatgagcgccatggatttctcttccatctatggtgtctcacacaaacccttcctcaccctcttccttctcttccttctacctctccattctcactctcacaactctacaacctcagctcatattaactcaggctccatcctcgacgctatgctcgattcccattacaccgaactcgtgtaacttgttgagaaagcgcttcttctccagcagcttgaaaacgccgtcggcaaccacaacatcaccatcttcgccccccgaaaccaagcccttgaacgcgacttagaccctgaattcaagcgtttcttgctcgagcctcgcaatctcaggtccctccagacgctcttgatgtctaacattctccccacgcgaatcgcctatcaccactggaccgtcggcgacctacttcaccgtactctctccgaccaccacctggatttgg

SEQ ID NO: 47784 - DNA, 325 bp, Glycine max
  Clone ID: PAT_MRT3847_143155C.1
aaagattttgctcaaaagagcaaagactatgccggtgatgctctgcacgagatctaatattatgcacattatgcaacgcacaggagcagagaagatgctagggatgctacgccacatgagcaaagactgctttgactacacctgttgtgccagctcaatggaaaagtaactaatttgcgacatctgcgattatactctttaggctgtttaatatgtacgtgggtggcccggatgaccacacagtatactggctgttcagagacaccaggctactctgcgacatatcataacaatgatagggttagattgaccacactctattgac

SEQ ID NO: 47785 - DNA, 226 bp, Glycine max
  Clone ID: PAT_MRT3847_143156C.1
ccggattcccggtcgacccacgcgtccgttcttagtacaaaataaactttaacttcagtgcattgaatgtcagttgcattattatttggataataataagaataatgataataataatattgttttgcctaaagtttcaatgtttggagtaaagcttttaaaacttcatcagttaagaaatggaaattctctatggatataataggatctaggggggggctttcta

SEQ ID NO: 47786 - DNA, 366 bp, Glycine max
  Clone ID: PAT_MRT3847_143157C.1
cacgcgtccgatttctttgcacaaaaattattggagtggtaatgttaccggttttgccatggcttgctctaatacatttggactggttaccggtgcatttctacttggatttggtttgagtgaaattccaaaaggcatttggttaagtgcagattggaacattgagcaaaaagttctttcacataaagttgcaaaaatggctgtcaaattagatgatgctcatcatgatttttcaaatgctattgttgtaagctattcatatctttagtctatgatgatcttctaacaattgaatttgcgttttgtgtaaagtcttctgagtatgtatttagtttctcttgacctggaagtgggatggttgtcatg

SEQ ID NO: 47787 - DNA, 419 bp, Glycine max
  Clone ID: PAT_MRT3847_143158C.1
agatccgcgacgacatactgcagccctgctgtgcttcgctgatgatcccttcgagagagagaaacacttttaaaactctctctatcgctaagatggacgaccatccaatgcgcacgcgctggtgtctacagaacttaaaattgtcctcgcatgctatgtgtggaaggacgaaagacgcggagattggagatactgctcctgccctggcggacagcattggaaattcagtgacagagaccatggcgtgcaatggcaaccaaacggcatcgcacatggctgctaatgaacagctccgaggcgaggggctcaatcagaatcacactgaggggtttgtgactaccattgtagatgaaaggccgcagaagtccccgcttccaccctctgaatctgcagaaatgctatctttagcagagagccta

SEQ ID NO: 47788 - DNA, 642 bp, Glycine max
  unsure (1)..(642): unsure at all n locations
  Clone ID: PAT_MRT3847_143159C.1
aagattgtaaatggattttgtattcatttatttggtatttacaagcacgtgtcatagtactttgagttatacaaagtttctatgttttagtttagatgtgaatctctatgatacatcagttccacaaaacataggatccaatttatgtaaaatggtgattttttgtggtgcttgtgatgaggaaaaatattagacataatggcaattctatttaaaacaaaagggcactccgagtgggtaataacaggtaatgttgaaataaaattctcttccgagttccaaaactgtattcagaacgagcttgagcttccattaaggtgtttctactcgcgagaaagagtagtttgcagctttttaagttggtcacactgaaacttttcattaacaatataatccacgcttaaacaattaaggtagcagaaacaactgaatattcatcttctccttgacataaatcatctagtgtgacatcgagatttttcttatcaccacgaagactacgattttgtttagatanaatttttaatagttatttgttggaaaagaaaataattctatgaatatcgtgatttggtttccattgaactcatttgtctaggctaacttgagagaatgtttangtggcacccataatcaatttcg

SEQ ID NO: 47789 - DNA, 290 bp, Glycine max
  Clone ID: PAT_MRT3847_14315C.1
ccggggcgatactgacactggcaattactgaaggacatgcattcattgaacttgttggcctaaagtaacaacatcaggaccaggaacagggggaacaacctttggaactgcggcaatatagacccgaactgtctgaacaagatatatttgtaaacccaccacgttacccacttgtgctcagcgctatctcaaatctgaacttctttgctactgctatccaatgcccaccacaatcacacgcacttcctcctcacgttcgcaatacactctgctcaaccatatactttcct

SEQ ID NO: 47790 - DNA, 489 bp, Glycine max
  unsure (1)..(489): unsure at all n locations
  Clone ID: PAT_MRT3847_143160C.1
cccacgcgtccgtacggctgcgagaacgacagaagggtactttagaagacgtgctgcagcctgcgggttttctcattgaaatttatgatattcttggtaacctcaagaataaaaactcgtgaatgaggaagagaacaccatcatcttttcttctttttttttgacaatgaaccgccgtcattgaaaaaagaaaataaatgaaataaagtctaaacttattcttaaaaagggaaataaagttgaaacctgagaattgagatgatgaaaaataagattatttggttgatcggaaagaaaataaaaaaataacaattaccgaaacagagcacttttcaaataaaaaaagaaggaaacagcatagtaaatttcagctattttcgttcatgtattgcaataaaatgaactttagtggagcccaacaaaattttaaaactttgactctttcctcttcccgttgtgtgtgggnctatatatatatatatatataat

SEQ ID NO: 47791 - DNA, 165 bp, Glycine max
  Clone ID: PAT_MRT3847_143161C.1
caccaactctctctctctcacactgtctcccggactgcaatggagttgcataagcagaagaagcgattcgtctcccgatgacctaagcacttctcttcgacgtaaacctgactaatgacgcgaagaaggaatcgacatacgacgcctccgtgcgtcgactcaaga

SEQ ID NO: 47792 - DNA, 359 bp, Glycine max
  Clone ID: PAT_MRT3847_143162C.1
cttattcgtggggaaattgatcacaggttggtgcactgaggtgcctgcaacaacagctgtggttgctggagggtgagcatcttagaatgacatggtgcatgatggtgtactgtgtacaatggcaaagaaatttagtatttgtgatgggcaggcaaccataaacaatgtgtgtgcataaggctacaatacaggttgaacacgtcttctaattgagagaagccatgctgactgaattaacacaggaacgtgtctgaatcagatggcagcagaagagaacaccaaagcattttgaacctaggaagtagagctgccgctaacctattagggatctgactgggggaggaagtttagtgaacaaa

SEQ ID NO: 47793 - DNA, 459 bp, Glycine max
  Clone ID: PAT_MRT3847_143163C.1
tgttattttctgttatttgcatttgaatcaaatcaaattttgattgattgattagaaaatggcgttgaatatgactcaccagatcgggaccctggctgctgcgacggtgccggtgccgaattcgtccgccggagaatcaaccgcggcgatgagtgccgccactctgtggaagccgccggcggtgagtctgaagtgcaaggtcacgaggacggagggcggcgcggaggggctgtcgccgccgctgagcccgtgcaggtcgccggtgctacgggcggatctgtcggcagcgtgtcaggcgttcacggcggaggtggcggcggaggagtacattgccggagggaaggagaaaggagaggggaagaagggagtgcccctgtttgtgatgatgccgttggacagcgtaaagacgggaaacgcggtgaaccggaagaaggcgatgaacgcggcgatggcggcgct

SEQ ID NO: 47794 - DNA, 441 bp, Glycine max
  Clone ID: PAT_MRT3847_143164C.1
attcaccctttaggggtacacacattttttcaaaatccacttgtgtgtttgattggtgaattttttcaaagaaaaattggcaactatttcttttcaaaagcgtgttagccccttttagttaattgattaattattttttttatttttagctatttatttcaatcaattttcctcaagcaaagaaaagattaaaacagcttgcaatccgggcacggttggtatctgagattacactttatcgaaaaaaaacatgcgaatgaaagtacacaagacctctatttttgccgtttcagacaaaccatcgcaaagtacatacaacaatatgctagaagcagtaaaatcactcacaatgagcaacaaataactgaaagcaataacaacatgttcagttcaatcacattggacataataactagaagcagataatgtcaaatcacaacg

SEQ ID NO: 47795 - DNA, 560 bp, Glycine max
  Clone ID: PAT_MRT3847_143165C.1
tcctctagagcggccgcttttttttttttttttttttttttttttttgggccctaggataacagaggtagctaattttgcaaaagattccacaatagtaatactattatcccttttgaaatgaaatgaactaaggcagaaagtgctagtagttaattcacattaatttgattgaaaccttatcaaggccatctaagaatgggcccttgatgatgcaccccttgggctgctattgctactgttatgacacaatgaaacaggcgttttctgcaccaccccatatggaaatgcaacatgtgtagaggtggctggcaagggggtgccggaggttgctacattggtggaggtggcggcaactactgtgcttgaccttaaaacttccgttaggggacccccaagggataaagccacccaaggggctgggtttggccaattggagaaagaaattttagcaccacagagcgttgttgcattaggctccattaggcccaaccgcttgtaaagattaccgacatcttcattcacagcagtacccccctttgaaaaaccaggagaggaaag

SEQ ID NO: 47796 - DNA, 188 bp, Glycine max
  Clone ID: PAT_MRT3847_143166C.1
accagcatttggaatggagcaaagcactggaagggcagacatagttaatttggcgggactcactgccactccaacatgacctggtaatgcttctgttgcggtaggtcttgacataccagtataagagggaggttattttctaccgacttttttcttttacaaatttttttttttaatcaaatttcttc

SEQ ID NO: 47797 - DNA, 1265 bp, Glycine max
  Clone ID: PAT_MRT3847_143167C.1
caagcacaagagcaatggactcgtaagagtagtaactaagaaaataaaggtttctaatttatttcgttcaattctccggcggcaccgcaaccgattccgccaccgcatatggcaaaaggtcgaaaactaacgaccagccggagcgagcgcttcttgggaacctatgcttacagccaaggctccgccgccgtgaacccgtcggagcttcgggaagaggatgtatggggcgccggagatgacgccggcgaacgcgagtgggatccacacttcgccgccatgagcaacggcggcggaagccggcgccggattccgcgtgacacggatgtgcaccggcgcgtgggtgggctgtctctggcttttgaagctccggcgagtggcgcgtcgccgaggatcgtgcaccagtttcgcgcgcgtgaagagatggcgtcgacgccgcgagtgcggcacatggcgacgtcggcgccgatgaacgtgccggactggagcaagatactccgagtcgactcggtcgattcgctgaacgacgattacaacgacgaagacgaatcggagatggtgccaccgcatgagtatttgggcgcgtagccagacgatggtggctaactcggtgtttgaaggagtgggccgcacgttgaagggccgagacttgagccgggttcgtgatgccgtgtggagccagaccgggttcgacggttaacaccgggctcaggtttgggctttcatgggtttactgtaataaaaattattataatatatcaaatttagtttaatagaaatacagacaaatgaatgaacacagtagtgttcattatatatgtctgttatataaaggcgagacaaaacatagttttgtaagtaattttagttcagttttgtaattaaaattggagttttgttttgataatttacgtaataaaaagtttttattatgataaattattaaaatagaacttcaattttaatcaatgaacggtactaaacatgcttataaaactgaatttaagttttgtgtttattataattattgttgttaagcaggtggcaagtgatggttagttgaagacgattgttttggttttgttctgggcgatgattcggctgagtggactcggccgaagagagtccaactcagtggccagtgagcctgagccgcaataattgattagcatgtaatttaaatgataatttgtgaattatgattaagatattttccggccaaggccactttaaaaaaaaaaaaaaaaaaaaaaaaaaaaaaaaaaaaa

SEQ ID NO: 47798 - DNA, 522 bp, Glycine max
  Clone ID: PAT_MRT3847_143168C.1
gtgagcagaatgatagcgaaaaccaaaaaacaagtgtcatcaccttcttcttcttctttccctgattctgttggttccatctcttcattcataccttgatccgtgatctcccaatttctcacttgaagaagcatcttagagggcacccatgtgctcatgttaataatgacaaaataaagacagcatcttatgactgggaagccaaatccagaagcttttccaatttgacaggtcatacaccaggaagtttagattcaagattgatgcataagaatcatggtcattctaccaatgaaggacttctatattttgcttctgacaaatgttcaagtcatacccccaagcatgaggatgtcaaaaagagtcaacaaaattttgatggagaccccagtaaagctcaactaatggtagcattgtgtcactctcaaacacgtgcaagggaagcagaggtagcagcaaatatagcctacgcagagaaagaggatattgctactctcattttcaaacaggcgtcacaacttt

SEQ ID NO: 47799 - DNA, 1755 bp, Glycine max
  Clone ID: PAT_MRT3847_143169C.1
tcccgcggcgagaagacgacagaagggggacagaatggagcagaatgatagcgaaaaccaaaaaacaagtgtcatcaccttcttcttcttctttccctgattctgttggttccatctcttcattcataccttgatccgtgatctcccaatttctcacttgaaagtatgaagaaagaatagataagtaatggcaggagcagaagcaagggctctgtggcagagaactgctaatcgttgctttgtccaagaagatgcaaaaagagctcccaagttggcttgttgccaatcttcatgtgcaacatcaaaatcagttgatactggacctgccagtacagcagatgaatctgatcataatacagttaatgttacccattttaacaggaaatcgtcaatttctaatctatcatcagactgtaggtggtggttgcattcacaacctaattatgggtatcaaaagggtttaacatatgaacagttaaatgcattagaggatgaggtagaaactttgttagctagtgatttaagtaagaattctgaagaatttcatgaattaatggatgtgatggaaaaacatgagacaatggaaattgattgtgttggctgctctggatcttccaagaagatgatatttacttggaatcagactgaagagattcttggattgaaagtgataaggctgagccatggtggcggactacagatagagatgaattagctccatttgtttcgcagaaatctctcaatcaagtgaaaatggtgatggcttgcttttgggatggacaagcatcttagagggcacccatgtgctcatgttaataatgacaaaataaagacggcatcttatgactgggaagccaaatccagaagcttttccaatttgacagctcatacaccaggaagtttagattcaagattgatgcataagaatcagggtcattctgccaatgaaggacttctatattttgcttctgacaaatgttcaagtcaaacccccaagcatgaggatctcaaaaagagtcaacaaactttcgatggagaccccagtaaagctcaactaatggaagcattgtgtcactctcaaacacgtgcaagggaagcagaggaagcagcaaaaaaagcctacgcagagaaagagcacattgttactctcatttttaaacaggcttcacaactttttgcctataagcaatggttacaattgctgcagctggaaactctttgcattcagattaagagcaaggatcagccaatctctactctctttccagtggctcttccatggatgtcatatgaaggtagaagctcacggaagaggaagcagaaaatatccaattccaaacaaggagaaaggaaagccaattcaaaatgtgatattacaacatatgctgttgcctttgctttaggattgagtctagttggtgctggcttgcttttgggatggacagtgggttggatgttgccccgttcatagttctgtaagatttggatcatagtcctgcatgtcataaagattgataaacaaaggaaatggattcaaaagggaaagtggccccaattgttttatcgggtatctatgtaattttgtagctttgttagtgcttcttatactctaaatactaagttgtgcttttgtattgaatctgttttgttaatgtgatgatgtacataaatctttgtgtagatgattcgaaacaactatttttctttaaatacctccttgaagtgaaaaaaaaaaaaaaaaaaaaaaaccccaaa

SEQ ID NO: 47800 - DNA, 462 bp, Glycine max
  Clone ID: PAT_MRT3847_14316C.1
aagcatgagcgcagcgatgtggagtgttgtgatcagaagaagcagttgggagattctccgtcagattaaacggaatattcttctcggcgtcgctatcagaacgttctccactcccaccggtctctatggcttcccccattgaagacccccaaaggctttcaacctttcgtcgatgatgccattcaaaggtctggagaactcattagttacatttgttcgaaaaggccagctgctgaagtaatgcgagcaatggatgagatttctgatactgtctgctctgttgtcgactctgctgaattgtgtaggaatacccaccctgacagggagttggtgaggaggccaccaaggcctctatgaaaattaatgaatatctacattatctgaacacacatcatgatctatatgatgctggtgaagaaagctgagcaagaatgtcatatgctctctgaggaagctcaaagg

SEQ ID NO: 47801 - DNA, 243 bp, Glycine max
  Clone ID: PAT_MRT3847_143170C.1
ggcgcccaacctcaacccggccatctgcatctccgccggattggtcgcgctcggcctcgccaacggcatcaacgtcaggctctatggtgaaatcgagttctggatctccctccagaggttctcctcatcagcggcctcctcctcaacctcaacttccacattgggggggaaaaccctctgaacgaccgatacggcttccgatatggaagacccgggtctgttcaccgcggacgactggtgggc

SEQ ID NO: 47802 - DNA, 715 bp, Glycine max
  Clone ID: PAT_MRT3847_143171C.1
agctcggaatgtcggctcgagccacagaggaggagcgatctgaggtgaggaaattaaaagagcaatgctagcacagggattcgaggacgaagagaaatggctcgccgaggggatcgccggcattcagcacaacgcattcttcatgcatcgcgcactggacgataacaatctcagagacgctctcaaatactccgcgcagatgctatccgagcttcgaacttccaggctctcacctcacaaatactaccaactttatatgagagccttcgatgagctcaggaggttggagattttcttcaaagacgaaagcagacacggggtttccatagttgatctctacgagcttgttcagcacgctggaaatatattgcctagactgtatctcctttgcacggtaggatctgtttatctcagatgcaaggatgctccggtaaaggatgttcttaaagatctagtggagatgtgtcgctctgttcaacatcccattcgtggtctatttttgaggagttacctttctcaagtcagtaaagataagttgcttgatattggctatgaatatgaagaggggtaaggttattattatttggttggtgatgaattaatgtttttgaatgtcttgtgcatcttatcattttaatttggagtaatgttgttacattctcctacaattgttctttaatttaatagtaggtggtaattagaaagtaactaaaaa

SEQ ID NO: 47803 - DNA, 155 bp, Glycine max
  unsure (1)..(155): unsure at all n locations
  Clone ID: PAT_MRT3847_143172C.1
gggctcatgggcttggncgtgcctttttnggtttcnttgtgcanccagtnagcggggcacttgattttttctcnttgnctgttgatgganttggtgcacgttgtnccanatgcnttgcggttttcaaccntcngcactganttccacagnacntc

SEQ ID NO: 47804 - DNA, 1117 bp, Glycine max
  Clone ID: PAT_MRT3847_143173C.1
caaaggctccatctttctcgggttctgttgaggcttattgaagtttggaagaaagggttgagctgcacaacaacctaagaatgggaggaagttcgagcttcagggatgagtataccttggaacaaaggctcggagaatcgcgggatattgtggccaaatatcccgatcgagtccccgtgattgtggaaagatatgcgaaatgcgatctgcctgagttggagaagaaaaaataccttgttcctcgagacttgtctgttgggcatttcattcatattttgagttccagacttagtctgccccctgggaaagctctctttgtatttgtgaagaataccttgcctcaaactgctaatatgatggactctgtgtatagatcattcaaggatgaggatggatttctttacatgtattatagcaccgaaaaaacctttggttcgtacatcatgtaaaatattaaactctgtacactattgtatccaacactttgtgaagtgactactatcacgaaaccttgtacaaatttgttgtatggtttaatgtatcactatttattatattgtgattatcctttccacttaatttgagttccagacttagtctgccccctgggaaagctctctttgctcgtgtctagttctccctccctctccctgctaatatgatggactctgtgtatagatcattcaaggatgaggatggatttctttacatgtattatagcaccgaaaaaacctttggttcgtacatcatgtaaaatattaaactctgtacactattgtatccaacactttgtgaagtgactactatgacgaaaccttgtacaaatttgttgtatggtttaatgtatcactatttattaaaaaaaaaaaaaaaaaaaaaaaaaaaaaaaaaaaaaaaaaaaaaaaaaaaaaaaaaaaaaaaaaaaaaaaaaaaaaaaaaaaaaaaaaaaaaaaaaaaaaaaaaaaagtaactgacattcaaatagttcaaatgacttgggtataggctcgaaagactaatcttaccgtctagtacctgaaaaacatacgaagtttccctcatgataacaggagcactcgggcaaattctatcagttaacgtcaatgatcacatgcat

SEQ ID NO: 47805 - DNA, 337 bp, Glycine max
  unsure (1)..(337): unsure at all n locations
  Clone ID: PAT_MRT3847_143174C.1
nncgcccacgcgtccgttgtttggctttctgaagatggaccttggaccttccaaaagccccttggcttttcttccacctggagggttcttaataaaaggggttggtggtggaaggatggcccattaaggaacccgaaaggctaaagcttgtttggaaagaaggagcctggaaaaaaatggaaaggcaggggaggcttattcaacattccgatctttttgtggccaggcccgaccagccaaaaataaaaggcgacctgaataattggccattcccacctgatggaccaaaggttgggaaattaaatcctaacctttggaattatggacctcaaatggc

SEQ ID NO: 47806 - DNA, 576 bp, Glycine max
  unsure (1)..(576): unsure at all n locations
  Clone ID: PAT_MRT3847_143175C.1
tggtaccgcctgcaggnttaccggtcccgggaattcccggngtcgacccacgcgtccgaaaattttgaaatctcatctgatttttttcaattgaaacggagcttcaaagcatggcagcttttacatcaattgttgtgcagtactcatccacatcatctttacagtctttggtaccttctttagaagctacacgcgatcataattcatggtgggggagagtgagatcatacagacccacagcaaaaatttcactccaacagaatatcacaagaggcttaacaatccaaaatgcagccacaaaaccagcaaagtcaccaggtattgttctgagtttctcttactaaattaaattgccatggcactttttatccttaatcttatttactttcttggagtcattctgaagaagactggaagggtaagcgagaatatctgctggaaaaaagggtaaagcactaaagctccatactctcaactgtactttgtatgttgcatatcttctcgggtgattatgaaaaagattactcttgacttcccaaatgattgatatgttgctctctgatggtcccatcttga

SEQ ID NO: 47807 - DNA, 322 bp, Glycine max
  Clone ID: PAT_MRT3847_143176C.1
atctctgcggttactatgcggttgaggatttgtaacagattgtgtggctgactgaaactcaactttaaaaaagagaatataactatcacgggttgatcctcaccctgtctgttacgtggagttctcaagcaatctaggaatattctgaggtaccagctgtgtcaagctctggtcagctgcacagataccatacaccaagggggctgtcccctatgacacctttgctagcggcagcaggattaacccaatcatgatcaaacgctggaatcttctatctaggagatgggcaggcacagaatggaattaactctcacttaagcgc

SEQ ID NO: 47808 - DNA, 390 bp, Glycine max
  Clone ID: PAT_MRT3847_143177C.1
gtttgatgtcagcattgaatatgaggcatgttcaattccaaatgattgtggttcattggttgttgccaaggttggaaatcacaaacacattgtcggttttcatgttgctgggatcaaacgtagactgggatttgcttcattgataccatatgttgagccagttgtgcaagctcaaagtgctgaagcttactttgacttcttccctgtggaggttgatagtcaagacggagttgctcacattggtgaattgaaatctggtgtctatgtcccactgcctacacagactaattcggtggagactcccaagggatggcacctggatctacctcgtgacaaaattgctagtgggtcgactacaactgatgacagattgttcggcacagatcatga

SEQ ID NO: 47809 - DNA, 256 bp, Glycine max
  Clone ID: PAT_MRT3847_143178C.1
gccctggggagccctgggcacagcagcggccgaggggatgtcctgctccaatacccgcactgctctggagtttgccctctttcccaaggagatgctgctggggagctggtatgggtggggtctttccctttacagacggggcagatgccaggactcagcccatcctgaggaggacacgtgtcctcatggagagggtgctccggcccaggcgggggagtcagtgcccagtcagcagctctgccaccatcctgctggg

SEQ ID NO: 47810 - DNA, 411 bp, Glycine max
  Clone ID: PAT_MRT3847_143179C.1
gctttgctaagagaggtttgacagttaaagatttagtaactttatctggaggtcacactctaggcttttcacattgttcttcctttgaggcacgtcttcgtaattttagttcattgcatgacactgatccaagtatgaacaccgagtttgctttagacctaagaaagaaatgtccaaaaccaaaccacaaccataatgcaggacagttcctggactcaacggcatcagtgtttgacaatgactattataaacaactgttggctggaaaaggtgtgtttttttcagatcaatcactttggtgatcacaggactagatggtttgttgaagcatttgtgaaagaccagagcttgttcttcaaagagtttacagcttcaatgtttaaacttggaaatttaagaggctctagaaat

SEQ ID NO: 47811 - DNA, 331 bp, Glycine max
  Clone ID: PAT_MRT3847_14317C.1
ggcacgcgtacgggtataatataaatttcacccttctctgtgactcactctgtgacgtgcagcgcacactgagagacacacagtgtgcagcagcagcagcaggagcagcagctggagatgaagatggctctgacactgtgggagacattgaaggaggacatagttgtctacacggggatcttcttgaccatcttgttcatgattctagccctgttcctagccctatactacgtcgttcctgggctctaccactgttacgaccacggctacagcaacttgtagcgcgacttggagcctctgatagagcctgtgcaaatcggcgatgagatcg

SEQ ID NO: 47812 - DNA, 1701 bp, Glycine max
  Clone ID: PAT_MRT3847_143180C.1
gtgggctcggacccacgcgctcgcttgtttctctctcttcaatggccgagccccactccaccgccgcgattcttcctccctccaccgcccggttggaggaaactccgtccgggagctctcagactcccctccgctccggaagaggcggctggagtattgtcgatggctccttcgccattgttagggacaatacctgctcctgcttcgtcgtcgtcttcagcttgtggttcttcgtgtcgatgactatgatactgggggtttatgggtccatgaccatcgtgctgggtccaaaatcttcaattgttttccaacctagtcccgtgttcgttcaatctgtgaaggtagaaaacttaaaggcaaaccctggcccaggacccattctttatgggacatatcggtatcccccacttgatgttgttaccacttggggagaaagtattaatgtttctcttccctctggctcatacaaggaatggaaatattatctgaattgtgggtcttcaataaatatttcgtatcacgtgagctctaagagctcttctgttttccttataatcgccgaaggggacgtgagcctcacacggtggctggaggacccaacagaacctaatacaactctgtcatggaatgtgatccatggaactggtatgatcacacaggacatattctggtcgtcgagctattatgtggcattgggcaatttggatgaggatgtggaggtagcattaaacctcagtataagggcctccttgcataatacaacgaatgctttctacaaatgtgatcttgccaatggtccatgcagtttgaatcttttgttttctgatggaagtgcagctgtcttagttactcctggtccacaacagaatgcatccaatgagtggtatgtcaaactgtcctatggaccaagatgggtgacctatatttttggaattggtggattgactttgcttgtgtttggggccttcaacttcttgaacaagcttcagtgtgctcatgaagatagagcaggagttagatctgagggaacagaacgtcagagagcccctttgcttcctcacaaagatgatgatctttcaagttggggttcatcgtatgagtccttgccacaagatgagaaggatcttggctttcttccaggaggccccattgatgggaagactttagttgatggtgaaaccagtaataacacacggcatctttgtgctatttgctttgatgctccgagggactgcttcttccttccatgtggacactgtgtggcttgctttgcttgtggaactaggatagccgaggcagctggtacttgccctgtttgtcgtaggaacatgaagaaggttaggaagattttcactgtttgatcagtgcacttcctagtgtagagattaaatgagtagtcaccagaatcatagaataccttttatgtactcaactatacattattttcttgccaatcattaacaatgatcaagcaaatggtgtctgctgatgagggtcgtattggccattgcagcattgcctactgtaatagtgactagatgaatagccaccggaatcatagattactttttatgtattcaactacacattattttcttgccaatcaacaacaataatcaagctaatggtgcctgctggtgagggtcgtattcagcattgcagcaaaaaaaaaaaaaaaaaaaaaaaaaaaaaaaaaaaaaa

SEQ ID NO: 47813 - DNA, 256 bp, Glycine max
  Clone ID: PAT_MRT3847_143181C.1
aaaccctcctctctcttctgtttgctctcttccctttgtctctcttgtctccctacctcacaccgccggacgttgtctcccggcgccgtggctggccgcccatggttggcgcggccgccgcgtgggtcacttagcctcctacttttctagaaaacactatgtgcgtccgatctccttttttctcctacgcctcggttgctccgttatgcttagaagaccctccctgatacagcctctttctagccttgcctctttg

SEQ ID NO: 47814 - DNA, 421 bp, Glycine max
  unsure (1)..(421): unsure at all n locations
  Clone ID: PAT_MRT3847_143182C.1
aanngtnggncngacntnnagnagcacnnacaaccgacaggcnncgncnnnnggaggacnnncgncnacancannanacgcacagncanngngcagnnangcacncnanncanacngagcannnnnangcangggnnccgacnnannccganncgactangnggngcgnnnnangntcgnngcgnggnagnagncggcgcgccccngnanngntcagancancnnacnngnggncngntgagngcanagccggnnngagcancgaacgagnccgnnncgnnacncannnancnangncacagnagtcncagacngagggaatngatcncanngctnncacgcncnnagcngnacgnnaggccngagcngcnacnnacacagccgaanngnnnncantgcggtgaggnccatngnagnnaga

SEQ ID NO: 47815 - DNA, 164 bp, Glycine max
  unsure (1)..(164): unsure at all n locations
  Clone ID: PAT_MRT3847_143183C.1
gngtgagcctccngaanccantgctgagagtctntnnnangnagtctggatcattgctcatgatttggactaggcaagcccaaagatgattncgcttctgctgaagaaaaagntanacncanccnatgccaacccntttcgttggantttggngagatacccga

SEQ ID NO: 47816 - DNA, 361 bp, Glycine max
  Clone ID: PAT_MRT3847_143184C.1
ccacgcgtccgatcttcacttgtccgagatgatgccccgtccgaagacggtgatttcttgaaagtcgatgtggagggccatatagaatcggatcatcgctagtggctgctaacacccacgctcttctagtgcgtcctgtggcttggaagtctgctggtgctatcgactggtgctatactactgctggtgcgttcttgacgcttaagcacgcctgcaaacaagaacaagggtgctaacaacgcacttgacatggttgctgctgtctatgactgcctaatagctgagggtgctattatcaccacatgaaatatctaccatttgattggaattaatgccggcttagtcaccgtaatacatacac

SEQ ID NO: 47817 - DNA, 587 bp, Glycine max
  Clone ID: PAT_MRT3847_143185C.1
ctgtcgttgccaagttattaggagcgtaagtcaatggtctgctggaacaagtcaaactgaagagagcatccacaatgcctattgctctcttattgagaaagctgaatacttcatctacattgagaatcaattttttatctcgggtctttctggagatgagatgatacggaatcgtgtgttagaagctttatatcgacggattatgcgagcttacaatgacaaaaaatctttcagggttatagttgtcatacctctcctgcctggcttccagggtggtcttgatgatagcggtgcagcatccgtgagagccataatgcattggcagtatcgaaccatttgacgagggcagaattctatcatgcataatctttatgaacttcgtggttctaaaatacatgactacatctctttttatggcctaaggtcttatggtagactctctaatggtggccctgtggcaaccagacaggggtatgttcacagtaaaatcatgattgttgatgatagtattactgtgattggatctgctaatattaatgataggagcttacttggctccagagattctgagattggtatagttttag

SEQ ID NO: 47818 - DNA, 569 bp, Glycine max
  Clone ID: PAT_MRT3847_143186C.1
tcaggtgcacttgcagacggatgggttcgatttcagcagcaacaagtgggtagatcagattaaaatgccaaaggaaatggctcattcacatttgggcatagcatctgatgggaggtatatatacattatctcaggacaatatggtatccaatgcagtgggcctactaccgcatccttttcgttagacactgcaacaaagaaatggaaacctttgccaccattgccagcccccaggtgcaccattaacatatgcatcagtactgcactcactcatttgctgtttgtcaatgtgtgttgcatgttattttttaaactgcagataaatgcggatgatgggacagcaattgtggtcataatgtggttattgcagctataattgtggcaccagattgcaatttaaaactataggccttgtatttaacaaatgaattcctgttaaaattgctctgtcactactatgatgatgaattgagtttgatttgactagctagaggctctttggttagttgctgagctatttaattggaaatgagagatttaaccagagatttcattccagatgctctgca

SEQ ID NO: 47819 - DNA, 484 bp, Glycine max
  Clone ID: PAT_MRT3847_143187C.1
aaaaggcaatggcccccctttccataaggaaacaattttttcccgggccctatttaaagaaagggcccatggaaaagggcccctttctcccccccatgggggaggaatcaactgggtacgggggggcccaaacttggggggggggggcccattcgggaaaacaacaatgggggagatcttccctggggaaaattccccccgcaaaaaaaattcaaattccgggggcaaaatctgggggttattaccccgccggggcccccccaaattcagaaaggtcttccaaaagtcccttttgccccattggaacccaagacggaacagcattttttttttcccccttaaaaaaagaggggggcccaaagtttatcttcaatcggggggcagaaacccgggggcccttataatggggggggcaaattttttttgaacgggcacccggccccacccggaatttccttgtgtttcgaaaagaccccgggggccc

SEQ ID NO: 47820 - DNA, 274 bp, Glycine max
  unsure (1)..(274): unsure at all n locations
  Clone ID: PAT_MRT3847_143188C.1
ttttaagttgaccgttggtttgcaaggatatgaaccttggttaaaaaaagttaaaagggttgatttatacctttgaaccagatgccaaagggccaaattttgcctaagttttccttgttttgaaccttatttttaaagtccccaaattgtgaagagaaaattaagaagtacctgaaatattgggattttaaccttcccctgtctgaccattctctttctgttccggaatctttccgtggtttcttttcttantaatttcggctgagttgggttg

SEQ ID NO: 47821 - DNA, 248 bp, Glycine max
  Clone ID: PAT_MRT3847_143189C.1
atgaagaatttgcaaactcaaagaaatgcaactagcacttctcggacatggctgaccttaattttctgatgtgcaaggccatagagaatccaggcttgacaccatcgtcgtcgttgagaacgtcgatcatgtcggtgttcgaggacaccgtaatcgacaacggtggcaagaatcaaagggaggttggtgtggaggactacatgggatgcgcctccgtgcatggggtgggatcctctatcgccattttt

SEQ ID NO: 47822 - DNA, 417 bp, Glycine max
  Clone ID: PAT_MRT3847_14318C.1
ctgggatgccaaatttctcagacatcaaggccaaccttttgccagtcaaattattaaatcacttgttcacatagatcagctgatgccatcatcttagtatggattcacaacagctcttcagtttcggtggtgttactagtgcaggattaccttacatgtcttcttttcccactgttccatcgctacccaacagtctacttagatccttgaaatatgacacaggaaactcacctaattcacccttttccacttattttgattctgatactctttcagcattgagtgacggccaggagcaatacagcccaggagaaatcctctctggtgtcagctcttcactggaaaccaaccattatatgtataatagatcaatctccactttggacagtttcccattatattctgatcggaactctc

SEQ ID NO: 47823 - DNA, 395 bp, Glycine max
  Clone ID: PAT_MRT3847_143190C.1
atttcctgaggcttggcattcagattctgcttcagttaagggagatggggtttataacataaggtcaaaggtttatgttaacccaaaattgtggtatttgagggttaatgtgattgaggctcaagatgtggagccaaatgacaaaagccagccaccccaagtttttgtgaagggtcaagttggacaacaagtgctcaagactaagttgtgtccaacaaaaacaccaaacccaatgtggaatgaggatttggtgtttgtggcagcagagccctttgaggagaagcttgtgctcactgtggagaacaaggcctcccctgggaaggatgaggttgcggctagaataagcttgccattgaacaagttcgagattctattggatcaccgagccgtgcact

SEQ ID NO: 47824 - DNA, 202 bp, Glycine max
  Clone ID: PAT_MRT3847_143191C.1
gttcctctaagtgttattttccactctctccctaccgacttttcaatcaccagagccctgcgtgaggtgatggatccattggggaaacgccctgccggcgccggcgattccctaattaccgattgcgagagcgggggctgcgatggagacacgccagcgtcactcgtctgacacgccaagctccctcggaccagatgctttc

SEQ ID NO: 47825 - DNA, 1677 bp, Glycine max
  unsure (1)..(1677): unsure at all n locations
  Clone ID: PAT_MRT3847_143192C.1
aagcgctgccagcagacgtctcagacggtgggatgggaacccagatcctaagaaagtcggtgtcttagctcatagaagcttggtgactctaacttgtaggggtgggagtttgctctggttatcgagtcgttgttctgtcccacctagaaggatttagcttcgatatgcaatgcttatcggtgggattgagcctcgaatcttcaaaagttggagttgcagggattggtgtttgctcaagttaatgagagatggcatgaattcccgtatattgctggacgctgcaaaaagttgcatattggcttcttctcctgttttcagaaggcaacaattcttgataaggtgtgtgggaggctccactgatcaaagagacatgcaagccctaaggtctcttgaggttgactctcagagtattattcgagcaattactcctgcccttgatcctaccagacataaaggccaggcaggaaatatagctgttattggaggttgccgtgaatacacaggtgctccatatttttctgcaatttcggccttaaaaattggtgcagatctgtcccatgttttttgtacaacagatgctgctcctgtcatcaaaagctacagtcctgagttgattgtgcaccctgttttggaagaatcttataatgttggggaggaacacaagagttccatagcaagcaaggttcttgctgaagttgataaatggttggaaagatttgactgtcttgttgttggcccaggccttggcagagacccatttcttctagactgtgtgagtgaaatcatgagacatgtggatatttgatcgtcttgcatgtctcatgatttcactcacacagtcctgacaatatttatagacggggatggactttttcttgttacaaataatcttgaacttgttagcggctatgccttagctgttctaacaccaaatgtcaatgaatataagcgtctagttcagaaagtactaagttctgaagtaaatgacatagatgctcctcaacaactgctatctcttgccaaacagattggtggtgttactatcctaagcaaaggaaattctgatctcataagcgatggtgacacagtcaaatcagtgagtgtctatggttctcccagacgttgtggtggccaaggtgatatcctttctggaagtgtagctgtcttcttgtcatgggcacgtcaacatattttggctgctgattcaaattcgaatctcagttgtaaaaatccaatagttttgggatgcatagctgggtctgctatattgaggaaggcggcatcacttgctttctcgaataagaaaagatccacagtcactggtgacatcattgaatgcttgggcagaagtttggaagacatttctcctgcatgttaattccatgtgagcctttggtctacagatacgtacagttggcaaccaaatttacatatcctacgagaatctttttttttttttggctgttttccttctttattgagttttctcctttcttgtgttcatttctccccgtttggtctgcatagtctactttgaatatgtaaagtgtgtttgttgtgccatgacagactctctattaaagatttaaagtattagtgtgcggaacagaatttttccggaaagannnnnnnttaaaagatnnnnnnnnnnnnnnnnnnnnnnnnnnnnnnnnnnnn

SEQ ID NO: 47826 - DNA, 679 bp, Glycine max
  Clone ID: PAT_MRT3847_143193C.1
gctgagcaagagtatattccctattttgccacacggagagttcaacggctggtttgaactcccagcactcatattataactgcttggagagcatgatagctcaagtgaatgaaagatagcgtgactccccccctattgctggacgctgcaaaaagttgcatattggcttcttctcctgttttcagaaggcaacaattcttgataaggtgtgtgggaggctccactgatcaaagagacatgcaagccctaaggtctcttgaggttgactctcagagtattattcgagcaattactcctgcccttgatcctaccagacataaaggccaggcaggaaatatagctgttattggaggttgccgtgaatacacaggtgctccatatttttctgcaatttcggccttaaaaattggtgcagatctgtcccatgttttttgtacaacagatgctgctcctgtcatcaaaagctacagtcctgagttgattgtgcaccctgttttggaagaatcttataatgttgggtataacttcaagtcttctagttaatcttcatctattggtatgaacatttcaaaccaagtcgatgttttttagtgagagactaatttcagggaggaacacaagagttccatagcaagcaaggttcttgctgaagttgataaatggttggaaagatttgact

SEQ ID NO: 47827 - DNA, 329 bp, Glycine max
  Clone ID: PAT_MRT3847_143194C.1
aaaagacttcgttttaatattatttatttttaaattaactttagtcacaagtcttgggttaagataaatgttgttgtaaaattagttccggatgctctaaacttaattttgaataaactatctgaagatattttagattcccttttaaaaaatacctaattcttctttgggaaagttggagaagcaacaacacctatctttctatactgaagtagtctcggacttcgtgttgctgcaagtttatcggaaaaacaatcacacgctaaacaagcacttagtaattagttggattagcaattctaactccctgctaacaatggcttaattct

SEQ ID NO: 47828 - DNA, 1311 bp, Glycine max
  Clone ID: PAT_MRT3847_143195C.1
tacggctgcgagaagacgacagaaggggatcgaagcgaagccagatgaaatgtaaaacggggggattgagcctcgaatcttcaaaagttggagttgcagggattggtgtttgctcaagttaatgagagatggcatgaattcccgtatattgctggacgctgcaaaaagttgcatattggcttcttctcctgttttcagaaggcaacaattcttgataaggtgtgtgggaggctccactgatcaaagagacatgcaagccctaaggtctcttgaggttgactctcagagtattattcgagcaattactcctgcccttgatcctaccagacataaaggccaggcaggaaatatagctgttattggaggttgccgtgaatacacaggggctcgagaactttccacattcaacgataaatatttttctgttctgtgctcaattatgcaggcccatatttaaataccgtttatgttcttatatccataattatatttttgtttcagatttaaaaatccaacagttttgggatgcatagccgggtccgctatattgaggaaggctgcatcacttgctttctcgaataagaaaagatccacagtcactggtgacattattgaatgtttgggcaaaaggtagcgtattctggaattaaattatttgcatgattgtgaccgagttatttttaagcttttgcattctttgttgcagtttggaagacatttctcctgcaagttaattccatttgagcctttggtctacagataggcaaccaaatctacatatcctacgagaatcttttttttttttggctgttttccttctttattgagttttctcctttcttgtgttcatttctccccgtttggtctgcatagtctactttgaatatgtaaagtgtgtttgttgtgccatgacagactccctattaaagatttaaagtattagtgtgcggacaaaagtttatcaggactgcgtgagtgaaatcatgagacatgcaagacgatcaaatatcccaatagttatagacggggatggactttttcttgttacaaataatcttgaacttgttagcggctatgccttagctgttctaacaccaaatgtcaatgaatataagcgtctagttcagaaagtactaagttctgaagtaaatgacatagatgctcctcaacaactgctatctcttgccaaacaaattggtggtgttactatcctaagcaaaagaaattctgatcttataagcgattgggacacaagcaggtctttcacaaatatataaagcttggttggtcccttttttttggttttttttt

SEQ ID NO: 47829 - DNA, 585 bp, Glycine max
  Clone ID: PAT_MRT3847_143196C.1
cccacgcgtccgggggacaagagcagtaagtgaaagtaacagacggacatgaagagcctcaatttgtggccgaaccctaatggaaggattttgcctcgcatttcaacatgtccaacactcaaccttgtctattctgttcctccttctccttcttcagttcgatgccatagctctccaactcaattgccgctcaggtgcgcagtgctcggtgctggattcgctggcctctcagttgtttggcatttgttgaagcaaagtcctaaggagttgcaaatgagaattgatatatatgatgaagtgggtattgggggtggtgcttctggagtatctgggggtcttcttcacccttattcccctaaagttaagcttctctgggagggtgctcagtgttggaaagagagcatgaagcttttgagagttgctgaagaagctagtgtctccaaagactgcagaactggagaatctgctgaagatatgaaagcttttgtagctcacaaaagagttgctttacattgctgatgatcagctgacttcaggggcatcttaagaccagcaacagatatgaagaacatgatcaaaattgat

SEQ ID NO: 47830 - DNA, 678 bp, Glycine max
  Clone ID: PAT_MRT3847_143197C.1
ccacgcgtccggcaggtaagcaattgaattgaattggttagtggaagaaattggcaatatctatcgactcgtttgcgtgtgccatcaagaaggaattaacttcgcaattcagtgcttatgagatgagcatttttaaattaatctctcaactcttgctgtggatagggattggtgtttgttcttgttcgtgttaatgagagatggcatgaattaccgtatattactggactctgcaaaaagttgtatattggcttcttctgttcccagaaggcaacaattcttgataaggtgtgtgggaggctccattgatcatagacatagagacatgcaagccctaaggtctcttgaggttgactctcagactgttattcgagcaattactcctgcccttgatcctaccagacacaaaggccaggcaggaaatatagctgttattggaggttgccgtgaatacacaggtgctccatattttgctgcaatttcagccttaaaaattggtgcagatctgtcccatgttttttgtacaaaagatgctgctccggtcatcaaaagctacagtcctgagttgattgtgcaccctgttttggaagaatcttataatgtcggggagggacacaagagttccatagcaagcaagggtcttgctgaagttgataagtggttggagagatttgactg

SEQ ID NO: 47831 - DNA, 3188 bp, Glycine max
  Clone ID: PAT_MRT3847_143198C.1
cggctcgagaaaagccgttgcgaccactgagagacgcaggatttttgaaatggagaatgtgacaagtgaggatgatttagcattagttcccacggccacccccaaattcttgtttttataagagaggcaaagtcacactacacttgtttcttgtaattaagcagccatggagtcatcaatttccctttccttcttctccttctttctcctccaactcacactactatctgcgaccaagaagacttacatagtacacatgaaacaccgccacgattccaccgtgcaccccacgcaccgtgactggtacactgccacactcgattcttctccagactctctcctctatgcctacaccgccgcttacaacggcttcgctgccactctcgaccctcaacaagcccacgcgcttcgagcttcccattccgtcttggccgtctacgaagacacgcgctacacgcttcacaccactcgcacccccgagttcctgggccttcaggcccattccgccttctggcaagacctccaccaggcctcacacgacgtcgtcatcggtgtcctcgacactggcgtctggcccgaatcgcaaagcttcgacgactctcaaatgccgcaaatccccacgcgctggcgcggtaactgcgagtccgcacctgacttcgacccttctctctgtaacaacaaactcatcggagctcgcagtttctccaagggctaccgcatggcctctagtaacgctagaaaaaccagagaccctgctaccccgcgtgaccttgacggccacggcacgcacaccgcctccaccgccgctggctccgccgtcgccaacgccacgctcctcggctacgccaccggcactgctcgcgggatggcgccacaggcgcgcgtggcggcctataaggtctgctggaccggcggctgcttcgcctccgacattctcgccggaatggatcaggcaatccaggacggcgtcgatgtcctctcgctctccctcggaggctcctcctccgtcccttactacttcgacaccatcgccatcggagccttcgcggcgctggagagaggcatcttcgtcgcgtgctcggcggggaacaccggacctcgcagcggttctgtcgcgaatgtcgctccgtggatcatgactgtcggcgccggcacgctggaccgtgattttccggcgtacgctactctcggaaacggaaaacgctttgccggagtttcgctttacagtggagaggggatgggagacgaaccggtcggtttggtttatttcagcgaccggtcgaactcgtcaggcagcatttgcatgccgggttcgctcgacccggacagcgtgcgcgggaaggtggtggtttgtgacaggggactcaactcgcgcgtggagaagggtgcagtggtgcgcgacgccggcggggttgggatgatactcgcaaacacggcggcgagtggcgagggactggtggcggacagtcacttggtggccgccgtggcggtgggggaatccgcgggggatgagatcagagagtacgcgtctttggatcctaatccaaccgctgttctcagcttcggtgggaccgtgttaaacgtgaggccctcgccagtggtggcagcattcagctctcgcgggcccaatggagtcacggcccaaatactaaaacccgatgttattgggcctggagtgaacatattagcgggatggtcgggggcggttggcccatcaggcacagaagacagtcgcaaaactaactttaacattatgtctggtacttccatgtcctgtccccacataagtggtttggctgcgttgttgaaagcagcacatccagattggagtccaagtgcgatcaaatcagcactgatgacaacggcttataccaatgacaacacagagtcaccaattcgtgatgcaaagggagaagaaaccatctccacaccatgggcctatggggccggtcatgtcaacccacaaaaggccctatctcctgggcttgtttatgaagcctccacccaagactacattgcgtttttgtgctccttgaactacacgctcgaccatctcagacttgttgtgaagcatcctgatgccaattgctcaaaaaaattcgctgacccggccgagctcaactatccatccttctcgcttgttttcggaagcaacaagcttcttcgatacacgcgcaccttgaccaacgtgggggagccgggatctgtctatgatctggtgctcagcgtgccatccacggtccacgtcaccgtcaaccctagaaggcttcagtttcgacaactaggggaaagccaaacctacacggtcacgtttctctctaataggactcttaatgattccgttacttctgattttggtactattatgtggaccaatcaactacaccaagttaggaccccgcttgcttttacatggacatatttttgactttgttattcgttggagtacactataatatttaaagcctaacggtaatagtctatagactagagtgcagaaaaaaaaaaaaaaaaaaagctgcatgactttagtcttcaggcaccttcctgttaccatcatagtcaagactgaaattgtaataacagattgtaaaagctaatgcaacatgacactcgcgtctcacgttccataatgctatgtatcaagagtgcttacgactattattaatttcatagtttcagaatcctcaaaaagcgttgaattgaataatgcttcaaatggtgtacatgtttctccagatcatgcatggtttactaaaactaaagtttcacagtgaaccaaacgtggactgacaaaggctgagcgagatgctggtaatgactattttttaccgatcccgggatcaggtggccgatttcacaaaaacggaaacagattacgggcaattttgcgctcctgaacaacccatgtgcaattgatggattttgttttatttttctcttcctgtgttggtacaggcgtgcagttaaaggttgtggcatgttctaccgcagtacatactacacacggtcatttcaaagttaacacttcctctgaattactaattactagttatttcgaagggtcttattccaaacgatctttggccatgaatggctactaatccgtgtaccaaatgaatagacatttccagtgtcctgtgtcccgtgtcagatatgcagaaaaaggtagttcacagcaatcactt

SEQ ID NO: 47832 - DNA, 485 bp, Glycine max
  Clone ID: PAT_MRT3847_143199C.1
gtggtgttaaagcataattgcttagaatcattaccttttaatattcaatggcaagcaagtcacttcttacgaaggagaaactaatcagctattccaacgctaataacatctaagttaaagaaatctcaaaaattgcttcctatacccaaaatttacaagggggtgctccactcggttaacagaaaatgaccctagaaaaacatgcaccatatatatttcaaacctattggaagaatcctctggtggatatgcacaaggagaagatgctgttcgtcttggggcactccactccatggaaacgagtgtaggtgattatagggacgctttctgttgaactttaacaagctaccataggttcggacagccttgcccacaaataaaacctctgtggccggggtaaagggtatgccacgaatcgccccaaaaagatgcatctgtagaccttgggcgcaacccgcaagggaggcaaaaatttgggcaaagac

SEQ ID NO: 47833 - DNA, 213 bp, Glycine max
  Clone ID: PAT_MRT3847_14319C.1
gtcatattggtttattgcaaggtcggtggcaacccaaccctacccttgtctcctttctcatatgctatatatcagcctcctccacctagcacttgctccaattcactaccaccaaacacaacacaacacagcataccgtgtttcattttctctcacacacaaacctccttcgttttcattgacttctcaggaggtataactactatttgtcgc

SEQ ID NO: 47834 - DNA, 942 bp, Glycine max
  unsure (1)..(942): unsure at all n locations
  Clone ID: PAT_MRT3847_1431C.1
gatccaaagcaagagctgcaaatcacccaaaagatgggcaactcaatattaacttcggcaatggaatccatgggcatcagattactgtagaagcatccncctgcattggttctgaacgtaaatcctctctagaagccaatccaattgagacaggttttacagattgccctgatagctgtacagctttttcagaagtagaaatcttttccagatggcctgagataggttgtaaatttatttcatttttttttttttttttccttttcccctcaataccagaagttttggacttcaagtcatttgcaggccgcttatgaacttttatcttctttggcacaccatcaacattaagtttgtgatgcttaacttcaccagatgtagccaggaatccctgctctatttgctgaaaatcttcatgtggtactgatggtgttaaatctccatcattttttacatcaatagaagttttgctctccatattggtagactgagatgtctcattaactatgttcggcaatgccatctccccaaatgggcctacccatgcttttactggcaacttccactggttcaacactcctagtcatttcttgggatgcatgaccaatgccatctgattgaacctggtctgcaacagctatttcgccttttacagttgaagctgcaatgccttggctcataaaccctgtgtcttcatgcttctccaaagcctcgggggctgctgacactgctaaaggcctcttctgaagcacataactcccagctgcatcagatgtctccctgcacggtaactgggaggtgttactgggctcatctccccgcataaaaagatacttgtccgtcttgaaattgcccttagcttttacagattttgccccctcctcctcaccacccaaagtttctgctatcaccggacgcggggtcgccccgggaattccggac

SEQ ID NO: 47835 - DNA, 903 bp, Glycine max
  unsure (1)..(903): unsure at all n locations
  Clone ID: PAT_MRT3847_143200C.1
cgtttgatgatgtttggagaaggaggggaagatgcaaaggcgttgttgtgaaaactgaaaagcccgggggagaaaaagtaagtgaggaaggtgaaacagcaccccaaaattgttgtgtttttataaagttgtttattgattccctgagattgcattgtaattgggcgattaagccatggattcatcaatttcccttttctttctcctcctccaactcacaatgctatctgcgaccaagaagacttatatagtgcacatgaaacaacgccacgattcctccgtgcaccccacgcagcgtgactggtacgctgccactctagattcttctccagactctctcctttatgcctacaccgcctcttacaacggcttcgctgccatactcgaccctcaagaagcccacgtgctgcgagcttccgattccgtcctgggcgtctacgaggacacgcgctacacgcttcacaccactcgcacccccgagttcctgggcctccaggcccattccgccttctggcaagacctccaccaggcctcacacgacgtcgtcataggtgtcctcgacactggcgtctggcccgaatcgcaaagcttcgacgattcccaaatgcctcaaatccccactcgctggcgcggtaactgcgagtccgcacctgacttcgacccttctctctgtaacaacaaactcatcggcgctcgaagcttctccaagggctaccgcatggcctctgctaacgctagaaaaaacagagaacctgcttcgccgcgtgacctcgacggccacggcacccacaccggctccaccgncgctggctccgccgtttccaacgccacgctcctcggctacgccaccggcacggcccgcgggatggcgcccgcagcgcgcgtggcggcctacaaagtctg

SEQ ID NO: 47836 - DNA, 219 bp, Glycine max
  unsure (1)..(219): unsure at all n locations
  Clone ID: PAT_MRT3847_143201C.1
gcgggctttgtttttttttttaacaaaacccataataatggggtattatatgatgccaagggtagcccttatttangtagtgtaatgcgctcaattgggagtcttttctagggcggaccatgcaatttttgggggggctacaaactcaaaagggggggggggtgaccaaacaggataaaaacatggagatttatcttgtgcagagacgggggcgtgggg

SEQ ID NO: 47837 - DNA, 2020 bp, Glycine max
  Clone ID: PAT_MRT3847_143202C.1
ccggactgcggctagtttggaagcaggcttttctcatgatatatttgttgagtgggccaacgatgtaaaaaatcttgtcctttttaccgaaagaggccagtttgccacactagctcgtatgcttcaagctgatccacctccaaaagctgtcaaagtcgttgtgtccaagcgtgtgcctttggttggggaagagctaatcgcctatgaagaagaacaaaatcgaattaaaaaagaggctttaaaagccagtcttatgaaagaggaagaattgaaaacatctcatggggctgataataatattagtgattcaatggtcattgattctggcaataatcatgtaccacctgaagtgtctggtcccagaggcggaggataccgggacatatttattgatggatttgttcccccttcgacgagtgttgctccaatgtttccctgttatgagaatacatcagagtgggatgattttggagaggtcataaatccagatgattatgtaattaaggatgaagacatggaccagacagcaatgcatggtggaagtgatataaatggaaaactagatgaaggtgctgcaagtttgatacttgatacaaagccatcaaaagtcgtatctgatgaaaggactgtgcaagtcaggtgctcattggtttacatggattttgaaggacgttcagatggaagatccattaaaaatattctctctcatgtggctcccttgaagctggttttggtgcatggatcagctgaagctacagagcatctgaaacagcactgcctgaagcatgtctgtccacatgtttatgctccccaaattgaagagacaattgatgttacctctgatttatgtgcttataaggttcaactgtccgagaagctcatgagtaatgtactcttcaaaaagctgggagattatgaaatagcttgggttgatgctgtagtagggaagacagaaaatgatccgctttcgctgctccctgtttctggagcagctcctccgcataaatctgttcttgttggtgatttgaaattggcagatatcaaacagtttctctccagcaagggtgttcaggtggaatttgctggtggggctttgcgttgtggtgaatatgtaactctacggaaagttggggatgcaagtcagaagggtggtggttctggtgctcaacaaatagttattgagggtcctctgtgtgaagattactataaaattcgtgactatctgtattcgcagttttatttgctttagatttggttggacagtgcaatggctaaacatgaacttctttccttctctgcactgttttgtgtgacacatcacactctggacctggttttcttataaggtagagaatgcaaaattgccttggtaaatacatgcttataaattcaagactaaatagttccgagtagcagtgctgggacagttgcaaaatgggttaatttggttgccatttgaacaagattcacagggtctcactttgatgttttcaatgaagaaatcatgtatcatcatttttgtccctctgatttacatcaaccaccatagcttctggtggatgtgatcttcaagtgtgtttaatctttgtagaattatagaaaaggaaatgtaatttattcctgtgtaggctccagattttgaaagggtattcatgtgtctgttgtcctctatcgccacatgcagtttccacactaaagtgaaatcagactgacataaaattaatctgtgtaaggattatccttattaatctggctaaatataattgaacagaacaatctagtttaatcaaaactgttctattatttttaatgcctctacttttctcctgaactttggtttatttgttcaacgccatgctgtgtgacaagaaaaatatacttgtacaatgtctagtagcactatctcaaaacatttttgctcctttggattagtttgtagaaattgatttctttgtcgaaagagtaggacgaaacggcgattgctgtacaggatccgcaggtgtgccagcgtgccctatac

SEQ ID NO: 47838 - DNA, 1106 bp, Glycine max
  Clone ID: PAT_MRT3847_143203C.1
ccacgcgtccgcagtcatctccttacaggaatcgtaaatcagaaattacctcgactctgccctgccacggctgagaaaatagcaacgctgaaacacgctcgtctccacgatcctgcgatccagcgcggcgtgtccagtgattccgctctacgacaagtctgcgcagggtgaagaatcgcgcgattcgtctgaaaatcgcgattcatgcacgattcatccccgatacagagattcaaccacggtccaggaacaaaagcgagacaacctccgattggtatcggtagcagctggaatcgtatccaatcgtgcgatacgtatcgtgactcttattattggttggcaatgcaagatccaaggaagaagagaaacttaacccaaaaggcatctttatttcagttgcaagcgaatggtgtcaaggaagatggacagacatctctgtctttaaaatcaagacagaagggttccaagagacacttgatgactgaagtctcaccaccttttcagaaacaagaaggttccaattcaaattcgttgcctgactcctctgcagctggaaatgagtaccgtgcattgaggagaaagtatatgctgctggaggatgagagctttgcattagggaaagaggtaagagaggttgaagatgaggtaaaaacccttgaagatgaaaagtttgcactgttggatcagcttattataatggaaggccttgttgatccaacggagaagcactcttagtgtttgcaactatgttgacactctgtatgtcatttcatctcctgatttcatacctatatgtgtaatataatgcctaaaatagaagtgtcagtgttggctccttttgtctagctctagaaattggatgataaaaatcatttgtagagattttaagttgaaattccatcgttgtttaggtcgcaggctaaatactttaataattatggtctttaatcatagtaaactgttcatatttcttgttccctatgttatagttttctatgaattgtgatatgcattgtactgttttatacggcagcaagattctgtcattggacaaataacttttggttcaattatacatccaagtttactgccgaaggcttgttttc

SEQ ID NO: 47839 - DNA, 953 bp, Glycine max
  unsure (1)..(953): unsure at all n locations
  Clone ID: PAT_MRT3847_143204C.1
ggctcgagaaaaataatccactgaagattaacacttgcttttcttctttcacctatcgcattctaccgccgtgagagcgtagtgcaggctgctaaggcgaaagcaccggtagctgaggcaccataacatcatgagcaagcgcgattaatccccgatacagagattcaaccacgattcaggaacaaaaacgaaacaacctccgattcgtattggtagcagctggaatcgtatcgaatcgtacgatactaactactatgttgcgctatgttagaactgtagagtaaacagcagcagcaggatctgcatacgatatgatgcttcttcggagaattatcgctgcatgtcctcaataaagagngatgttcagctcttctgttacccatggctcaagaaggttccaattcagattcgttgcctgactcctctgctgctggaaatgagtaccgcgcattgaggaggaagtatatgctgctggaggatgagagctttgcattagggaaagaggttagagaggtcgaagatgaggtaaaaacccttgaagatgaaaagattgcactgttggatcagcttgttctaatggatgcgcttgttaatccagcggagaagcactcatagtgtttgcaactatgctaacactctgtatgtcatttcatctcctgatcatgacacctatatgtactatataatgtctaaaatagaagtgtcagtgttggctccttttgtctagctctagaaattggatgataaaaatcatttgtagagatattaagttgaaattccatcgttgtttaggttttaggcagaatactttaataattatgtctttaatcatggtaaatgttcatatttcttgttcactatgttatagtttcctatgaattgtgatgtgcattgtattgttttatacggcagcaagattctgtcattgggcaatgaacttctggttcaactag

SEQ ID NO: 47840 - DNA, 326 bp, Glycine max
  Clone ID: PAT_MRT3847_143205C.1
ttttcttttgaacaaattacatgagacatctttcccttaggggataaaaaaaaatttattctacatatatgtcttaattttaaaaacagcaatactttgcttttcccaatttatccatgactgctttattacaaacttgcttatttgattgacgtttctactacaaacaaacattggcgggcatcaccttccctggattcacaatatcttttcaacctacgacctcttttatctttttcattgtcctcaatgatcccccttccaaccccattttaaaacactttatttttcccatttccaacaccatgttcaccttttcaagttcc

SEQ ID NO: 47841 - DNA, 463 bp, Glycine max
  Clone ID: PAT_MRT3847_143206C.1
ggaagatctctattgggatttaggtatctaaggggatggagcaaagggcacccaaaagcaagcaacccatgaatcctgattttaaataccaaaggagttaccttgcttgggatgataatttattctcccctagttataatgtccttatattttcaccaataaacccaaatttactcaactttgccacattacttggtattatctcttgtgtaagtttattgtttcaaatgtaagtatgctttgttcaatggtcaaaaatgtctgtaacaagattctcaaggcccaaatcatgatgagttgcttcctcatccaaagccattgaaaagcttacttctagaacatgctacaatattagcttgaaagtgggcatatttttacttctagaatgataaattttagaaatgacatcatatgaataaatatttttgcactttcaatatcattgatttgttttctttatcat

SEQ ID NO: 47842 - DNA, 695 bp, Glycine max
  unsure (1)..(695): unsure at all n locations
  Clone ID: PAT_MRT3847_143207C.1
gcttccagggcttttctgattttgtggaagaaatgttgtcccatatggctcaagtgaggcgagaggtaatgcttcttatagaattgaatgaaaaattatttatgcttctaatatggttaaggtaggaggaaaaaggttgacggttccccctttgctaaaaaaaaataactttctagcaaattaataattacatactaacatttgtttttgaaaagaaactttagttgtttgaatatgacttgaccctttaactaaggtttggggttccattccgatttggacataggattgctaaactagagatattattttacttcaaaataggttgattcagtgggatatgattagtttacttctaagtaagaagtttaagataccttttgttaaataaaaaaaaatttaaaatatgatgaaaaagttggatataaaatggatgcaagaatgagtaacaacactaatcgtttacaactatcaattgctgcagggaaagcattacggtttggaagagttgcagggcatgttaatggaaatggctaaaggattcgagtgtccttcaatgtattgtggggtgaactctgtgattgatgagtctccatgcgtaaagagaacgcgttttgacacanacatgatggagaataaggggtcacatttccaagtacctgatcttaacctctattgcagttaagatgtttttt

SEQ ID NO: 47843 - DNA, 176 bp, Glycine max
  Clone ID: PAT_MRT3847_143208C.1
ttattgttagagaattatttctgtgaccaaaacctttaatttaatgggggtggcatccggctcctcttccaataaagaagaaccagagagtcctataatcctatgattttctgtgcaagaaaaaaacgaatactttttagtgctcataaaacaacacctctgggctttttctttcc

SEQ ID NO: 47844 - DNA, 463 bp, Glycine max
  Clone ID: PAT_MRT3847_143209C.1
cccacgcgtccgaaaaaaaaaaaaaaaaaaaaaaaaaataaaaaaaaaaaataaaaaataaaaaaaagaaataaagaagcactttttgatccaaatttcatgtgcgctcggtttggagggaccttagggggcttttggttgtggtccttaaaggggttggacaaccattgtccatggcttcaccttattattccccccttttggggggtttttttggggacaattttttgaattccttggttgggccgactttggagacttccgacctttctccgttttctttttttcggctgagggccgtttgggtggccctttaacacgttcgcacagggttggtttttattcggtgggacggttttgacgcctctttggctcccacaaacgcctggggtcattcactttctccttcttaccttttttttcccttatattccgatttttttccgatttttttccttttttt

SEQ ID NO: 47845 - DNA, 481 bp, Glycine max
  Clone ID: PAT_MRT3847_14320C.1
gtagctcggaattcggctcgagctcattctacaaactctccctcattgtctggtcctcttcctgctccaaactgaaccgcaaaatttttgtttttttcactgagtaagtatctttgctacgcacttcgtttcatttttaatctcatttcgttccatttactaagcccacttgtgtttcgttgcttattaactctctgattagcattgtccctctgttgcgttcactgcgcaccgcgtgtttgattatttgcccaagtaaatgatagagaacatacggtatggtggaatatgtgcctgccttttggtttgttttgcgcatgcacctcgttgtcagggtttcgagatattggtctccaatagaagttttggatatgtttgcgaggtcaggatttgtcttgcgaggctgaagctgagtaatacagggtgcgatttgtttccattttccagtcaatcctatactccttaggctattgtaatcttc

SEQ ID NO: 47846 - DNA, 2886 bp, Glycine max
  Clone ID: PAT_MRT3847_143210C.1
gcgaatccaaaatccaattacgaagaatgggacatgacactataacacaacaagaacagcattttgccctaatcccactcgcgggactcggaattaacaactagagtgcccaaaagtcaacaatttcgattcttgccccgttcatcatcattacttcttcttcattcattcccccaaccttttctcgtctctctatcagaggggatctatgaccaactgatgatggatggtggctgggtattcacctgaatttgttcattcgtgataccctttgattgagtatccgagcaggtttggaagaatttagttgggggattataattttgctgtgagtggaatatgaatcttgattaggttctgtttgttttcttggaagttttgatttttttcacttcaattgtggctttagtacattacattttgtgaagcttgcttcttgatattgggtttgtgagtgttttcttgttagtggcctccttgattttcaatggctaacccaacacaacctaatgttgggttcacccctgagagagagagttcaaaccctgagaagagtccgcgtccgccccctccaagttttgtagcctcaccacctggttttcctccaccaaaattgcatttacagcaagatcaagcttcttcccgttccgttaaaaccccaaacgttttatcaccagccaatggggttaccactggcagtcctgttcctcacttgagcacccctcctggacccccagtttttacgtcgccggtccgtccagctgctgttccgtttcgtacgtcgcctgcatcacctcagccacttgcattttcttccgcctcttctttgccaacatcatcatcgccgctgcaattttcaaatggatcatttgagtcacagcaccaagtttctgatagtatagaggaccatgttcccttgggagagtcatcctttgttcttttttcagctcataaggtattgaaacagaagaaacaagctaatgtacccagtttgggttttggggcattggtctctcctgggagggaggtttcagtgggccctcagataatacagcgtgatcctcatcgctgccaaagctgtggtgcttatgctaatatatattgcaacatattgcttggatcaggctcgtggcagtgtgttatatgtcggaaactgaatggaagtgagggggagtacattgcgcatagcaaggaagatcttcacagatttccggaattatcttcacctatgtttgactatgttcaaactgggaacaagagacctggttttgttccagtttctgattctagaatgtctgccccaattgttcttgttatagatgaatgtttagatgaaccacacctacaccatctacagagttctttgcatgcttttgttgattctctcccgccaacaacgagattaggaattatactatatggtcgtactgtatcagtgtatgatctttctgaagaggctatggcatctgctgatgtgcttcctggggacaaatcaccaagtcaagaatctttgaaagcattgatttatggtactggtatatacttgtcaccaatgcatgcttcgctggctgttgcacattccatattttcatcattgagggcatataagttgaatgtaccagaagcttctcgtgatcggtgcctaggaactgctgttgaggttgctcttgctataattcagggcccatctgctgatctgtcccgggggttggtcaaaaggtcagggggaaatagtagaattattgtctgtgctggcggaccgaacacttatgggcctggatctgttcctcattcttttagtcaccctaattatccttacatggaaaagacaggaattaaatggatggagaatcttggtcatgaggctcatcgacacaatactataattgatattttatgtgctggaacatgccctgtaagagttcctatcttacatcctcttgcaaaaacatcaggtggagttttggttctccatgatgattttggggaagcctttggtgttaatttgcaaagggcatctgccagatcagcaggctctcatggtttgttagaattgcgcacgtcagatgatattctcattactcaagttgttggtcctggggaagagtcacatgtagatacccatgaaacatttaaaaatgacactgctctttatattcaaatgctaagtgttgaggaaacacaaagtttctctctctccatggaaactgaaggagatatcaaaagtgattttgtcttttttcaatttgcaattcagtattcaaatgtgtatcaagctgatgtgtcgagggtcattactgttagactgccaacggtagatagtatttctgcatatcttgagagtgttcaggatgaagtggccgctgtactcattgcaaaaagaaccctgttacgagccaaaaaccattctgatgcaattgatatgcgagcaacaatagacgaaagaatcaaggatattgctctaaaatttggctcccaattacctaaatctaaacttcatagcttccctaaggagctttctctcctaccggagctccttttccatctcaggagaggaccactattgggaagcattattggccatgaagatgagaggtctgtgctgagaaacttgtttctgaatgcatcctttgatctatcactcagaatggtagctcctcgttgtctaatgcacagggaggggggaacttttgaggagctaccggcgtatgatcttgctatgcagtctgatgctgctgttgtacttgaccatggcactgatgtcttcatttggttgggtgctgaacttgcagctgatgaaggaagaagtgctgctgctctagctgcatgtaagacattggctgaagagctgactgggtaccgatttccagcacctcgaatccttgc

SEQ ID NO: 47847 - DNA, 652 bp, Glycine max
  unsure (1)..(652): unsure at all n locations
  Clone ID: PAT_MRT3847_143211C.1
ccacgcgtccgcccacgcgtccgtacggctgcgagaagacgacagaaggggagatgaatcatatgccggcaagtacaagaaaatattagctgcatgcatgcaatcccagttcacaaagccggcgggcacagttaatttggtgcatggtgactttgttccaagcttcaattatatgtatatataagtcataggcacaatacaattacaaatacaatggcatattattcttattacaggcaccaaagcaagaagttgatatggttcttaatgtttgtgtttcttgttttttctctcatggaaacttcattgacagaaggaagggaagtttatcgcttgaaagatataggaagatcaagaagtcaagttgaaaatggaggacaaatgaaaaggctcgaaacccttgcagagttgcttccaagaggccctgtgccaccttcagcaccaagtcctgacattaactgatccatgctagtgtcccatttgtctatctgcattgttggctgttacaatttacataaattttgaacttgtctttatcagtttttttttttttttacaatgtctttattgttgtgttgtgtatacaataatttaatattttgtgccaaaaaaaaaaaaaaaaaaaaaaaaaaaaagcggccgctntagagga

SEQ ID NO: 47848 - DNA, 765 bp, Glycine max
  Clone ID: PAT_MRT3847_143212C.1
atagaaatatatttttctaatcgattgtgctcttgtgttctgtgttgtagcctaaattactaaacccttgatccctcgtcaggctgagtatccaagcttcgtccgcagatccctcatgtaaggctaagtttcagtcctacttcaatcaagttctaaagcagcaatatattttccaatgccaacgtcacctaactatgcatacaaatggttgattagaccaaaagcatacaaacattaagcattgaaggaagcattgaacatagaaaacataatcaatttgatattaggtatttacatcagttgttcattagaaatccccaactagggtgttcagctagccattacaaagaaaccctaacaataaatgagattaaaagcagagaatgatagttccttacacaagaagggggattcctcctcctcttctcagcatctcacactcactctctactcaataatctctctcaaatgacaaaacctaggcttcaatgcacaagattctcccttttttctgcttttagggctattttccccaaataggcctgtggctgctctggaattctgtgccctggccgttctgtacgagtgtgtagaagttttcataaaaggtgttgtaaaaggtgtaccctaattctgtacaagacaggctttgaataggctctgaaatcgcgacgctgcgcttagcgccaccttcgcgcttagcgcgggtaagtggaattgagcttagcgtcaatctcacgcttagcctggcctcgtgccgaattc

SEQ ID NO: 47849 - DNA, 440 bp, Glycine max
  Clone ID: PAT_MRT3847_143213C.1
tgactcatgcccgagcctctgagcgagtacccaggaatttgatactaaacagcggaggccttaccgcttgtttataccaccctatggagccgtttctactatcttacccttagacatagcagtcttatctagctagctagctcactaccaaataccgatgttaaaaaaccaaccacaacctgattggcctgagcccctcgtgctggttcagtgcttatcccaatactgtgagtattccatccctgaaaagtcattaagcctgctactgatataccatacatgaagagatgtgattatgctgatgccaatattgcaatcatgaaccttgacggactatttggtgctgaccaacatgtctcaacctcaattctcaagccgctctctaatgctcgcaaagaatggggcttctttcacgtcactaatcatggagtcgaccctga

SEQ ID NO: 47850 - DNA, 184 bp, Glycine max
  unsure (1)..(184): unsure at all n locations
  Clone ID: PAT_MRT3847_143214C.1
tgactcaacctaggatatacgcatgacaaacattgccgaccttgatgtgcagttgaagagttgaagatgacacagctctctgaatgtacgtgaaggttcttgtagtgggagaaaaagttgngtgtggaatgagcaanagttgaaaaagttccattgttgaaacatttgcagcacgggntatcnc

SEQ ID NO: 47851 - DNA, 447 bp, Glycine max
  Clone ID: PAT_MRT3847_143215C.1
cccctgaaaaaaggtattttgcccgggtccctgtttttgcctccccctggggggaaaaaaaccttggaaacccatggtcaaatcccaattggtttttgttccggggggggtaaaacattttaacaaaacccttccttgaaaaccttcgagacgggggcccttttttttcccccgggacataagcggaactttttaacctttttttttggaaatttggcaaaactaaaaacgttttttttgtttggggaaaaaccacctattccccccctttctttttttttttaacaaaacagggaattcccttttccgaagggctcctcccattttttttgtgggggagatttttttaacctttccgggggttctttttgctggaaatttttgttttggttggaaaactgcccttcccatttttagggaattgcccaaactgggaaaaaatttttt

SEQ ID NO: 47852 - DNA, 359 bp, Glycine max
  Clone ID: PAT_MRT3847_143216C.1
ttatgacacttacaacactgttagaaaaaagctgttctacgtcggtctttgtcggtgttcaacgacggtgcacgaccatctttaaatgcgacgtcgttgtagatctccgaccaatctacgacggtcactaagcacagttttagaaggacgtgattccggcgacgggactgacgtcacagttgtagttgaagcttcgccttcgaagacgttgtcgacgtcagcaacgatgttgaaacatacgcttttaaggtagggctttgacgacactaatgtagtaaatatataacgttcaaagacgttgtcgacgtcagcaacgacgttgaaacgtaccctttattatgtcgttgcatccgcaacca

SEQ ID NO: 47853 - DNA, 1444 bp, Glycine max
  Clone ID: PAT_MRT3847_143217C.1
aattcggctcgagttcctctactaagaacaaagagaacagaaaaaatggctcccctttcatgcatcattgttctttttgctctttctcttctgacaccctgttttgtttcctcctccgcagtgagagaccctgagttagtagtacaagaagtacaaagaagcatcaatgcctctagaagaaacttgggttatttatcatgcggaacaggcaaccctattgacgattgctggcgttgtgaatccaactgggagaacaaccggcaaagactagctgattgtgcaattgggtttggcaaggacgcaataggaggaaaaaatggtcgaatctatgtggtcaccgactccggcgacgacgatgccgtgaaccctaggccaggaaccctaaggtacgcagccatacaagacgagccattgtggatcattttcaagagggacatggtgatcaccctaaaagaagagcttttggtgaattccttcaagacaattgatggaaggggtgctagtgttcacattgctaatgggggatgcattactatacactatgttagtaacattattatccatggtattcacattcatgattgcaagcccacggggaataccaatattagagactctccacatcactctgggttttggactcaatcagacggtgatggtgtgtccatctttaattcgaagcatatttgggttgatcattgctctttgtctaattgtcgtgatggtctcattgatgccattcatggatccacggccatcaccatctccaacaattacatgacccatcatgacaaggttatgcttttggggcacagtgattcgtacactcaagacaaggacatgcaggtcactatagcattcaatcattttggagaaggccttgtccaaagaatgccaaggtgtagacacgggtatttccatgtggtgaacaacgactacacccactgggaaatgtatgcaattggtgggagtgcaaaccctaccatcaacagccaagggaacaggttccttgccccaaacatcaggttcagcaaagaggtaaccaagcatgaggatgctccacagagtgagtggatggggtggaattggaggtcagagggtgacatgttcttgaatggagcatacttcaggcaatctggtgctggtgcctcttccagctatgctagggcttcaagtctcagtgcaagaccttcttctcttgttggctccatgaccaccactgctggtgcacttacctgtagaaagggcaaccgttgctgatgattgatgaattaatgatgatcactttaattattattagctaagaaatgaaatatatatacagctgcagggttgcaaaaagaaaaattaatatgtatgatttatatgaattaattcaccttatgcttaatttgcttcccttgcagtttactatatataatatatcattagccttttgctcttc

SEQ ID NO: 47854 - DNA, 588 bp, Glycine max
  Clone ID: PAT_MRT3847_143218C.1
tattttttttggggcagatagaaggcattttttcttaagggaaaatgcctatttatccccttagaagccagattcgctaatttttaataattgcaaaagttgcttaaagaaacctaagctacttgaaattttattgggatcacagcacctaactaatttaaaaaaactaacagaatctggcttactaggactatggaacaggcaaactctaccaggtttaacaaacccttaacagggttcccttatttcaatataaatccgtttttataatacaaaaccggctcttaaacctccttgtaaactgaaagaggtgcacatacactttgcttatgaatgcgtttttggggccggaaaaaggtccggagactctccctgcactttgaagattccaaaagtctaataagtgtaaagcctgcgttaaaaaggaagaggatcatcctcaacaaacccaaatgtgtcacccccaaaataaggattgaggtccaaaaaactgccccaactgcttagaagctctctaggaagggcttttttggcacccctttcttatttcgctgggaaaaccaaactgtcttagaagcgtgatacacc

SEQ ID NO: 47855 - DNA, 310 bp, Glycine max
  Clone ID: PAT_MRT3847_143219C.1
agcgaaactgctgaaacatgattgacattgactaattaataatacttttagactgacataataagggccgggatgaaaggttgaatgaatttcatcagtcctgcgtatgaaaatctataattcatttattttattttattaggggaagggttaattttaattagaatccaacattaggattgcctgaaccagcagcagcaactcccatcccaccaacaacatctgatgtagctgccaatgcctcaaggtcccccgaatccttaacatccttaacaaccaattcaattatcagttcaacaattttcccaaa

SEQ ID NO: 47856 - DNA, 220 bp, Glycine max
  Clone ID: PAT_MRT3847_14321C.1
caaaaataactgcgttttttgcacatttttttcgacaaataaccaaatcttctttaaatttcaaattatcctcccttacttaaacaagacgtaattcctttttttctttttggacccaacaaatcatccatttattcacacccccatttctttttgttcataagattctataattataaaaaaacttttactcatccacttgtctagaaaaacatatttt

SEQ ID NO: 47857 - DNA, 140 bp, Glycine max
  Clone ID: PAT_MRT3847_143220C.1
accaccatgcacgcctacacaatctcatcctccctctcaataccaacatctttatactcatgaaattactaacccaaaaccagcatatattcaaacatttattattcctccaccttataatatctctatctcttaaacca

SEQ ID NO: 47858 - DNA, 279 bp, Glycine max
  Clone ID: PAT_MRT3847_143221C.1
gtgaatccattccttggagtgagacagctagaaagttagacagcctctctaaaaatttggagattgaacaactcgatgtcaagacaacgttccttcctggtgatctagaggaagaaatctacatggagcaacccgagggcttcaaagttccgggcaaggaaaacttagtatgtcgcctcacgaagagtttatatggccttaagccagcactgaggcaatggtataagaagtttgacgctttcatagcagaacatgatttcaaaaggatggacagcgatc

SEQ ID NO: 47859 - DNA, 135 bp, Glycine max
  Clone ID: PAT_MRT3847_143222C.1
atttttgttctgaggggatctaaaaagacctcgtcatcatttttcctcgggggcgagagaaaatactcagataaattgaccgtcgaaaaaaacctatccatctacacaatgggttccgagtcgcaccccccttgt

SEQ ID NO: 47860 - DNA, 311 bp, Glycine max
  Clone ID: PAT_MRT3847_143223C.1
aggggtgtgttgtgtgtgagaaagaaactctctctctcaattgtttccgtttggtcctgcccactgtcctgtttgtttccgtttctgttttcctttgaaaacagaagaatcaaatcaaatcaatccttcaacgttcgttcaatccttcaaatcaaatgaaatcccttccttccggttttcctttttttttccccccaaaaattaaaaatccgaaatttgccttaaaccttgaaacccaacctgaaaatttgcccccaaaaaccttaatccctttatcaaaaagggtccttgttggtttttttccaattggg

SEQ ID NO: 47861 - DNA, 163 bp, Glycine max
  Clone ID: PAT_MRT3847_143224C.1
cctcagcctgtggagatgaaaattgaatttatcaatttgaacagaacgtgctgaatgagatcagtgtagacccccttgatgacgggatcacattggtctagacccattgtaagcaggagcatggactgcattgatcaatcgagacaaatagcagtggtttttt

SEQ ID NO: 47862 - DNA, 1513 bp, Glycine max
  Clone ID: PAT_MRT3847_143225C.1
tacggctgcgagaagacgacagaagggaagcataaaaagaaaagaaataacacaactatcctaaaaaaatcagattgcaactaactgaaagggagataagaaatcctgggtttcctcccaataagcgtatttttaacgtcattagcttgacgagtcaaatgccttcaaggtggcatgaaggtcacaaagaacacatattccttgtatttttgcctcctagctagagactccatgaaagtcatgtattctggaagcaccttccatatcattgcaagagaagtgctagtgatcaaggaaagaataacacttaaaggtttctcatgttctccatgtctttcttccttgacaatcagttgatgaggagtggtattgacttggagaatactttcttgttgaatttctacttgtgagtacttctcccattgttgtgctttctcctcatttctttctatctcttccttcttttcttctttcacatcttcctcagttaaaattaccttgcactcctttttgggcttcatctcagtatttaccgtaaaggtttcggtgggcctttcagcaactagcttagctaattgtacttccagatttctgattgctgcatcagtgctcttctgatgtgaccttgtttcctgcatgaattgtaccagcaattcttctagcctactgctttcttcctgtggcctgggctcttggtcgcatagaatgacataatcattggccgccatattctctattatctcaatagcttcttctggagtctttaacttgatcttcccaccggctgaggtgtcaaggagctgcttggaatggggttgcaagccatcaataaagatgttgagctgcactggctcgctaaacccatgtgtaggagtcttccaaagtaacccatgaaagcgatcaagggcttcactcaatgattcatgagggtgttggtggaaggatgagatttccacctttccctcaatggtcttggactcggggaaatatttcttcaagaacttctccaccacctcgtcccatgtccgtaggctattccctttaaacgagcgaagccatgtttttgcttcaccggccaaggaaaagcaaaataagtcaaggcggatggcatcttcagacactcttactatcttcaccgtgttgcaaatgtcgatgtatgtggccaggtgtgcgtatggatcttcagttggtaggccgtaaaatagattcccttgaatcagctggatcaaggaatatggatatgagaagttggccgtctgcacctctggtctagctatgctggtgaagtactgaggtataatagggctagagtagtcctctagcgtcattctctgtggatgattttttgccataatgcgttcttcgaagaaggagtgtgcactgttaacaaaagaaataactaccgtgcacgttatcacagaataaataaatttttttttttaaatttttttattatttttttataaaaaaaaaaaaaaaagggcgaagtaagaatgagggaagagttaaaagg

SEQ ID NO: 47863 - DNA, 1415 bp, Glycine max
  unsure (1)..(1415): unsure at all n locations
  Clone ID: PAT_MRT3847_143226C.1
tgcatgcctgcagaatatgtgtttgatggcatcatcaaaaagtaaatcttgacgtgtttttagtgtccatcatattccatatgtctgtcaatgtcaaattccatgtgccagttactagcgtaaagaaattaatgtaaaatcagcaacaattttgggagtttcttaactttatggagctctttgtaactgccaatggctgatgagaaaggctacattaacttttgtttttgttgtccaatattcttggaattgatggttgccaacttgtcaaactgtggtttctttgcaaccctcaactcccttttgtctctgctcatgctctgaagcacgtaatttgtatatataacttgttatttcttgtaaaacatttcatccttcccctgattgctgttcaaacttggaaacactaaaacctctgaactttgatcttttcagaaggtttaggaagtgtagaagacttgttctctaacaatggcattggcaaggattgctagggccaacctgagaagatcaggaggtgcttttggcagttatgctcatgagaaggatacgttcaatgtaggaggatacacaagcagatgcaacataccttcccatgcaaattttgaatcagatggaaagttttcatatgctccaagaattaaggaacagaactacatgaacttttcaatgaggggaatatcaggaacgccacaccatcagtttccttctgctagcacacagacggttatagaggaatctgagtatgagtttgagaatgatcggcaaagatatgctggactagaggcaacaaagccaggtgaaaagcctagggtggttgttcttggtacgggttgggctgcgtgtcggttcctcaaagggatagacaccaaaatttatgatgttgtgtgcatatcaccaaggaatcacatggtctttactcctttgcttgcttcaacgtgtgttggaaccctggaattcagaactgttactgagcctgtatccagaatacaggatgcattagcaagggaccctaactcctacttctttctagcttcttgcactggcattgacacaggcaaacatgaaatctattgtgaggcagttaacaatggtggattgcctcaagagccttaccaattcaaagtcgcttatgacaagcttgtaattgcaacaggatctgagcctttaacttttggcatcaagggagtaaaggaaaatgctttttttcttcgtgaagtgaaccatgctcaagaaataaggaagagacttctccttaatctgatgctttctgaaaacccaggcatatcagaagaagaaaaganatgccttctgcactgtgtagttattgggagtggccctacaggagtggaatttagtggtgaatngagtgatttcatcatgagagatgntcatgagcgctatactcatgtcaa

SEQ ID NO: 47864 - DNA, 1513 bp, Glycine max
  Clone ID: PAT_MRT3847_143227C.1
agttaaaatcactgcctctcgttcccactcaaacttagctagcgcaacacaagcaacaaaacacaaacaagcgaacaatagttcacaactaaaggaagaggttgttgaagagatagagatacatagtgtttgtgttagtgttatttatggtgtccctcaacctcaacccaaacccacctcaaacttttcacttcttcgaccccttcaacatggaggatcagaataagaaggtccgaaaaccttacaccattaccaagtccagagagaactggaccgaccaggagcatgacaagtttctcgaagctcttcacttattcgaccgtgactggaagaagattgaagcatttgtaggttcaaaaacagttatccagataaggagtcatgcacagaagtatttcatgaaagttcagaagaatggcacaagtgaacatgtacctccccctcgtccaaagagaaaagctgctcatccctacccacaaaaggcatctaaaaatgctcttactatatcccaagttgcgcggccattgcaatcttcatctgctttatctgaatcatcacacatctataggccagattcatcatctgtggttagaactccagttaggcagtgtggccattgccatcttggggttataatgttacaccactagtcagtcttccccgagtgactaaagatgatatggtgttgatgagtcaacaaatcaatcctttcagcagtagtaatgagaacactcctaggggttggccaattagcaaacagacagatcagggtgaccaaggcaagccaactatagtaatgccagattttgcacaagtctatagcttcattggcactgtatttgatccaaatgcaattaatcatctacagaggctgaaacagatggacccaataaatgtaaaaactatattgctattgatgagaaacctctccaccaatttaaggagtcctgaatttgagaatgaaagaagggatgctgtcattgtactatgctaacatggagaaggaaaaatccagtagtcatcgaagccaacccctcacttgacagatcagagagtgttgtcttatctgcttaaggtgttaccaatggtttatcaggaacatagtttttaaatatcttccaaaaacacaataagctttcctctcagctaccactaactccaaatggtgaaatatggggcacaagaggggaaaggattacaggttttactaacagcttgtaggttgcagatacttgcatgtgtgcatgcgtgcacgtgtatgtagtttactgtcctttaggcttatgtgtgtatcttatgaagatggttgtcataggaatgcaggataatgagtccagagtcctgttaaggtaacctggaggctgtactgtacagaatattgagagcgtctgtgtgtaatgttgtgatggttttttctacaatttagtatacaagagcggtgctatgatttaggaggtgctacctgtgttgtatataaaccaaaagcaataaagagcatatataaattgtgatt

SEQ ID NO: 47865 - DNA, 464 bp, Glycine max
  Clone ID: PAT_MRT3847_143228C.1
cggaattcccggctcgaccgacgcatacatacctgtgagaaaacaccacagagggcgcttgattcttttgcgaccactcatctaaaatacgggcaatacttcccttgggaggtcttcttgatttcttctcttgaatcttgaattcatcttttcttgaatcttgaaatcaaacttctcttgattcttgaatcttcttgatttcttctcatgaagcttgaaattaaacttgatcttgaacttgttgactcaatcttaaaattattctttggagctttttgtcatcatctttgtcatcattaaaactacttgaatcaacttgattcatcatcatgaagcttgcttctacattttcaactaggaaacataccatatcaatttcatgcacaagctcctcaaaaatgataatggacacaagaaatgataaaggaagtaacctccattaattgtatgattcatgcaatctg

SEQ ID NO: 47866 - DNA, 306 bp, Glycine max
  Clone ID: PAT_MRT3847_143229C.1
gacactcctagtcatcaaacgtcttcgataacaccacaaacttgaagatcaccatcttcgttgctctcgttctcgctcgtgccttcggaacctcatacctagcttcatgtatcgctgatttcgtgctccatagtgattggtaaccctcttgaatatggtggcaatgatatatcttgtcatgacatagcatcatttggttgaatatgacctgccacaacgggaggtgacagatgatctctcactgtggtgcaaactagcagtgagctcgacaaacggattggaacactcatctcatcaccatatcga

SEQ ID NO: 47867 - DNA, 262 bp, Glycine max
  unsure (1)..(262): unsure at all n locations
  Clone ID: PAT_MRT3847_14322C.1
taaccacacggcaaggacnnccgaagctgctgccgcacacaaaaagaagaccgganncaaaggcacagcccnaancgaaccgaagccacaagaacccacaaaacacccgcacgaccgggacgccgcaaccccagctaatttcctgcgaaaacacgcacttacaggggaattcaccctcaacatagagcgcaaccatgccaccctttttttttacagcagccaacatgagctcgaaactgcaagtattaatgccatcgctggg

SEQ ID NO: 47868 - DNA, 386 bp, Glycine max
  Clone ID: PAT_MRT3847_143230C.1
gagcaaaaaggatctgtatgttttataaccagattggtgaaccctcacagattcatggaatacaagtgctggaataagaaccaaagtttacccaaaatcaacatactgaagagaattacacacaacattctccacaaaatttgactatatagtctatgtacaacatcatcggggagctctcgatgacacttgagaattaacaatgttagtgactactctcctgacaaaaagaagtggctcaaaccatgagcattcttccatgtaacagtggcagaagaatgggaatttgattcagtaagagtttaacctgggtggtttgagcctacttaagagttactcaagtgtttaaccaaaagttgccttcggtgtctgaacccacgcgtccg

SEQ ID NO: 47869 - DNA, 273 bp, Glycine max
  Clone ID: PAT_MRT3847_143231C.1
gttttctttgtttacccaatgaatccctgaaccggaagaaaaatacattcttagcgcctgagcacctggtttgcatttgactacaaaaatcagaactaacaaaacaaactccctcatttcagaaatgcaagttaaaagtggaacaaattcacatccacattcaaatttaccaatcgcagccagatctcggagcaccccttctctcacgggtttcggagaggggaaaggggaagaaatcagaaaagatcgcaacatctcttcgattcgccatcg

SEQ ID NO: 47870 - DNA, 540 bp, Glycine max
  Clone ID: PAT_MRT3847_143232C.1
cgtcccaaatgtctcgctttgatattcaaaagttcttacatttgcctcacggtttgcttcgatctcagaccggcccaatgcatcccagatctgatgatttgatggagaaggctcgatctcggactggccctcgccaacatatcttttctcaagactcatgtacccagagtctctcgcataaaactcgacaaccctcatcgtaaatcttgcattattcccacagatcctcatttcaaaattagcagcacaagctctcaccatagccgcaccagccaactaagcagaagcctcggcctcagattgccttccagcaatactgccacctttccacgcatgtttcgggtccttcttcgcagagcttggaaagactctccttcccaacaggaccccatccgccaccaccaggagtgttgatgatgatgcgatcgcccgcttgcatgctggccgtgtttttgccgcccaggttgatgtacctgacttccttatcatcagcagaagaagaggatactttcttcccctcgacgtcagcatcactacctt

SEQ ID NO: 47871 - DNA, 384 bp, Glycine max
  Clone ID: PAT_MRT3847_143233C.1
ttctactacgcgtccgaatcccttttgaagtaactggagacaagaaaaaatgccggcgccaacatcatcggcaaacccgaagcctatgtgatgattgtactgaaaggaacagtacccatagcttctggtgggaatgagcagccagcagcttatggagaattggtttacatcggtggttttaaccctagtgtaaacatggaacttagtgctgcaatatgtttcaattctggaaaccaaattgatagtgccgaagtcgaggttcttcttgaaattctatgacaccaagggttccgacttcggatggtatggacctacattcatgaatccgaattccatgtctacattggtagtggtaccttgaatgttggatggtgtgttcattat

SEQ ID NO: 47872 - DNA, 426 bp, Glycine max
  Clone ID: PAT_MRT3847_143234C.1
gttcactaattataaaagtcatcctagctaattagggaatcaaaccatgataagataaagtaatatggtaattaattctaggagataatctaaagatattctaagatatggtaagatattttcatatattctaacaatcctaaataccccttccccccgttcctaacaggttcaatgtttttctttcttgctcaaggattatcatttcagtagtagtatatttgggttgcctggtattaagtttccttcgctgtgcatttttgtcttggaagtggatccgtcatttaatctggttgatgatgggaccgggtctaatgcaggaatgaggatgggtctaatgaatttggtggtgcttagcatctcatttggtgaaatggaattatggaactgaagggaatgaaaatgttagaaggggcaatccaatcc

SEQ ID NO: 47873 - DNA, 471 bp, Glycine max
  Clone ID: PAT_MRT3847_143235C.1
cctcacaagaagcctacaaaactatggttttattgcaacagaagacaatgaagaggtatctgaggtgcaaagacaattgcgatggtcttattctcacatagttgaagagttcattgttggcttagataaggacatagacaaagtggtggaatggctattaaatgaaaatcatcattgtcaatttgtttatatttgtggaatgggtggtcttggtaaaactacacttgccaaaagcatttaccattacaatgctattaggcgaaactttgatggttttgcttgggcatatatatctcagaaatgcaagaaaagagatgtttgggagggaattttactgaagcttatttctcctaccaaagaggaaagggatgagattaagaatatgacagatgatgaactggcaaggaagttgtttaaagttcagcaagataaaaagtgtttgataatcctggatgacatatggagcaatga

SEQ ID NO: 47874 - DNA, 1222 bp, Glycine max
  Clone ID: PAT_MRT3847_143236C.1
tacggctgcgagaagacggaaatggagggaggataatcaataaacttaaacttatgttatggcattctaactctgaacgatgaaatgaaatggagttccaagataagcgtttatctctgagatcgagcttgacgttcagcgagacgctgtgcgcagtgttcattccgttcataggaatagtcgaagctttggttttcacattcactagttgcttcgatttccaatctcccaggaataagaagaaacattcttctaccttcgacgacattctcaccctcgccgaggattctccatttagtattaatgaaatcgaggccttgcgtgagttgttcaagaagttgagtagttctatcattgatgatggcctcatccacaaggaagaactcacattggcactgttgaagaccaccaccggggagaatcttttccttgacagggtgtttgatgtctttgatgaaaaaagaaacggcgttatagaatttgaggagtttgtgcatgctctcagtatctttcatccttgaactcctctggaaaaaaaaattgattttgcttttagattgtatgacttgagacagaccggatatattgagagagaagaagttaggcaaatggttgttgccattctgtcagaatgtggcatggatctggatgatgaaatccttgataccattattgataagacatttcaagatgctgatgctgacaaagatgataaaataagcaaagaagaatggaaggcatttgtcattcgacacccgacactcttgaagcacatgactctacctcatctaaaggacatcactacactgtttaccagtttcatcttcaacaccgaagttgatgattctcactggcatattaatggcaatcattaacattgaggagttgaagcttgttgttctgttgcactctcccaatgttgactgcatcacaccaacgagagaattcatggaagtgaatcaaaccaccaaagagtgttaaaaatttgatccgaaccagtaaaaagggcttaaattgaatccaattactgtttggtttgatcagcttactgtgcatagtacagctcattttggccggtgtacaaaatttattggtatgatcataaaaggtttaactatttagcctccatgtctacacaattttaggccccgatcggggatggttgtaacttatcagttttcaattttgaaatgttatttttaaatccaagacctgtttggat

SEQ ID NO: 47875 - DNA, 649 bp, Glycine max
  Clone ID: PAT_MRT3847_143237C.1
tttccttgacagggtgtttgatgtcttcgataaaaaaagaaacgggcattatagaattcgaggagtttgtgcatgctctcagtatctttcatccttgcactcctctggaaaaaaacattgattttgcttttagattgtatgacttgagacagcccggatatattgagcgagaagaagttaggcacatggttgttgccattctgtcagaatatggcatggatctggatgaggaagtccttgataccattattgataagggacatcaccaccctgtttagcagtttcattttcaacacagaagttgatgattctcactggcattttaatggcaatcataaacattgaggagttgaagcttgttatgttgcaccagctgttgctgttctgaaaagtagattctagcaattcccctctcccaatgttgactccttcactccaacgagagaattcatggaagtgaatgaaaccccctaagagtgttaaaaatcttttccaaaccagtaaagtgcttcaattgaaaataattactgtttggtttgatcagctaactgtacagctcattttggccggtgtacaaaatttatttgtacgaaagggcattttggaataattaaaaaaaaggttgtgttcataattaagttttagtttc

SEQ ID NO: 47876 - DNA, 589 bp, Glycine max
  Clone ID: PAT_MRT3847_143238C.1
cccgccataattccacccccaacaagttaggccaaatggttgttgccattttgtcagaatatggcatggatctggatgaggaagtccttgataccattattgataagacatttcaagatgctgatactaacaaagatgataaaataagcaaagaagaatggaaggtatttgtcattcgacacccgacactcttgaagcacatgactcttcctcatctgaaggacatcaccacactgtttagcagtttcattttcaacacagaagttgatgattctcactggcattttaatggcaatcataaacattgaggagttgaagcttgttatgttgcaccagctgttgctgttctgagaagtagattctagcaattccactctcccaatgttgactccttcactccaacgagagaattcatggaagtgaatgaaaccacctaagagtgttaaaaatcttttccaaaccagtaaagtgcttcaattgaatataattactgtttggtttgatcagctaactgtacagctcattttggccggtgtacaaaatttatttgtacgagagggcattttggaataattaaaatatagtgtgt

SEQ ID NO: 47877 - DNA, 799 bp, Glycine max
  Clone ID: PAT_MRT3847_143239C.1
tacggctgcgagaagacgacagaaggggatggcattgtaactctgaacgatgaaatgaaatggagttcccagacacgcgtttgtctctgagatcgagcttgacgttcggagagacgctgtgctcggtgttcattccgctcataggaatagtcgaagctttggttttcacattcgccagttgcttcgatttccaatctcccaagaagaataagaaacattcttctaccttcgatgacattctcaccctcgccgaggattctccattttttttttgctttttctttttctctttcatttcatttttcgctgttttgttcatattgctaaggaaatgctgatgccagttttaagttgctgatttgtgtgtggcagttagtgttaatgaaatcgaggcgttgcatgagttgttcaagaagttgagtagttctatcattgatgatggcctcatccacaaggaagagctcgcattggcactgttgaagaccaccactggcgagaatcttttccttgacagggtgtttgatgtcttcgatgaaaaaagaaacggcattatagaattcgaggagtttgtgcatgctctcagtatctttcatccttgcactcctctggaaaaaaaaattgattttgcttttagattgtatgacttgagacagaccggatatattgagcgagaagaagtgagtatcttggcacgtccaggttatgaatatgtaattggcttaagtatatttgatattatagaattatattgcactagagttcccttactgcaattatcaatttgatttgacatatttac

SEQ ID NO: 47878 - DNA, 256 bp, Glycine max
  Clone ID: PAT_MRT3847_14323C.1
cggctcgagcggctcgagtacggctgcgagaagacgacagaaggggtggataaattcatgactgcatccagcggttacatacaccctatgaaccttagtacaattattgctttagattctacaacctatgcaccattactgtatgagttgtcttcttatcttgtctatgcacacaaaatacatacaagatattgtatttttcttgaatgtttaaaactatgacgttaattacttaagtattttttttttttccaaa

SEQ ID NO: 47879 - DNA, 478 bp, Glycine max
  Clone ID: PAT_MRT3847_143240C.1
attgattcagctttacataatcatagacaatcttgcagcacaaatctttcatccaaatccaaggagcagtctcttcctaattcagatattgtgcatgttctggagggagcagaggagatagttgaagttgagttgaggaaagaggggaaagttgaacttggagtgtataagagttatgctgtcttcactggttggtttatgacagtcattatatgcctatcagccattctgatgcaagcttctcgtaatgggaatgatttatggctgtcattttgggttgatacaacaacagaaagcagtcaaacaagatattctgtgtctttctatctggctatactatgtctcttttgtattatgaattcccttttcacattggtgagggcattctcttttgcatttggtggattgcaagcagcaactaaggtacacaataaattgctcaacaagcttgtcaatgcacctgtgcaattctttgatc

SEQ ID NO: 47880 - DNA, 172 bp, Glycine max
  Clone ID: PAT_MRT3847_143241C.1
tggggaaacgacaattttaaatttcagatcagattgcgtctccacaatccttaacaacgacattaacaactcactttagaagatctaggaatcggccatctacctcagatactccctctcttccgcgatcactttcatcttactcacacgtttactgcgtcaacatcaccac

SEQ ID NO: 47881 - DNA, 442 bp, Glycine max
  Clone ID: PAT_MRT3847_143242C.1
ttttctgttgtttttattcttcttattgtggaagaaaaacttggtccaaccagaatactataagggacgattccattctatttttgcttgccacttctttatctctaaagtaatctgctatggccattgtttatcgatgccacccaacccgagccgagatcccgctctctttaaccccgaccaaccgcaataccttttattattataatagctggaccgctctgctagccctgtggtatccccccgctatggtggacagtagtttacgcaccctttatgatatctagccccttgatggccactctgaccgctcctcaaacataaattgtctttacttctcctggttgtggagactaagactgagcttgtcggcccataaactataactgctggtaaaacataaatttttgacctgccggtccgggatgagaaaccaatggcg

SEQ ID NO: 47882 - DNA, 169 bp, Glycine max
  Clone ID: PAT_MRT3847_143243C.1
gcgatcgcgagggccgacctttttttttattctattttattctttttccagtggtaaatttatggggacaatacgtaaaaattacatacttaagttcatgatcctccttcaagtcccaattgcatgaacttggagactcttttgagttgaccttactacactgttccac

SEQ ID NO: 47883 - DNA, 765 bp, Glycine max
  Clone ID: PAT_MRT3847_143244C.1
tcctacttctttggcatcagaggaggccccgggagatcatgagaagtcattccctgaaaatgaatccaacgtgtcaaaggaaattaatggggttaatgttgcttgtagtagtggtgggaaaagtcgtagtgccaggttgcatgatattaaagtataccagcagaagaagcctgcttctggagggtctctgaagcatccaaataatgagaactctacttcagtggccttggagaattgtgatgtaaagggactgaaaagtccagcaacacccattcagtcacaatcgtcaagacaactaagcacatcacctgggcaggtaattaaaaaatctgcatccaaaatttctagaacatggtcaccaaagactgaaggctgttataagaaaaagagagtgacagttgaaacaaaagtggtcatgcccaagggaaaactgaataaatctgcatctgctttgaaaaatccacgagaaaaggatctaagccccttggccaagggaagccaacagaaaatatccacatttactccagagtcactaagtttcagaaaatccagatccggtaggttgcttctacctcccttagagttttggcgcaatcaaataccaatttataatgcggaccacgagattacagaaattcgggatggtgcatctctgatatcaccttgtagaggtttttcaccatcattgagtaggtttagcaatcaaaaacgtggagcgtgatgccggaaaggaacttaaatgcttgattcatggtatggatcttt

SEQ ID NO: 47884 - DNA, 261 bp, Glycine max
  Clone ID: PAT_MRT3847_143245C.1
caactttactattctgcttctgcgactttaatctaaggaaaacgacaacgtgtcattacttgaaacgcgaatctccaaatgcgaacataattcatttacatctgacttactacttactgcagatacttgcatttcctgatttcctcaatacatcaatacgtgtaatatgcatctgctgcgctttctatcctatacctctccctattattgattattgttacatctatttcttgtaccactgatacagagacatcatgagag

SEQ ID NO: 47885 - DNA, 394 bp, Glycine max
  unsure (1)..(394): unsure at all n locations
  Clone ID: PAT_MRT3847_143246C.1
ccgtccgtcccacgcccgtccggctcactttcgcagaaagtttggtggaatggggagtgtcaatggatcccaactctcagggctgaggtggcttcaactgtggagtttttaaataagcgccagcggatgagtaaaacagacatggtggtaaccccaagagtcacgcaggaaagactcgtccactgatacctcatatgcaaacactgcgtgtagaagcatggcaataactcaaactaaacaaatgggttttgctgcatagcaaaacctcttcttgccgaatcatagcatagcacatggttgctcctgtgaaaaagcctgaacagtaagaacaattgtttgtgtaactaagtgtcacagtnattcttctcttaagatatagaagctgtagaagtca

SEQ ID NO: 47886 - DNA, 448 bp, Glycine max
  Clone ID: PAT_MRT3847_143247C.1
tctcgagccgctcgagccgctcgagacggctcgagaagacgacagaaggggtatccggaaagatttgcatcaagttagaaatcacaaatagtagtttctgcattttttttttcatttgatgtgaaaacacggggaaaatgagtgttgaaaacgcgtgtccaaacactccataagtctaatatgttttggctttttaattaattgcgaatgcttttttaaatgaggacaacaattttctactttctgatatctaaagtgtagagagtacttcagtgtacattaacgttttactatttgcttgaatgtgatggacttgcttcgataaattaatctcagttaaaggaaaatttgagaaaattaatctatgtttaaaatcatttatttatttgaaagtgattttaatatagtatatgtagttttgatagtatttaataaaaaaatatttttt

SEQ ID NO: 47887 - DNA, 296 bp, Glycine max
  unsure (1)..(296): unsure at all n locations
  Clone ID: PAT_MRT3847_143248C.1
atgagaaatgactccacaactctctttaactatgcacacagatatattcaaataatcatttagggtcatcaaatacaacatcaagattaaaaagaaaacattattccattatttgattgtatgaatggaagaacaacatatttatattactatccacacccaatatatacaaatagtaaacttacgggactaccttgacggagatnngttgggataggctcttcagctgaaagancctctatccgacgcagaagggccatccctacctctcaaaagccagaaattcaccatatcct

SEQ ID NO: 47888 - DNA, 532 bp, Glycine max
  Clone ID: PAT_MRT3847_143249C.1
gacatacaatcaagttattatataattataattcaggattgataaaaaaaatacattatatatgaagttattgatgcatatcctgaattacatgtgtttcttccacattgtcagttggtcattgttcaattcagccaccattccatcttcagctacattaaaataacggccatgatcaattgacgagtccaatggtatgtttggtttagaaatcagtttttaccttctcctgtacatgcatataattgctactatgcagtacaccaaggaattcatttacagctcttacccaccaaagatgagatgcagttatcccttcaaaaaaggcaagatgtcctccatgttttacagtagccaacactatatttttatttgccttgcattcatcccaaggaatggcttccgttgtacagattggatcatccaaagcactaatacagagaagcggaacggaaacagattgcacataagtagaactactgcagcgtctatagaacgtatccacactctcatacttagcaacaacacgggt

SEQ ID NO: 47889 - DNA, 291 bp, Glycine max
  Clone ID: PAT_MRT3847_14324C.1
tttatatgcacgctgctcaaggcagcatataccaggcattgggcttgcgagacaatgcgaggctgttctgtatgcccggtagaaaggtccatgagagaaagatcagcccgggaattatgatgtcgagttatgctaaagcaagatgacatgtccgcgttaaatatccgttcaatcgcagatggacctattctgaagtcatgagcacacctcctacatcgcaataagaaggtagagtttattgaacagatcaaccaaatagctactttgaaagaacgaaaacgagaccctcca

SEQ ID NO: 47890 - DNA, 731 bp, Glycine max
  Clone ID: PAT_MRT3847_143250C.1
ctgtcttccactgtttactacctcacataacataactagttacagctcttcctgatctgtctcctttgttgcttttttccgcttttatttatgaatatcattttgtctagtactagtactagtactaggagtccaagttgctcttgggttatgaatggatggtgctgaaaggcggtgaagtaagcatgtctgagaagaaaagggaagtgatggtggcgattccacatgagggtggtgctgaatctttgatgccaaagcagcagagcagggtgaattcgccacacagaacattaaacgacaacgaggttgctgcaaagtcgccacctttgaactgtgcttcccctgagataaggctcatgccaagcccaaacaagcccccaaaagttcccacttccaatgccatcctcactcggagaaaatcactcacaaggtcagtgtattccaaacccaaatcaaggtttggtgaacaatcttaccccattgatgggacccttttggaagacaatgctacctcaactttgcaagaaaatttgactgttggttcgccatataaagcatcacctaataacaacaacaaacctgggactgttaatagaacattctccatcctgtctgtggtcactcccaagactccgctgatggcatctcccgggctggcacgggaggatttcgatgaaatcatttacaagaaagatgaattgagtaaaaacatgcgtactaggagactgact

SEQ ID NO: 47891 - DNA, 305 bp, Glycine max
  Clone ID: PAT_MRT3847_143251C.1
ctaggcacccagagacgaggaagggcgtagtaagcgactaaatgcttcctggagtggaagagaagcctacatccggggattggcgatatacttcaacctttctaactgctgctgaatccacgggcatgcaagagacaacctggttaactgaaacatcttattagccagaggaaaagaaagcaaaaccgattcccgtagtatcggcgagcgaaatgggagcagcctaaaccgtgaaaactgtgttgtgggagagctatacaagtgtcttgcttctaagcgaagcatcatataatgctgcaccctag

SEQ ID NO: 47892 - DNA, 413 bp, Glycine max
  Clone ID: PAT_MRT3847_143252C.1
aacatgatcattaaatagtttttgtagatatggataggatactagtagtaatacctgtaattttgtgcatagttggaatctcggttcacaattcaaagtcatcaacctctttgcttgtgttttttgtgattaacacgataattttctctattctcgtgggaagtcgcaaatcatctttagcagaagttgacatggcttcgcctttactaccatctttttttgaagtagcgggagaagcacaaggtggctttttagagaatgcaacgtatgataaagttgatgaaagtaacgatggatatcataaatctctatttaatattgaagatgaaagtgtagacaatgttgatgaaattacaacgcttgatcatgttgaatccgatgataatctgaagacaagaattgaaagcttcatc

SEQ ID NO: 47893 - DNA, 320 bp, Glycine max
  unsure (1)..(320): unsure at all n locations
  Clone ID: PAT_MRT3847_143253C.1
ggaattccgctcgagcactgccaacttgactctctctctctgaaccctttatttagactcatcacaagtcatacaccattggncattctctaatatttaagggggttatagtaatctatatacttaacaccaatctttttacttttttaatcaattttctaataaaaaattttcaatacaacatcttccaattctccttttctaatttttcttttcatttaaacaattttaaaattattccttatataagtataaattccctctctttcacccaaataatcactactaataattacaaaatattaccatttctttaatta

SEQ ID NO: 47894 - DNA, 228 bp, Glycine max
  Clone ID: PAT_MRT3847_143254C.1
cttatatttttttttttttttttttttaaaaagaactcgcccataagagaacattgttattgtgagtataataacaagcgagacaacaataaaatttgttacgctagaacttgacgaacaaggacataaacatcttgtttgggaacacactgccaataacaataaccgactgaccctgtgcttgccctgcattctgggctgaaccaaacacagcgaaaacggcggagt

SEQ ID NO: 47895 - DNA, 489 bp, Glycine max
  Clone ID: PAT_MRT3847_143256C.1
gagagatgagtaaactggcatgacctcttaaccacaaatgcattatcagacacatttaggaaagactccgggaaattgagattctggaatttaatttccttagaattatctatgtccatataattctaggaaggatttttgtgacacttcaagaggatacattttctagtttgaaaacccctgtaatagagatagaaataagctccaaaaaccaaggacaataattcaaagggagttagaacttacgagagtagggacagtcagttgcatctagtgagcactgataatgcattcttcaggcagaatgtatttccctttgattgtaagttcatggtctttcctgagaaaattccaactgtgtctgatggggagtctggagaataccactgctggaattggtgtctttcagaggctggcagaggaaggagcaacagcatggattgtgtgcagcaggtgtttttattaacacatgcattatcacttttattt

SEQ ID NO: 47896 - DNA, 2412 bp, Glycine max
  Clone ID: PAT_MRT3847_143257C.1
agtataaataacaacatgcgatggtgctgcaaagcacactgagtgcaacaaagtgttaacatgaaaggcaatgatacacttttgttgcatttattctacactctcttgttgtttcttggagtacgaagttcatcttcagcagggaatggaagtaacgatgtcactaaccgtaaagaagtttatatcgtgtatatgggagccgcagattcaacagatgcttccttccggaatgaccatgctcaggttctcaattcagtgctaagaaggaatgagaatgctctagtacggaactacaaacatggtttctcagggttcgcagctcgtctatcaaaaaaggaggcaacctcaattgctcagaaacctggtgtggtgtctgttttccctggcccagttctgaaactccacactacacggtcatgggatttcctcaaataccaaactcaagtcaaaattgacaccaaaccaaatgcggtctccaaatcttcttccgtcattggtatcttagacacaggtatatggccagaggcggcgagttttagcgacaagggtatgggtcctgttccatctcgttggaaaggcacctgcatgaaatcacaagacttctattcctccaattgtaacaggaagctaattggcgcaaggtattatgctgaccctaatgactcgggggacaacacggctagggattctaatgggcatggaacccatgtggcgggaacggcagctggtgttatggtgactaacgcatcttactacggtgttgcgacagggtgtgcaaagggtgggtccccagagtcaagattagcggtttacagagtgtgttctaactttgggtgtcgtgggtcgagcattcttgctgcgtttgacgatgccattgcggacggagtggatttgttgtcggtgtcactaggtgcatccactgggtttcgacccgacttgacgtccgatccgatttcgcttggagcattccatgctatggagcatggcatcctcgtcgtctgctctgctgggaacgatggacccagctcctacacccttgtcaacgatgcaccttggattttaactgttgcagcttccaccattgatcgaaattttctatccaacatcgtcttaggtgataacaaaatcatcaagggcaaagctataaatctatcccctctttcaaattctcccaagtatcccctgatatacggtgagtctgccaaggcgaatagcaccagcttagttgaagcaagacaatgccgcccaaattcattagatgggaataaagtcaaaggaaagatcgtggtctgtgatgacaaaaatgataaatattcaactagaaaaaaagttgccacggtgaaagcggtgggaggaattggtctggttcatattactgaccaaaatgaagcaatagcatcaaattatggggacttcccagcaacagtcataagttcaaaagatggcgtcacaatcctccagtacatcaattcaaccagcaatccagtggcaactattctagcaacaacatcagttcttgattataagcctgctcccctggtgccaaacttctcatcaagagggccttcatcgctttcaagcaatattctcaagcctgatattgcagctccgggagttaacattctcgctgcatggattggaaatggcacagaagtggttcccaaaggaaaaaagccctcactatacaagataatctcagggacttccatggcttgcccgcatgtttcagggcttgcaagcagtgtcaaaacacgcaaccccacttggagtgcctcctcaatcaaatctgccatcatgacttcagcaattcaaagcaacaacttgaaggctcccataacaacggaatcagggtcggtagccacaccttatgactatggagcaggggaaatgacaacatctgaaccattgcaaccggggctagtttatgaaaccagctccgttgactacttgaacttcttgtgttacattggattcaacgtaaccacggttaaagtcatctccaaaaccgtccctcgtaatttcaattgccccaaggatttgagctctgatcatatctctaacatcaactacccttccatagcaataaacttcagtggcaaaagagccgtgaacttgagtagaactgttacaaacgttggcgaagatgatgaaacagtgtactcccccattgttgatgctcccagtggagtgcatgtcacattaactccaaataaacttcggtttacgaaaagtagtaaaaaactaagctaccgagttatttttttcatcaactctgacctccttgaaggaagatctgtttggatctattacttggagtaacggtaagtatatggttcgaagtccttttgtgttaactaagtgaatttaaaagtaacgatgaataaatgcttcttcatgcttttagttcaaaaa

SEQ ID NO: 47897 - DNA, 415 bp, Glycine max
  Clone ID: PAT_MRT3847_143258C.1
ttctagtgccatgaaaagagcaagtgaatgggcttactctcatgaaattctaagtgatgtcaccgttcaagttggcgaagtttccttttcgttacataagtttccattagtttccaagagtggatacatagggaaactggtatcagaatcaagtgatgatgtttcattcattgaactctatgatgtccctggtggagcaaaaccatttgaactggcaacaaaattctgctacgggataaacttcgaaataagcgtcgaaaacattgctacgcttcgttgcgtggcagagtattctggcatgacagaggattactcagagggaaatttggtgggaagggttgattcttactggaatgaaggggcactcaagactatttacggggcgtgtgcaatttttacacatgtcgaaaccctt

SEQ ID NO: 47898 - DNA, 1522 bp, Glycine max
  Clone ID: PAT_MRT3847_143259C.1
agatttagtaattaatcattgaaagtggacttatgcatcataggctcattatataagaccatgcacccgagtcctagaatgcacagaagcacaacattgatcactataacataaaaactgattgagctggtgaggatgtcaagaatgagagtggtcctcatgatcctcaccctggtggtggtgacacttctcatcaacacaaagagtgttgaaagtgctcgcactttctttgtgttcggggactctctggttgacagtggcaacaacaattacttgccgaccaccgcacgcgccgactctcctccctatggcatcgactatcccacccgtcgccccaccggccgcttctccaatggctacaacctccctgaccttatcagccagcatattgggtctgaacccacgttaccatacttgagccctgaactcaccggacaaaagctattagttggggccaatttcgcttccgcagggataggaatccttaacgacactggcatccaatttgtggggatcttacgaatgttccagcagtatgcgttgttcgagcagtaccagcaacgattaagtgcattagtgggagcagcgcagacacaacgaatcgtgaatggtgcactgttcctgatgactctgggtggtaacgacttcgttaacaactattttctcactcctgtctctgccaggtctcgccaattcactgtcccccagtattgtcgttacctcatcaccgagtatcgtaaaattctcatgaggttgtatgagttgggtgctagaagggttcttgtgaccggaactggtccattgggctgtgttcctgctcagcttgctacaaggagtagtaacggagagtgcgtgcctgagttacaacaagctgcacaaattttcaacccacttctggtccaaatgactagagaaatcaactcccaagtgggctctgacgtttttgttgctgtcaatgccttccaaatgaacatgaacttcatcaccgaccctcaaagatttggttttgttacatcaaagatagcctgttgtggacaaggtcgtttcaatggggtgggactgtgcactgcattgtcaaacctatgcccaaaccgtgatacttatgcattttgggacccttatcacccatctcaacgtgctctagggtttattgttcgagacatctttagtggaacctctgacattatgacccctatgaaccttagcaccatcatggccattgactccaacatctattaagaggtcttaatttattagtgtgagctagtgaggggcaaaaacctcatcatcattgtaattgtatgtgcctggatgtgtgtcttagtattaattacgttcgtacctttgcttcctcacgttatgtcatagcatatactacatgtaatgtatgtgcaggtgcaacatcactactagctagtgtgtgagattgtttagttataatggactgggtgagggtttcaatgtaagttaactttaaaatctaaaaggaatttgccaataacttatgctttgattggttgcc

SEQ ID NO: 47899 - DNA, 530 bp, Glycine max
  unsure (1)..(530): unsure at all n locations
  Clone ID: PAT_MRT3847_14325C.1
ccacgcgtccgaatttctctctgcatttttacccaattcgtcaataattcaattctcttctcttgcatgtctttttctgatactttttttactgttatcgctgcatatttggttttgctcaatttctagtgatatgttttttttttcttctttacaaagctctctgtaatttttatttatttattaaaagctcttcttcggtgttagagtgagaagaggggataaatctttttgaaggagcttccctttttcgaagttcaaattctctctgccatttttacctctatacttggattctccccgtgcatgtgatctcatcagtctttctcatactttccacttttataggtgcatatttgagtttgcttaatttttaggggtaaatgattctttttctcttcttcttccaaagctctgagtaatgtttacgatcaaaagctgctttgaactacattggnggttgggccaatgcggcactagtgggacatagtgttaagagtgagaagaggggaatgcataatcagggcttt

SEQ ID NO: 47900 - DNA, 2829 bp, Glycine max
  Clone ID: PAT_MRT3847_143260C.1
ccctcgcttccggctaaccaaagaggcaaaggtggccctcttcccgtactcttggattggacttttctggaaagagtttccttttacttgtattattctcatttcccttttctgatgccaaactctctctctgccgtggtctcgactcacaataattaatattccaccttcttccccaaatcgccctccctcatcacccctatttactttctttcccacttagtcatggacttggatgcactcctaatactcatctttaaccatcactctacaacgctaacaaaaggttgttctgagtaattatctttcttttggactcctcgcgctgtctatttccttttcgacccagagagagacagatagacaggagatgctttttcgatttcgttaacgtgagaaagttttttaagaaagagatgcttgatgcttattggttttggtctttcctttccttttccccccatttttacccccttgcatttttatttattaattaatcacataaaaacggaaacaataaataacagtacggtgattattttaaacaatatatatataaggagtttcctcctggagaagcaaaacaaaaatagattgtcggctcgagatttatttgagtaatataaaaagaaagagagaagagattgttgaagttgaaggtgggatgctttcggctaagcttgctgaaactggcctcgtctatgctgtattgggcagttaggggaattcaaagatctttgaacacctccttctttattacctttttccaacacctactacctcttctttctctttctcactcgtcctaggtttgattttctcttccttccttctcccaatactcctccattattttattctcaaaatccaaacgaacactctagcttcgttactacttgcctttttctttttcctttttctctgcccagctatatgcttgtgtaagaaggggaactaataagccattctaaagggagctgaagaatgtggaatctgaatgactctcccgatcagagaaaggactatgaatctgaaggctgttcttcttctctgaatgatgataaaggcaagagggtgggatctgtttccaattcaagctcctctgcggtggtagttgaagatggatcggaagaagaagacagtgaaagaggtggaagcagaacattggacaagaaaaccaacaaaatattcggctttgcggtagcccatgatgacagtgaccacccacccgtgacccatcagttttttcctgttgaggactccgaactgcctgtctccgccgccgccgcaggcagtggaggcggtggcggcggaagctccttcccacgtgctcactgggtaggtgtcaaattttgtcaatcggaaacacccggcgccggaaaagcagtgaaagtgtcggagccgatgaagaaaagtcgccgaggaccacgctcgcgtagctcacagtatcgaggagttactttctacagaagaactggtagatgggaatctcatatatgggattgtggaaagcaagtgtatttgggtggatttgacacagcacatgcagctgctcgtgcgtatgatagagcagctattaaattccggggagtggaggcagacatcaacttcaacatcgaagactatgaggaagacttgaagcagatgaccaatttaaccaaggaagagtttgtccacgtacttcgccgacaaagcactggatttcccagaggaagctccaaatatagaggtgtaactttgcacaagtgtggaagatgggaggctcgaatgggccaatttttgggcaaaaagtatgtttatctgggtctgtttgacaccgaaattgaagctgcaagggcatatgataaagcagcaataaaatgtaatggcaaggaggctgtcaccaattttgatcctagcatctatgatagtgagcttaattctgaatcctcaggaggtgtagctgcagatcacaatttggatttgagtttgggcaattccagctctaaacataacaatagtcaaacatcggggaatcacttcgcaaattctgcaaccgatcagcatatgccacctgaatctaattggcggaatgggggaagcaagcctaagctggtaaatatacttccaaaaccatgtggtagaagcaacatagaagcctatgggcacggtgagagtgaaaccttgaggttgctaagccaaactcaccttcaatcccctaccaataaagaaatgcacagatatggtccgtataggtcgccagcagagccacaaaagcctcacaattttgcacatcatcttcaccaaccaagttttcatgttcctagcagcagcagcaatggaggccgtattggaagcgatctttcgttatcaatgtccgatcaacaacaatggcaagccgggcctccacatttgttagcaactgctgcagcatcatcaggattcccacagcaaattagaccctcccaaggttggctgcagaaaaatgggttccactctctcatgagaccctcatgaccatcctcaagattttttctaccatgccattttgcattttgaaaaataatctccccctactatttgttttgtgaacatgtacaagtgaaagtgaatgcagtttagattattattatgtaatgtccaacctcccccttctttaggaagcccatacataactgtaactttactattggggtgaaagacaagaagggatgaaaaaaaaatagggaaagccaatttgggaactcgctctggatttgttataggccagtcaaactaaccaacggacaaaatctttaactagatactaagatattctgggcgctgactaaagtttctgatctgatcttt

SEQ ID NO: 47901 - DNA, 1295 bp, Glycine max
  Clone ID: PAT_MRT3847_143261C.1
cctgttgaggactccgaactgcctgtctccgccgccgccgcaggcagtggaggcggtggcggcggaagctccttcccacgtgctcactgggtaggtgtcaaattttgtcaatcggaaacacccggcgccggaaaagcagtgaaagtgtcggagccgatgaagaaaagtcgccgaggaccacgctcgcgtagctcactttatcgaggagttactttctacagaagaactggtagatgggaatctcatatatgggattgtggaaagcaagtgtatctgggtctgtttgacaccgaaattgaagctgcaagggcatatgataaagcagcaataaaatgtaatggcaaggaggctgtcaccaattttgatcctagcatctatgatagtgagcttaattctgaatcctcaggaggtgtagctgcagatcacaatttggatttgagtttgggcaattccagctctaaacataacaatagtcaaacatcggggaatcacttcgcaaattctgcaaccgatcagcatatgccacctgaatctaattggcggaatgggggaagcaagcctaagctggtaaatatacttccaaaaccatgtggtagaagcaacatagaagcctatgggcacggtgagagtgaaaccttgaggttgctaagccaaactcaccttcaatccccaaccaataaagaaatgcacagatattgtccgtataggtcgccagcagagccacaaatgcctcacaatttcgcacatcatcttcaccaaccaagttttcatgttcctagcagcagcagcaaccgaggccgtattggaagcgatctttcgttatcaatgtccgatcaacaacaatggcaacaagccgggcctccacatttgttagcaactgctgcagcatcatcaggattcccacagcaaattagaccctcccaaggttggctgcagaaaaatgggttccactctctcatgagaccctcatgaccctcaagatattatttctaccatgccattttccatttgaaaaataatctccccctatttgttttgtgagcatgtatgtacgagtgaatgcagtttagattattgtttatgttatgtccaacctcccccttctttaggaaaagcccatacataactgtaactttactattgggtgaaagaatagggagagccaaattgggaactcactctggacttgttataggccagtcaaactaaccaacgtacgaaatctttaactagatactaagatattctgggctctgactaaagtttctgatcttatataactatgatttcctgcc

SEQ ID NO: 47902 - DNA, 782 bp, Glycine max
  unsure (1)..(782): unsure at all n locations
  Clone ID: PAT_MRT3847_143262C.1
gcgcccacgcgtccgtacggctgcgagaagacgacagaaggggggggtgttaaggagagggtgagatgctttcgtctaagcttgctcaaactggcctcgtctatgctgtattgggcagttggcgaatacaaagatctttgaacatctcctttactacatttttgcaacacctactctttctctctctccctctcactcgtcctaggtttgattttcccttccttctcccaattctcctccattattttataacactctagcttcgttacttgcccttttctctgcccagctacatgcttgtgtaagaactaataagccagctgaagaatgtgggatctgaatgactcccccgatcagagaaaggactacgagtctgaaggctgttcttcttctctgtatgatgataaaggcaagagggtggcatctgtttccaattcaagctcctctgcggtggtcgttgaagatggatcggaagaagaagacagtgaaagaggtggaagcagaacattggataacaagaaaaccaacaaaatattcggcttctctgtagctcatgatgacagtgaccacccacccgtcactcatcagttttttccggttgaggactccgaacttccagtcaccgctgccgccgccgcggccggaagctccttcccacgtgctcactgggtaggcgtcaaattttgtcaatcggaaacacccggcgccnganaagcagtgaaagtgtcggagccgatgaagaaaagccgncgaggaccacgctcgcgcagctcacagtatcg

SEQ ID NO: 47903 - DNA, 275 bp, Glycine max
  Clone ID: PAT_MRT3847_143263C.1
acgagcgttaacgtgttggctgaaagtagcactcacgagtggcgattcccacagaaccccaagctcatcgtcataaccttgcgatgcagaagcagtggtgattgaacccagatgatgatcatcgacacgatcatcacatggcagtggattaatgctacgctcactgggtgtggggatctctgtttgcacgtggtgctgctgctgctgcgcctcaaaagcatcatcgttgatcaaagagttgaggaaggaagaaaagacatcgtcgggtaataatt

SEQ ID NO: 47904 - DNA, 272 bp, Glycine max
  Clone ID: PAT_MRT3847_143264C.1
cagttgcacaccttttgcaaaatggtaatatgcatgggcaagaaatatcttcaggaaggccagatgaaatgacagatcgagtctgggatttcgtgctctgtgatggcccgagaccataaagcgagatccctgccgctctgttgaacaagatgaaacatgaatttaagtagtggtatcgatttgatatccgtgtgtctggtaaagacattattcaaaaccatttgacattctgcatatacaatcatacagcacttcttcctgagcaccactgg

SEQ ID NO: 47905 - DNA, 128 bp, Glycine max
  unsure (1)..(128): unsure at all n locations
  Clone ID: PAT_MRT3847_143265C.1
taataagttgggttcaccgttcacnctnaccagcaccaccaancactgccatggnactctccttccganccctcatcnaccnccgcttcaccgnccggtcactcttncagttcctcccanccangcnt

SEQ ID NO: 47906 - DNA, 224 bp, Glycine max
  unsure (1)..(224): unsure at all n locations
  Clone ID: PAT_MRT3847_143266C.1
gcttctttcagaattcattcaacangcttctccggaaaacattatgngaacggcgctngtggtttnntcngcttttgggtggttcaanttctctggangaanggttacatnntcgnagganccttnagaaacccagntnttcccaagaccgggcanttaaaagattnnaaggaacttcccagnnanaattctgctaangtgaactcttnactgnactccgtana

SEQ ID NO: 47907 - DNA, 528 bp, Glycine max
  Clone ID: PAT_MRT3847_143267C.1
cttatcttatttttttatcttctattttttatctttatcatcttttaatttaaatattttatctcttatctttcctttttaaatctttatcttatatcttttatctttctgcctcttttatcttaaatttcttatctcttgcttgtaaattggatttgctttaatctaagtacaaacaaagttcatgtggattcgacactcggactttcgagtattttactacttgtgacgaatttggtgcacttgccaacgagttaacactagttggatgcaagtaggtcttcaagaaaaagaaaaacattccaagtgtgaagaagtcgaggtacaaggcaagacttgtggctaagggttttacacaagtggacagagttaattataatgaaattttctcacctgtggtaaaacattattctataaggatcttgatggcaattgtaaatcagtatgatctggagttaccataattggttgccaagacaactttttttacatggagaccttgaggagacgcttgaattcaagcgacct

SEQ ID NO: 47908 - DNA, 283 bp, Glycine max
  Clone ID: PAT_MRT3847_143268C.1
ggttaaaaaaacacacactaaacacatcattaccacacttaaaacaggtgtggaaattatcaaataggccgagcatactcaacaagagggtcatgcctaagggccttgattgaattaaacaaacgaacaagcgaaagaaaccgcaaattgcagatcatgcggaggattccgcattttcagaagatctggccaaaacatgtggaacagaaaaggctggcataaaagtcttaccagcaatttcaaaatctagagagattcccaggagaatatcaaaagctgtaaa

SEQ ID NO: 47909 - DNA, 514 bp, Glycine max
  Clone ID: PAT_MRT3847_143269C.1
cccacgcgtccgcccacgcgtccgctttctttctctttttccctcttcaactcaaaaatttattctcctctagaatttgcatgttgaaactcattcaatagtagcttgatttctcaggatcctagagattccttgttggaatttatcttagaacacaaactgaggaggtccactcagaattcaccaagtgcatcattgttcccatcttctacaagggcttagaaccctaggacattgatttgggtaaggaaagcttttactatataattgattgttcgtgttgagttttgatgttgtttttgtgatgcttggttgctaagtattgggtgtttaagttggttttgttgtttttaggtgttggtgtagattgaggcttggattactctttttttaggtcaattcgtgatctgcaaaattttaaagtctcattgagcgatacattctcgccaagcaagcaaatccctctgatttggaaaagttagaaatttcacaagtctcgttgagcaaaacattc

SEQ ID NO: 47910 - DNA, 387 bp, Glycine max
  Clone ID: PAT_MRT3847_14326C.1
ggaacacatgaggggattgatagacatgggtagtctgagcatagcagcgtcgaagcgttatgcgatcaccaagtgcatcatctcggtttcatcgcacgagttggtatcggattttggcgggagtcgtctcagtcgtgatcatcattgacgcagccatgccgcggtacgaccgtgacgactgcgagacgtagttgaaccaagaatctccagctgtgagaacacaccagaatgcaggttagaaacacaaggcgaatgtgacgacgtacaaccagcaatttgaggcacaacaaccataaagtttaattgataaatggatgacagaaaatcctgggtaaactgcagcgtttcatcagtgtggagtggcttaggcacatctaacggttcaaa

SEQ ID NO: 47911 - DNA, 572 bp, Glycine max
  unsure (1)..(572): unsure at all n locations
  Clone ID: PAT_MRT3847_143270C.1
aattccttaaatcccatccatctcactttctttctctttttccctcttcaactcaaaaatttattctcctctagaatttgcatgttgaaactcattcaatagtagcttgatttctcaggatcctagagattccttgttggaatttagtgagtaacaaatcccttccctttttggtcccttggctcatttttcctttttgcatgacctctttgatgggtggtgttagaatcttgttgtaagactattttgatgttggcttctattagctagtcttagaacacaaactgaggaggtccactcagaattcaccaagtgcatcattgttcccatcttctacaagggcttagaaccctaggacattgatttgggtaaggaaagcttttactatataattgattgttcgtgttgagttttgatgttgtttttgtgatgcttggttgctaagattgggtgtttaagttgttttgggttgttttagggtgttggtgtaaattgagggcttggattactctttttttaggtcaattgcgtgatctgcaaaattntaaagtctcattcagcgatacattctc

SEQ ID NO: 47912 - DNA, 412 bp, Glycine max
  Clone ID: PAT_MRT3847_143271C.1
aaggggggaaaaaaaaaaaacctttctttggaaatccccccccccttaaaaaaggcccccccccaaacgggcggggtttcccccaaggataaaaggaaaaaccccaaatttaaacccctaaggggaaacccaaccccaaaaaaaaaaaaaaaaagggggaaaaataaaaaaaacctttgcccggggaaaaaaaggtcaacccacccccctttctttttggaaaaaaaaagggcttggttcccccccccaaaattaatgcaaaggcaccggggatccccccccccccaaaagcccaaattcccacgaagccgtgttggaaaccaaaaaaggcctcaaaaaaatcctcccccccctgggtatcccccccccgctttcttttagttttttccccaaacggggaggccaacaaccc

SEQ ID NO: 47913 - DNA, 316 bp, Glycine max
  Clone ID: PAT_MRT3847_143272C.1
aaaaaaaggggccggcaccataaataaaacttggagttcatttgggaagtgcctttaccggtcaggggtttccttcctttctttatgactggcccccaagggatgaaccccttccaattttcctttttttatgttttcccacgggtttttttttaaacccggcattttcttttattcaacaaaaaacttagaaaaatcccttaaaaaccaaagggtgctttaaattacatatggaaatggccctttcctttattaaacttacaggaaaacacgtgtttttatagggttgaactttaatcccatgctttttggaaaa

SEQ ID NO: 47914 - DNA, 1628 bp, Glycine max
  Clone ID: PAT_MRT3847_143273C.1
tcgcaaaattattttcttagaaactttaaataagaagtaccagcaaaagttattgatagctggaacaaatatgtgatagtaaatgcaactatttctctgattttattcttgtatgaatgatgctagcctggatcaaaatccaaatctatgtgaatctgatccatgcatccagcagacaaataacaagcagccagatggtgatcaacagaagaacaaaaataatatagttatcccggtagtagcatcagttgctggggttttggtgctcctaataattgtagcagcagctataatctgtggccttaaaaggaaaaaaccacaagcatctgatgtgaacatttatgttgagaccaacactccaaatggatcacaatttgcatccaagcaacggcaatatacattcaatgagcttgttaagatcaccaacgactttaccagaattcttggtagaggtggatttggaaaagtttatcatggatttattgatgacactcaagtagctgtaaagatgctttctccgtcagcagtacgaggatatgaacaattcctagcagaggttaaacttctgatgagagttcatcatagaaatctgacttctcttgttgggtattgcaatgaagaaaacaacatagggctcatctatgaatatatggcaaatggaaacttggatgaaattgtttcaggaaaaagtagtagggcaaagttcttgacatgggaagacagactccaaatagcattggatgcagcccaaggactggaatatctgcataacggttgtaagccaccaataatccacagagatgtgaaatgtgcaaatattttattaaatgaaaacttccaagcaaaattggctgattttgggctatccaaaagctttcccacagatgggggatcttatatgtccactgttgttgctggaactcccggttatttggatcccgagtacagcatatcaagcagattgacagagaaaagtgatgtttacagcttcggagttgttcttttggagatggtcacaggtcagccagctattgcaaaaacacctgataagactcacataagtcagtgggttaaatccatgctttccaatggggatataaaaaatattgctgactcaaggtttaaggaagattttgacactagctcagtctggagaattgttgaaatcggaatggcttctgtgtccattagttctttcaaaaggccaagtatgagctatatagtgaacgagctaaaggagtgtttgactacagaattagctcgaaaatatagtggtcgtgacactgaaaacagtgactcaattgagttggtcactctgaatttcacaactgaacttggtcccccagctaggtaatacattcactgataccaaaaaaatgttcctgaaagcagtggtgtgtttcaatttctgtttgctgtacctgaatttattgcagttttgcatgctcaattcttgtagtcttttattcaatggattaatttttctgctattttattctgatgttctgtaaccaagcataagcaactgtactatgatcagaaaaaaaaaaatacatatttttgcgcggagattctcgtcgaggaaaatatttctagtcttaacatctctgggaaaaaaagggggcttg

SEQ ID NO: 47915 - DNA, 132 bp, Glycine max
  Clone ID: PAT_MRT3847_143274C.1
tccggtaattgcccgggactcgaccccgacgccgtccgcgtaatacaccatctgtcttctcatccatgttgagacagcttgcgttcgagtcttactttatcagtctcatgtacgtaggctgagtgagtataa

SEQ ID NO: 47916 - DNA, 132 bp, Glycine max
  Clone ID: PAT_MRT3847_143275C.1
acagattaactgacatggtcaactgattatagaggtttcatatcagcctgcagctcctatccatcaacatcaggcgcatcacgatctgagaagaaagaagcacttttgcatctggtgacactaaaaggaggt

SEQ ID NO: 47917 - DNA, 233 bp, Glycine max
  Clone ID: PAT_MRT3847_143276C.1
agctttcttctccactctctaatgtggcccaatgtgtttcaaaccctacgccgtctggagaccatgttgtgggggggcccattactgaggattttgtcccagacagagaataagaggatggtagtagtaagatggttattccgttctcgaagcgagtccttgtcattgaaggaggatagcaatacggtttctgtttcgagaaaaatgccatgatgagtgagaagctctgaaag

SEQ ID NO: 47918 - DNA, 264 bp, Glycine max
  unsure (1)..(264): unsure at all n locations
  Clone ID: PAT_MRT3847_143277C.1
gttgtttcantgcatcanngnccggangnnaaatatggaaagcgagtccacattcntccngnggatganacnatngaaggagnaacaggaaanctcttngatgccnacttaaaaccttatnnccnagaggcatatcgaccagngaggaagggtgacctcttccttgtgagaggggggatgagaagtgntgaatncaaggtnattgaaactgacccttctgagnactgtgntgtcgctccagacacagagatcnnctgtgaagga

SEQ ID NO: 47919 - DNA, 287 bp, Glycine max
  Clone ID: PAT_MRT3847_143278C.1
aagcatttgaaatacttaaatgtagcttctacttctccctatcatcaatgtagtagaaaggtcattaagatttgttggtccgaagctataccatcgaaagagaaaagggctgggatgaaaactgtggagtacctttactcgtttctttctattgctttctaacttgtacggctcgattaatgaagctacagcagttaagaatttaaaaaaaaaaaaaaaaaaataaataaaaaaaaaaaaaaaaataaaaaaaaaaattaaaagggtggccgttctaaatgaatcca

SEQ ID NO: 47920 - DNA, 608 bp, Glycine max
  Clone ID: PAT_MRT3847_143279C.1
acaagcccaaacaaaagactttcaatttgacgtagattcagtccttcgggatatggtacccaaatacacgacggattcaaactccgttacagaagtcaattaccaaacatatatatactcagactcctgaaacagtcccactcccaccccacgagacatttctaactcatctttcagtttaagaaaagaaaaacattatcatcttgtaactacactttgcaagaaagattgatctcagttccattatagacaaaaatataacatcagacacattacagttatatttacccagcaactgtagtaagaggattccccacagccaatccctaacaagaataatctttcctcactgctattttaaactccctttgcatgcccgcaaaaaagcttgaaatccaaagcaagtgggattatgttgggtttattgctaatttcttgggaaagctaattgatatagaactcattcagtcctttggctgttcttggggagtagattgcgtaattttgaaattgttagatccacacctccaaatccatccattgtagcgtttgccaatggaaagtcggctatagaagtcaaaatgcttcgtaaaaaaaccatggcatgc

SEQ ID NO: 47921 - DNA, 349 bp, Glycine max
  Clone ID: PAT_MRT3847_14327C.1
ctcctttgttaccatatgttgagccagtcgcgcaagcccaaagtgcttgaggatactttgactgcttccctgtggtgggtggttgggatcacggagacgctctcattggggaagttgacactgatgtgtatgagtgactgcctacaaactctaaattgctggaaagctcgaaggaatggcctctggatctacgttgtgacaaaagtgccagtggattgcctacgacgggtgagagattggatggctcagaacatgagggatctgagccgtgtcttgcccgaattcaaaaatatgggagtaccatgatgccccttgatgaagataagttgtctgaagttgcacaagacat

SEQ ID NO: 47922 - DNA, 330 bp, Glycine max
  Clone ID: PAT_MRT3847_143280C.1
tgatttgaaggaactgggaacattcagaaaggaggccaggagcaccatcttaaaaccttaaagctccctctctcctctgaaacataagtaggattgtattccatgttcattcgaattgtagaataatagagacagcagggagataaatttgggttcaataataataattctcagaaagctgctgcccaaatatacaaatttgcctctagaagaagtaacttcctcagggtgctgaaacagaggctgggcgaccatttagaggagagacaggagtcaagattccatgataagaacaatgtacagttgtcagttgaattgtgtcctgcaaaa

SEQ ID NO: 47923 - DNA, 428 bp, Glycine max
  Clone ID: PAT_MRT3847_143281C.1
gcacgaggccctccatgtccaggtttttggggtctttgtggccacgtttcaacacctcattgcatttgtatgcatcttttcttaatatcaaggatcacagcaaaatggtaagtgtgaccgtgaccacaatctaaaaccttgattgcgctgcaattgtaggtgtggtctgcaatttaaaatcaattatctgtattgtcatgttttggtctaatgctttttttttgtgtcatctaacatcaattttttttaaatgtgtttttctctacaattattttctggttttagcaagcttaacaaattgatttcaaataggtactttgtaatctctagcttcctgacattaccatagtttattggggctagaatatgcgcctggttattggtaatttttttttaatgggaatttatttggcagagactagttcagc

SEQ ID NO: 47924 - DNA, 249 bp, Glycine max
  unsure (1)..(249): unsure at all n locations
  Clone ID: PAT_MRT3847_143282C.1
tctaaatgtctttatgtttttatgatgttctactaccgctattatgctgagctgattatctgatttttttgtagcgtttatctcacttgaaatcacagggcatcaaataattcagcagatcatactctgttgttgactttagttgttttgaatacattgcattactggttgtgctgaaaagtnncttactctagattttctctttcaaattggtgaggttagactccaagcaactgttgttaagatcac

SEQ ID NO: 47925 - DNA, 215 bp, Glycine max
  Clone ID: PAT_MRT3847_143283C.1
gcgctctgacgttcgcaccagcggacattcgttgttatacatgtggaaacccacacatgtttaggggcattccttaaacaaggggtctatgcagataatcaaactacgctctcattcgcacttgcccgatcccttaatcatccacactgatctcaactgctgcactgtgtttctcaatcctaatactgccccagttaccatagttgactattgtc

SEQ ID NO: 47926 - DNA, 542 bp, Glycine max
  Clone ID: PAT_MRT3847_143284C.1
tgcttatttttgggggattcttttttttttttgggcatctcctgaataatcatatttccaatataaattgtactattgcaataaaccttagtttcttgggtttgattcagtagggaaatgtcaaatgatttacaaaattaaggattattgttttaatatattatgttatatccgaattaattttctcattcttttttcacaatagctattcctactttctaatgttttcctgctctggtaacaatttgcaggtaccattgattgcttattctgttggagaaagaggattaataagccagcttctaagtcaaaaatttggcgggttctttgtctatgaatcattggcaggaaatccaatccctggtctgccttctcttgacaatatccaggaagcctataaattggaacatgtaaaagcagatactaaagtttttgggctcatctcaaaaccaattagccacaacaaaggccctatactgcataatcctcccttcagacatataaactataatggacccttctgtcgtcttctcgcagccgtt

SEQ ID NO: 47927 - DNA, 118 bp, Glycine max
  Clone ID: PAT_MRT3847_143285C.1
cgaactcaggaccaccgaacctgcctcatcaagccagcgcgcgcaaaaggaagaccgggcacgaaaccgcccgacgaacgggccaggggacagccaacacccaggcgggccacacacc

SEQ ID NO: 47928 - DNA, 361 bp, Glycine max
  Clone ID: PAT_MRT3847_143286C.1
gactgcactgaattggattgagtttgcagcaggagcacagaaagatatcagtgattcgatccttctcttgcagttccatcaactcccactttctcgcactcgtttcatctgacatccactgtcaagttccatacgatgcacattcactatatcttcctcatcaaagatattatactccacatgcatcacttagagtatcaatggcacacgacaatgagactcgtcacgtgcatatgcaaattgccatcactagggataacacttcggaagctctaccagtcacacttcaaggatttccttgtgagaatgctgatcatactgtcctagacagattatataatcctgcagcatcaacagtgaa

SEQ ID NO: 47929 - DNA, 454 bp, Glycine max
  Clone ID: PAT_MRT3847_143287C.1
acgggctcacccatcgcatcatcatagagtgtaagcggccgggcttccagccctcaagtctcattactacccctggcatatgttgacgtcttcagcacataacctccgcagacacctgagggtctagcggacttcctggtatcgctcgcgctcatcacttgtcgatctacccatccgcgcgctccctaaaggaccctacaatttcggtgttcaatatcctaacccgcgtcgcataccccacagaatcattatgacacgaaatatctcccaccgccgcggcggcgctggtgagtctttcatagaccgagcatacggtcatatgtttcttcggtccccgtttcctttcgagagaagcgtcttctgacatccgggcaggaaatatcttctcgagcgaagccccgaagactaccccgcaagaccttgtcaccccaaccatcaagcaagaagtcttcac

SEQ ID NO: 47930 - DNA, 439 bp, Glycine max
  Clone ID: PAT_MRT3847_143288C.1
tttggtttttttttttttttttttttttttgagaaaattgacttttattttaatacttagattagttgaaatttgaaaatcaaaaagagtttcagagaatcagaggggaatttgaaacatcattataaaaaaaaaaaaattgaaaactttttttcttctcacattaaaattgggtagattattttggacccctcttcaatcatgggctcttgacaatagccctctaaccgcctcaaggtctgccctgatgctgatttgtaatactcaaattatattcctttcaaatattacaactaaactactattttttatttaaaacataaatgattttttcatgtaggatgtttattatctaattgaaacatacaactaaaagtatgattgttgaaatggaaatgcccatttcaaataagtttttcaaatacaggttaattaaaaa

SEQ ID NO: 47931 - DNA, 651 bp, Glycine max
  unsure (1)..(651): unsure at all n locations
  Clone ID: PAT_MRT3847_143289C.1
cagagatgcttcttgagatgcagaaaaatgaaatgaaaaggcatgaagcttggctggtttatggagccttgctggtcagtgtatatatgatcgactaaagattttcccaacttttccatctcctccccttcatgctgtctggaagaccaatgcaaaagttcttacttcaactcataaacgcaaggcaagccctgagcaattggaacagcagccacctttgaaaaaagctgctacggatggtgagattggtgtggacctaatgaatcacgagcaagaggaggcagggactcaagcttcttcagccgattcaataattggctcatcatcatctaacacacagatgaaaaatgagactactttagatggagaagttagaagtaacgggggtgatactcaggcattgaagacatctgctgctctcacccaggtttggaaggacgagcttaactcaggacgtaccctggtatcactgtttgagttgtttggtgaaggaattctctccttcattcaggctcctgagatgtatatgttcttgtaacttanggagtatcatagtaatttgatggatagaacttggataacccatagaccattatttcgaaaacaaactaaaattcctccatggtatgccaagttcatgttgatgttttt

SEQ ID NO: 47932 - DNA, 454 bp, Glycine max
  unsure (1)..(454): unsure at all n locations
  Clone ID: PAT_MRT3847_14328C.1
tggtattggaatcaatctcagaacctgctactattgtgacagggtgctgctatctgaaccaatttcaatcctccccaatctccgagggaacagaaccaccctgtcttacgtgaaattctctgataccaaccgtgtcatcgaagaagcgcctaataaccaagtttccctgatacccatcgactcattcttcaatggcaataggaccattggtccatgattcccatactcctctgcttcgatggatataagattgtgggcttttaatgccattgctggtgttgttgaaaagacattgatcttgggtctctacaaggcattggagaagctattgactgcccaataaatctcttctatgttgatcatcaagatgagtgatattcttgaagattaacctgtttccacggggtantatgcaggtgtgacagtgcttgctttcttctatgatcctcagcga

SEQ ID NO: 47933 - DNA, 2031 bp, Glycine max
  Clone ID: PAT_MRT3847_143290C.1
cggattcgccccgccgcgcccccgcctctgtcgctgattggactcgaacaatacacgacccttacgaaacgagtttgctcttttgcggagatagcaacatgtactgaaatggatgcaatgatgcgctgccatgggagttgttttgcgggttattgcttcaagttctaatatttgattcctcttccaatttatctgtacattgtcttcccctgcttctttttggaatacttattcaaatattcttttatttgcagtaatttgagctcctggatctgcaatatgtcacatgatgtcactcttgaagtcgcccgctatgtcgaatacggctggcgcgcaattattcaggaggcaattaaaggcatgcgccattccaagagaaccactttgatcgcagatgatgtcgatgctgcactcaacttgaagaatgttgaaccaatatatggatttgcatctggtggccctttacggttcaaaagagctgttggacacagagacttgttttatattgatgacaaggatgtagatttaaaagatgttattgaagcttctttaccaaaggcaccccttgatactgcagttacatgccactggcttgccattgaaggtgtgcaacctgctattccggaaaatgctcctgtagaagtaatttcagctccttctgatgtcaaaaagcatgagcagaaagatgataaccttccagttgacatcaaattgcctgttaagcatgtattatccagagagcttcagctgtattttgacaaagtggctgagctaactttgagcgagtctgattcagttctctttaaagaagcattagtaagtttggctactgattcaggacttcatccactagttccttatttcacatgctttatagctgatgaggtttctcgtggtttgaataattttcctcttctatttgccttgatgcgagttgttagtagccttttgcaaaaccctcacatccaaattgaaccatatctacaccagttgatgccatctgttgtgacttgccttgttgctaaaaggttgggcactaggttggcagacaaccactgggaacttagagactttacggctcatctggttgcctcaatatgtaaaaggtttggacatgtttatagtaatctccagtctcggttgacaaaaacattgctgaatgcattcttggatcccaagaaggcattgacacaacactatggtgctattcaggggttaggagcactgggacccaacgtggttcgccttcttttgctgccaaaccttgaaacatatatgcaacttcttgaaccagagatgcttcttgagaagcaaaaaaatgaattaaaaaggcatgaagcttggagggtttatggagccttgctgcgtgctgcaggtcagtgtatatatgatcgactaaagattttcccaacttttccatctcctcctcttcatgctgtctgcaagaccaattcaaaagttcttacttcttcaacttataaacgcaaggcaagccctgatcaattggaacagcagccacctttgaaaaaagctgctaccgatggtgaggttggtgtggacctaatgaatttctcaccagttcataagcaagaggaggcagggactcaagcttcttcagctgattcaataattggcacatcatcatcttctgcacagatgaaaaatgagactactttagatggcgaacttagaggtaagaggggtgatactcaggcattgaagacatctgctgctctcacccaggtttggaaggacgagcttaactcaggacgtaccctggtatcattgtttgagttgtttggtgaaggaattctctccttcattaaggctcctgagatgtatatgttcttgtaacttagggagtatcgtagtaatttgatggatagagcatggataacccatagaccattatttctagaagaaactaaaattcctccatggtatgcgaaaatcatattgatgatgctttaaatgttggtggatattgcttatcggggtgttacggggaatctaacgtttgcgtagcatgtt

SEQ ID NO: 47934 - DNA, 229 bp, Glycine max
  Clone ID: PAT_MRT3847_143291C.1
aatgatgatgaagtctgctatgtgtgcattggtgcttgtggcactggttgtggttgaagtggggcccatggctgaggctgcggtgacttgcaacccaacacatttgatttcttgcgtatctgcaattaatgggtgttctgggctctgaagtgcattttgcctgaagctgattgagcataagccgtgcttctgtggctacctcgagaaccctagcttgaggcagtatgtg

SEQ ID NO: 47935 - DNA, 697 bp, Glycine max
  unsure (1)..(697): unsure at all n locations
  Clone ID: PAT_MRT3847_143292C.1
atctnnagcaaatacttaataanaactgactgttacacnaatcaaagctaagaagaaaaaacgaaatgaccatattaaaattggaaaaatattctactccacatgtaacttgtgagaaatccaagcctctaataataggaaacatgaccagagtcaaaatggattcatttgaaatcaatcataaaaatatctaaacaatggaatggtaacttaaattccattttgttccatcccatttcactactcaccatcaaatgtccaaatataacctcggtaaataaaccctcgtgccggattcattgattggatttccgtctattttggttgtctcaactagcttgaatttaaatgaaagttggtcctaaacattccttgcttccttggccacaatatgtagagactgatttttcgataaccttgtgcttatgaagacatttaattttgtatcttgaggaagcaccttatatgttcatctgctgaaggctcaacatgcagtttnngtttgcggcggttgcaattaaatattgatggaaaaggggactatatggcttgtaaactggtggtattactagaaacagtagtttgccaactgtnttcctgcaaacccagntcttgctttcactctgccnnnnnnttggggtttctttnnnattaccatnnntanggagatgaaatttccccaanntantattgnnta

SEQ ID NO: 47936 - DNA, 315 bp, Glycine max
  Clone ID: PAT_MRT3847_143293C.1
tcaaacataagaggcgatccatgcagcagcctgccgttcttcctgctattttggaacattctctccttctatctcctccagcgcatccccagggagcacccgcgcttttttgtgcgaccctcatagctgacttttatttttggggacggtaatttgctcggatacgctgagatttttcgcggctttacccttcaaaagagctcctttaccaaaaatttgagtcgatgaatatgttggcatcaggatcctggaggcatctcacaggcggtgatgacatccgtacgagtgctcattgcattcataagccaaaagcct

SEQ ID NO: 47937 - DNA, 1469 bp, Glycine max
  Clone ID: PAT_MRT3847_143294C.1
gtgattcagtaagaaaaatggctgacaaaagtgcacgagacatgatttctcctagcggtggtgtacatattatactccctgattattattctccagagggaatgggcttaattgttcccaaaactaaggatggacgtgttgttttcatgctaccatggttgggacgaacggttgctggaactacagattccaacactagcattacctttcttccagaaccacatgaagatgaaatacaatttatattggatgccatctctgattaccttaatgttaaagtccgccgcactgatgttctttctgcctggagtggcattcgcccattagcgatggacccaacagctaaaaataccgagagtatctccagggatcatgttgtctttgaggatcaccctggtttggtcaccattactggtggcaagtggactacctatcgaagcatggcagaagatgctgtcaattcagctataaagtctgggaagttgacccccgccaatggatgtatcaccaacaatatcaggattgttggtggtgaagggtgggatcctgtttcctttaccattctttctcaacagtatatgcgcatgaaagtcacatataggggtaaagttgttcctggtgtgatggacactgcttcagcaaagcacttgtctcatgcatatggaacattggctgaacgtgttgctgccattgctcagaatgaaaatttgggcaagcgacttgcccatggttacccttttttggaggctgaggtggcctactgtgcccgtcatgaatattgtgaatctgcgattgacttcattgctaggagatctcgtcttgctttcctggacacggatgcagcaggacgggcattacctcgtgtgattcaaatattggcagctgagcacaaatgggacaagtcaaggcagaaggaagagatgtttaaagctaaagaatttttggagacttttaaatcctccagaaatgctcaattctatgatgggaagcacaattagctctggatttgaccaagaagggagtgaccttccaaacatggtattattgcctatagtttccgtgggtcaataaaggattgctgctacggtcagtagcataatacatctcagaagtcaattatttagtgaatttgtcaaagctgcctggcaaaatgctttcaaattagtgttttctcccagttctgtgccacgtttttttggagcgatgtgagtcacattcgtgggttgtggctgttgttggtatggaagatattaataaaaaagaagtgtatggtgaaaaggtaaagaaagagaatgtgacagaggacctcttgtgaagagatcctttttttttttctctttcaaacaagtccttcggaaaaatattgtccatttattggtttagacttttcattgttgtaaatatttggtgggacattctgaaattaacttgaaatataaatagatataaattaaaattatactaggaac

SEQ ID NO: 47938 - DNA, 481 bp, Glycine max
  Clone ID: PAT_MRT3847_143295C.1
ccgactcgtgctggggatcaggacgactctgaggagcaccctgtttcggtcaccatgactgctggcaagcggactacctatcgaaacatggcaaaagatgctgtcaattcagctataaagaccgggaagatgacccccgtcaatggctgtatcaccaacaatatcaggattggtggtggtgaagggtgggatcctgttttctttaccattctttttcaacagaatatgcccatgaaagtcacatataggggtaaagtggttcctgctgtgatggacactgcttcagcaaagcacttggctaatgcatatggaacattggctgaacgtgttgatgccatcgctgagcatgccactgggctaatgaaccatgaaatgggttctgggtgatgatatccagaaatatagccagacataggcgtcaaccctgttgtttgaccttgctggttgtaaaacattacaagatccattacatgaacgaaaa

SEQ ID NO: 47939 - DNA, 357 bp, Glycine max
  Clone ID: PAT_MRT3847_143296C.1
ctaacagatggtgctccttcagaaagtggggtattttgcacatggctccacatctgaggctaagattatgtgttcccttggtgtttctgaggataggctttctcttgaattctaatgcggaattggatcatcaggattcacataaaggtctagctgctcctcataaagatgggcggacagatgtacttgagggccccggtgtagagaatgcttttaatttcgagaatgccactagcgtgctgggtagtcggaagggcggaaacagtaaggtttgcggctacgaccgtagcctatgtttactcatggcgatggcaggtgccactgggttatgtgccgagccattcttctttgtggagc

SEQ ID NO: 47940 - DNA, 411 bp, Glycine max
  Clone ID: PAT_MRT3847_143297C.1
tttttcaaaacaaaattttaaaattctttaactttcaataaaataacacatgcacaaggcaactcgttgactacataaatacattaattaccaaaggaaaaacgctaacatatactaatataacccaagatctagtcaattagtttatgaccatgaccttgcaattaactattctctcatgacttctaacacgtcacaacttaccatatatataatatactatatatatatataccaaaagctgacggggtcctcttgttattgccatgaccaactccataaaaaagccaacacaaaaacatgaattaaatgccaatgcatgaatcattattacaattattattatatgtagtgaatcatgatattaattcacaaccctgcaattccttctgatctccccactggacccag

SEQ ID NO: 47941 - DNA, 264 bp, Glycine max
  Clone ID: PAT_MRT3847_143298C.1
catggcttcctcgtgtgcttcctctgccattgcagctgttgccatctccacaccaaggtcccagaagaatggatcactcttgggaagcacaaaagcttcttttcttagtgggaggaaactgaaggtgaacatctttacagcaccagctggagcactatccaacactacagtttgcgcaaatgttgagcctgataggcctttatagttcccaggcagcaccaattctccatggctagatggcacattgtcaggagatatttgatt

SEQ ID NO: 47942 - DNA, 761 bp, Glycine max
  Clone ID: PAT_MRT3847_143299C.1
tttatctcgtccgctggatcttaagaagccaagatacaaaaactttgatgaactatatctttactgttactatgttgctgggacagttggtataatgagtgttccaatcatgggcatttcaccaaattcccaagccacaacagagagtgtatacaatgctgccttggccctaggcattgcaaatcagctaaccaacatactcagagatgttggagaggatgccagcagaggaagagtgtatcttccacaagatgagttggctcaagcagggctttccgatgaagacatttttgctggtaaggtgacagacaagtggaggaacttcatgaagagccaaatcaaaagggcaagaatgttttttgatgaggcagaaaagggagtgaccgagcttaatgaagctagcagatggccggtatgggcgtctttgctattgtatcgccaaatattggacgagatagaagctaatgattacaacaatttcactagaagggcttatgtgagcaaagccaagaagttactttctttgccagctgcatatgctagatctatggttcctccatcaaaaaagttatcttctgtaatgaagacataaatccagcaccttatggcattctgtagaaaaatggataaggaggaccacagaaaatggaaaggcacaatttgtatatgataaaacaaggcatgatattagtcaatattggattttgatattcatatttccccgtatttttttacataaaaaaagtttggactaatatttt

SEQ ID NO: 47943 - DNA, 347 bp, Glycine max
  Clone ID: PAT_MRT3847_14329C.1
tcggcggccgcccttttttttttttttttttttataggtacatatgaacccttgtatatatgaaaatcagtggtgctcaacacttgcatgacccgcatttccagacaacagccctactgacgattttgcggaaccctccgcgttatacattccaaggccagctacaacccggggaacccacacaggtcttacacacgatgaccctacgattttttagagatgcctttggggctctatgcgattatatctataccctacatgtagcttaggtatcactataccctagctcggaaagcttatgaggggcctacaggatgctgggcagggaggtttacttactcgatgct

SEQ ID NO: 47944 - DNA, 592 bp, Glycine max
  Clone ID: PAT_MRT3847_1432C.1
aggcgtccgtttggattactgttagcagtttttttcatatttgtgatcatacttttgggagtctgtaaattgatgacagtgcaatgcgcctgatgtttgtcggatcttgagttgtgcttttctcatttcaatgttgcctctccattgtttatatttaaataggggagggggacaaaaagttttgagtttatgacaatttatctttcactttacaccttcctgatgagcttgtaaaaattactctatggaccgaaaaataatgatgccttaatgtatgtaccaaatgggataggaactgttgtaggaaaaatacaattggtatcatatctctattataaaggttcatccagggaagagtgcataaaaccaaagatggcgtcttacaaatgatctgagccgccctgctgaatgatggcaaagtgaatgtataaccaaatgcacagtgtgtgatcaagacctatggtcttcacatcagtgcgaggcggttctttgaattttgcaagcgggcattggggttgtctgaaatattttccatgagtcgaatgaatgaaaagtatggccccgattatgaattttttacaaaaaattcatg

SEQ ID NO: 47945 - DNA, 2099 bp, Glycine max
  Clone ID: PAT_MRT3847_143300C.1
ccacgcgtccgctcaaatgccgtcacggatgtagagagcagatagagaattccccatacaaaaaggggacattctttttatcctatatataaaaagaagaaagaaaaagacaagcaaaaaaaaatagtattaaggtctggaagagtggagagagtttggtgggtcatgtcatatggtgtgtgtgagtgaaagaaaattgctcttagtggctgttgttagtttttgctccttccatgatgttggtattatgctcaattaatgggaagctcttctaagtgggtcactgcagcaccacccaacaggttagggaagatagcacgtatatagataggtttagccaacttcataagttaatgctgtttgcaattttggcgttggaatgaatgagaaatcgtagcaaacactgtttgttagatagctttggtagaacaagttttgtagttgctggaactggggtatccgagactttcataggattgaaggcaattgtttttcatgatttgtcagtgttttcaatttaatggttctctgaaggattaatatttgaggaataggaagtcaagaaggaaaggaataagctccacaggcaggttttaagaacacaagagtttagtcatgtctgggacattattatgggttgtttcctcccctggtttagaggtttcccattccagtgggttacttgattctattcggagtgtgaagttcttagattcctcaaaggccatgtctcgagattttgggtcgattagagcgaagctgggtaaggaaaagggatggagactgtgctctttgagtacagatatgaagtacacatgtgttggtcggtctggcttagaaagtgctagcaacttccctctgatagccaatgtgcttgtaaacccagcagcaggagaagtggctgtctcgtcagaacagaaggtctatgatgtggtgatgaagcaggcatctttggttaagaggaagttgggcgctgcgggtgaacttgatgcaaagccagatattgctctgcctgggaatttgagcttgttgaatgaagcatatgaccgttgtggagaaatttgtgcagaatatgctaaaacattttacctgggaactctcctaatgactcccgaaaggcgaagagctatctgggcaatatattgtgtggtgtaggagaacggatgaacttgttgatggtcctaatgcttcacaaattacgccaactgctttggataggtgggaatcaagattggaagaacttttccaaggtcgtccatttgatatgcttgatgctgctttatcagatacagttgccaaattccctgttgatatccagccatttaaagatatgatagaaggaatgagactgggtcttaagaagccaagatacaaaaactttgatgaactatatctttactgttactatgttgctgggacagttggtataatgagtgttccaatcatgggcatttcaccaaattcacaagccacaacagagagtgtatacaatgctgccttggccctaggaattgcaaatcagctaaccaatatacttagagatgttgaagaggatgctaacggaggaagagtgtatcttccacaagatgagttggctcaagcagggctttcagatgaagacatttttgctggtaaggtgacagacaagtggaggaacttcatgaagagccaaattaaaagggcaagaatgttttttgatgaggcagaaaagggagtgacggagcttaatgaagctagcagatggcctgtaagaaattccaaaaatttatcattctataaaaactcttatgtgcttgaaattttaagaataaaccatcaatttatccttattaaagtattttcctctctcaaaaaaggtttcttctgtaatgaagacataaatcgagccccttatggcattctgtagaaaaatggataaggaggaccccagaaaatggaaaggcccaatttgtatatgataaaacaaggcatgatattagtcaatattggattttgatattcatatttccccgtatttttttacataaaaaaagtttggactaatattttgttactttagagttaattttgatgcgagttatgaattatttgaactgacc

SEQ ID NO: 47946 - DNA, 561 bp, Glycine max
  Clone ID: PAT_MRT3847_143301C.1
ggctcgagggcggtcatgtctctggcatatcttcaagccgaaacgtctcaacgacacggcgacgacatctgggcgctgagatggacacacaccaaccacatcctcaccggcgccgccgatggccatgtgcgtatattcgacgcgggcgagccttccgtggcgctacacgacctcgctgcgcatccgctggcagagacgtcgatgagtgtgagcaaggaccggcggaaggccgtgagtgcaagttgggacgggacggtcgtgttggttcatccgagtgaaggcatggtgttggggaggttggcgaccggtagagaagaagtctgagcatacgcgtgcgccctgcatcctgaagcaacctcctacgcctggtctggccggtccagcaaagtcgtcatccgacccttgggcctagtggacgattccgtcaatggcgacagcgccgcggacgaagacagcgcatcggcacaggttggcgcatgcccgctgagcggcgagagtacggtggtggaggctggcaaaggcaaattcggcatggcattgaaatattctgccgatggtcgc

SEQ ID NO: 47947 - DNA, 1591 bp, Glycine max
  Clone ID: PAT_MRT3847_143302C.1
ggtccggattcccgggtcgacccacgcgtccgcaccgcgccaggtcggacgcgtgggcggagtcgtgggcgacacgacatgccgtcgatactgaaactcttctccctcccaaaacccttaaccctcagaccgcaattttcgcgccacccaataaacccaaacccgacaacctcggaccgtggcctcgtattccacgaaaaggtgctctaccttaaagccctcaaagtgaaccccaacaaggcctttcgcttaaaccccaccctccgctcttcccctctctcaaccctaaaatcagtgacgcgctccctttcttcgttgggcattccacgcgccgccatgggtcgcatcctcgacatgctccccgtgctcctcacgtgcgacccctatttacaattctaccccctcctcgacttcctcctccacgaggtcccgatcctctaccccgacgtccacctctccatcctgcgcagccctagattactcgtttccagcgttaacaaccgattgcgaccaactttacactttctgaggaaattagggtttaatgggccccactcgctcacgtgtcagaccacattgcttctcgtttccagcgtggaggacacccttttgcccaagattgagtttttgaagggtttggggttcactcacgaagaggtggctaacatggtcgtgaggtcacctgggttgttgactcttagtgtggagaagaatttgaggcccaaggtggagtttttcttgagggagatgaatggggatgttgctgagctcaagaggtttccgcagtatttttcttttagcttggaacggaggattaagccccggtacgggatgcttagacgggttggcgtgtcgatggatttggaagatatgttgaaggttagtgatggcgggtttaaggctaggttgcttgatttgaggtttaagaaacttgagataggagtaggacaacatttgtagtagtaggttaccgaggagtagttgtcgttgttcttgttggcaaggttttataaattggtcagcaactgcaattttggcggcaacctcgagatctttcgaggatgcaagcgactgcaattgcagctgcatttgttcgcaatttcctgcagtgtcaaggatttcggcatgactacgactgcaatgtgtaagtcaaaccttcgatgttggttttgctaaaaacatgtgcattagtgcatgtctgttaagttgtggtagacaaagggattcttgtgattcaaaggaaatgagattttggtttatggaaaacaaggagttggatttaggtgcactttagagagtgatgtacattattggaattgcggaatgattttgatggtaaaatatatgtgtatgtattatgaactatggaatttgtagaatagtagaatataaactgcctactttctaatcaactagtataagtagatactttatcccttgaaaaaaaaaaaaaaatttaaaggagttaataaacaaaaaatatgtatcataaatcccaggtatttagtttttaccaatcaatggatccattccagttcccctaccctttggctgggaataaaagaacatacgtagtttgtctccaggttgt

SEQ ID NO: 47948 - DNA, 646 bp, Glycine max
  unsure (1)..(646): unsure at all n locations
  Clone ID: PAT_MRT3847_143303C.1
acgcccgtacccgtaagctttgtagattcggcttcgnaggttttactttctccctccaactgtnnnttcctccaaccactacanncctactttnntctttacttncnntcttctctccannactcaaacatttatnnttcttccttttctccgacaanngttctatnnatcttcccttccctttcattnnncatctctctgtttaatcanantctnnttacccnnttccctctnnttggtttgggtgatcaacccgtntnntctttcgnnngttttcttctagttgctactggtaaccccaaccccaagttatgtcttcgacagggttattgggtgaattggggttgaagctatgaatcttctcnnagctgagggatatggatagtggtgagttctgagcctcaagttctgaacagtcatattttctggtaaacagatggatgacctaaacaattgcaatgcatatttagcagaagtgacgaataactctcaggggcatgaagaacaaaagcttggaaagagacttttcacaatttagatttccanttccagcacacctctcccgcgtttaatgggacaaaattccttgattgtaaaacgatgcaaccagcattatcctctgagaggcttgtctgaaaaggttagt

SEQ ID NO: 47949 - DNA, 641 bp, Glycine max
  unsure (1)..(641): unsure at all n locations
  Clone ID: PAT_MRT3847_143304C.1
ttcagctctcaccacctcaaccaccagctccaccagctaacaacacttcaccaccaccacagcgaaattcgccaccccctccagctgccacgccgccccggacctccccaccgcaaacttcaccatcccctccggctgcaccgcctcctagaaactccactaggttgccgccaccggttaattcaccaccaccgccggtggatgcacctccaccgaggtcatcgtcgccaccagcaccagcaccatccacccctccttctaggactagtcctcctcccacaccaagttctcaaccagctccaccttcaaattctacaccaaggtcatcacctccatcgccaccttcaattactaatttggccccatccccgccatcacgaattttgtcatcgccaccaccgccaccggctcagaatgggacagaaaactcaagccctgatggaggtggagatggaattggcattggtggtgtagtggctattagtgtggtggctggatttctgctgcttggcttcattggtgttcttatatggtgcatgaggagaaaaaaaagaaaggtgcttgtgagtggtgattatgtcatgccatccactcttgcctcatctcctgaatccgattcatcctnttttaagacacactcc

SEQ ID NO: 47950 - DNA, 246 bp, Glycine max
  Clone ID: PAT_MRT3847_143305C.1
gaggagaattggttgtgataggctaaggaagtggcgacggagtagtgaacatggttctcgattgattgattcctattatttgcgtttgcagaagcttgagaattgatatttattggtcgctacctcagaccgactctcagtgtgtcacgctctcctttcaattcctgcataataaagttctctccattctctagttattatctccactcgagaactttcaagcgccgctctccttctcacatactc

SEQ ID NO: 47951 - DNA, 174 bp, Glycine max
  unsure (1)..(174): unsure at all n locations
  Clone ID: PAT_MRT3847_143306C.1
agctcggaaggcggctcgtttgaaaaacctgtatagagcacaattacatggttcagcttcttcaagtgtcatccatctgtcgntnctcgatctccagngccccactgttccaactccaactttaaccaaaccagctnctgactaggctctctccgcaganacgacacttttggg

SEQ ID NO: 47952 - DNA, 931 bp, Glycine max
  Clone ID: PAT_MRT3847_143307C.1
ttttttttttttttttttttttttttgctttttaatcaaaccacaatttataagtgtgcatttccagaacaattcaaagataccaactgcacaagtaacagaaatttacatttttgaaactctaagatgtccatatcctcatatttattactaattactaatactgcaataatgtattagcgacatatccatcctcatgtttagctatttatatcataccgtatatatcaagacttataatgaaagtaaataagttgtacacgatacaaaactaatcaggatcattttcttaataaatatttttagaaagaagaaaataataatgaattcataaggtaaaatcacctctttgattctttttattttctttttctgtaaatatttattgagaaaattatactaactagttggtattctaactaatcaaggataagggtggttcttagaagcagaagcagggggtgtgccaggggtgtgacgggggccgaactcaggtgggaatagaggaggcaaaggagggaaaattggttttggtggtggaggtggtggtggtgatggggtcaaacctggtattactattggtgggaaagggggaaacaaagatggtggtgggcttggaggaggctggaatgggttagggataagtggtggtgggcttggagggggctggaaaggattaggaaagagagttggtgggcttggagggggctggaatgggttagggatgagtggtggtgggcttggtggttggaatgggtttggaatgagtggtgggcttggtggttgcagtggatttggaatcagaggaggtggctgaaagggatttggaattaggggaggaggctgaaatgggttggggaccaatggtggtgggaaaaatgggtttggtggaaaaaagaaatcttcagctaaatttttgttagcctcgtgc

SEQ ID NO: 47953 - DNA, 231 bp, Glycine max
  Clone ID: PAT_MRT3847_143308C.1
acgcatatagaacgattctatgcatacattcttttaatctccttgatgccatttatgggccacagcacaaatgaactctgaaacctcgaatacaatgtgcacctataacctaatatgacattactatagccacatcattgcccgaaatctcggaggaatatcatacaattttcttaagcacatggcgaaacttttttctgaccaactgggttttctccaaagggttccccc

SEQ ID NO: 47954 - DNA, 198 bp, Glycine max
  Clone ID: PAT_MRT3847_143309C.1
attgttaactaacttttctcgggaggggatcaataacagcaatattcccttaacaactcaacccgtaatcatgcaaccattgttagacatgaagtttattaatagtgtaacttcgcagacactaaatacatggtgcccacagcatttgtgaacgcaccctactcttggggaacatttagatcaacatgccatctcact

SEQ ID NO: 47955 - DNA, 913 bp, Glycine max
  Clone ID: PAT_MRT3847_14330C.1
cagaaaaatgcatttctctctctgtgcaaatttagggttttaaacctttaaccccatcaaaaactcacactttttgtgtcttactgtgattttcccacctcgcgcgatatggtgttgtcccttcccctcgcgcgatatggtattgtccctttccatttcccattagcttcttctcctcacgcccgctcatgagccaccatcgcaacaaccacgctgcgctcactgtttcaaccggcgatgcgaatcccgatgactgtcaccaaccggtcgatgctcccctttccgcagcagaacagattagggttagggtttcatcggaggacaacgcggcacccgcatcctccaccgccgatcgcttcgaccgcatcaactaccacgccgcgtcgcgtagaacgtcttaggtcgcgacttcgaaatcggtggcatggtgagggggaagttgaaatcgcacgcgtgaagacgacagaagggcggggcacatatacaacgaagctttcgcgtcttccgcggtgcgaagaaccaagagggagggccacgtgttggtggcgttcttcggtgacagcagttacgggtggttcgagccgtcggagctcatcccatttgacgcgaatttcgcggagaaatcgcggcagataagttctagaaacttcctgaaggccgtggaggaggccgtggatgaggccagtagaagatgcggccttggattggtttgtaggtgtaggggccccgggaattttcgcccaaccgatgtggaagggtattattctgttcaggtgccggattatgagcctggagtgtattctaatgctcagatcagaagggcgatgagtgagtttggaactgtggagatgctttcttttgtgaagcaattggcgatgaatccacatggtggtgatccgagaagcattgattt

SEQ ID NO: 47956 - DNA, 2307 bp, Glycine max
  Clone ID: PAT_MRT3847_143310C.1
tggttggtgagtaagcataattgagcatctgtaagcatacatcagacactgtcttatccttttttgtgaatgatgatgaaaatggggaaggtcttactgacaaggactttttggaagatttatgggatagaatataggttttatcaagatacggatggaaggtagacatctttccaaaacctcatctttcatttgaagtgcagctgtttgttgtgaagtctcatgaatttgtgctaagatgttggaacagcttggcaggcctgatatcagtcccttcaggagtgtttattgtgcaacagaagcatgtagcatatttaaaaaatactcaaagtaaacaactgctaaacatatttcctcctagtaatattgatcaactagagtctatagacagacttgttgaggaagagtatctcctagatgtgcttctgttctgcaaagctagtcgaaaggaatgtgcttctttcatggttggtctgccagtttccttcagatatgagtacctcatggctgaaacaatattctctcagctgctgatgctaccacaaccacctttcaaaccagtatattacacactggttattattgacctttgtaaggctcttcctggagcctttcctgcagttgtagctggagctgttcgtactctctttgagaggattgctgatttggatatggagtgtcggacgcgtctgatcctttggttctcacaccatttatcaaacttccagttcatctggccatgggaagagtgggcttatgtcctagacctcccaaggtgggcccctcaacgtgtctttgttcaagaggttttggagagggaagttcgcttgtcatactgggacaaagttaagcagagtattgaaaatgcacctggtttagaagaattgcttcctccaaagggtgggccgaactttagttttggtgcagaagatgataaagaaagcaatgaacatgtactgtctggacagctcaacaacatggttaaaggaaaggcacctgtccgtgaaataatctcatggattgatgaaagtgtgcttccaaataatggtctagaagttaccctcagagtggttgtacaaactcttctcaatattggatccaagagtttcactcatttgatgactgtcttggagagatatgggcaagtctttgcaaaattatgtcctgaccaggataagcaagtcatgctgatagctgaagtgagttctttctggaagagtaatacccaaatgacagcaatagctattgacaggatgatgggttatcggcttgtttcaaatctggctattgtgagatgggtcttctcagcagagaatattgagcaatttcatatgtcagatcgtccttgggagattcttagaaatgcagtaagcaagacacacaatcgtatttctgatctaaggaaagaaatattatctcttaaaaagaatatttcatcatctgaagaagctgccaaggaagcaaaagcagagttagatgctgcagagtcaaaacttacactagtggatggtgaaccagttattggcgacaatcctgctaggttgaatagattgaaatcacatgctgaaaagacaaaggaggaggtggtgtctcttcaagaatctttagaagccaaggaagctcttctttcccgagcaattgaggaaaatgaggcattgtttctcttgttgtacaaaagcttctcaaacgtgttgacagagcgccttcctgaaggatctagaacactgcatgagttgaagtctgcacaagttgatgtggtgatggcagtggaccctgaagagccatcgtcaatggaattagacaaccagaatcagagacctcaaaacagtcatacaaatggcgagaagaaaggtggtgcttataatgtaggtgaaaaggagcagtggtgtatcaccactttgggctatgtgaaggccttctctaggcagtatgctgctgagatatggccccatgttgagaagttggatgcagaggtattgacagaagatgcacctcttctttttcggtcagctgtttattctggtcttcgaagaccaattcacgaggcttgatcaatttgatatttcacttctaagttgtgtttttttagaattaactaaaattcattctttagtctgtcagttaagcattttcttagtcaaccaaaagcgtaaagctgtatgcaattgtaatgtaagtgacaaggttggtatgacgagtctccgctgtttagattctaacgggaacttgaccactgctactgtacattatttcgattatagctactaatttattggaccttaaatacaaagaatgaagtttgtacgc

SEQ ID NO: 47957 - DNA, 443 bp, Glycine max
  unsure (1)..(443): unsure at all n locations
  Clone ID: PAT_MRT3847_143311C.1
attgatcttgttgagacacgaatgtgaagagaagacgggacttgaccatctcatcaaaagatggtatatgtttatgaattatatgtgctatgaagatagacacattatataaagtgtctgtgtattcctatgtttatcattcatgtatatgtcaagtcaaacttatgtgtcatctatcatgtctgaattgggtgccacaagcacgtatacaccctaataaaaaatacatttctatcactaacaaaacaaaaaactccaaactagctgccgttaacccaccaaggattcccaaatcaatctgcttctacaacaaacacataatctcacatgatcaatgaatattatggcttggaccaatctgcttaccaacanttgctacattttaccaccaatacatccttacaccagcagctatcaatgctcttcgatccttcagaacaacc

SEQ ID NO: 47958 - DNA, 286 bp, Glycine max
  Clone ID: PAT_MRT3847_143312C.1
aaacatagaagaagttaacaggggtaatgttggaatttttaaaaaaatgttgggggtagaacacatattaactatgcaggaaaaaaatcccatgcaaatttgcaatcaattgagtcaattgctttcttgattcctgttttaaacccaagaccttgggtgttactttgggcacccaacaccccaggtgaaaaggctaaaatgtgcttcacccatttaatatatgaatgaacagtgacttgtccgtacgagtcacttgttcactcctctcgcgccgctacttcgtctt

SEQ ID NO: 47959 - DNA, 366 bp, Glycine max
  Clone ID: PAT_MRT3847_143313C.1
gaatagcaaattggtcaactaaaggcccaattgcaatttgggccctttgaagatccccccttggctttattttattttggaaaatattattatttgggggtccccaacagatgggtgattgaagcccaacatggggaaaggggccccaagaaaggggtcatcattcatcagccatagcccctggggggaacagggcaccctttttttggggattggttggtgccttgacctccaccctttttcaaaaattggggaggggattcctttggtttggaaaacctttttggtggaaggattttttggacaattttttcctttaggtccaattggtttgccttttttgattcccggcctaaacaagcttgg

SEQ ID NO: 47960 - DNA, 294 bp, Glycine max
  Clone ID: PAT_MRT3847_143314C.1
atgcttcttacactggaacagaggtgccacagtgggctttcgttgatgtcgaggctggcaacgggcccacgtgggatccgaagagttctcagtgtaataccgcacttgcgaacgctcaagtggaggaaccactcagcgtagagaactatcgccaaatttcttgacagggggcatttctacagcaggctgtaacttgcagcgcactcatcgtattgatggaatgattgatatggtggccacggatggtattcctgactatacaggtgtataagagggctgagccacgaactggac

SEQ ID NO: 47961 - DNA, 325 bp, Glycine max
  Clone ID: PAT_MRT3847_143315C.1
cctgtctgttacccccttctctttctcatccattgtttcctcattttctctttcttccctcaccaaccaccattcctcattcctcccttttttcccttttgattattttcctcagaaggttggataatgggagacccatttggtaaattttaaacctttgggagtttttggtacctgggtcgatggaagaatggactttgagaggaaggtggtggtgttgggtttcatttgattatgattttttgctatgacatggaaggctgggttatggatttaggttcattgactacgaccatggtcatcggatgccgattccagctgtggg

SEQ ID NO: 47962 - DNA, 263 bp, Glycine max
  Clone ID: PAT_MRT3847_143316C.1
atacatcagaagcgcttgccttttttttttttttaaaaggaacttttctttcttggaagactttaaaagcagtacaccagatgctggtaattagaataacctggccatcattttggtttttaacaaacaaatactactacaaaggggtaattattgtctaaagtaatattccttagccttcttcatgggtgtgttccacattggattctgcgcaccggtgatgtcacttaatagcacttatgatactggctagtgagggaatc

SEQ ID NO: 47963 - DNA, 352 bp, Glycine max
  unsure (1)..(352): unsure at all n locations
  Clone ID: PAT_MRT3847_143317C.1
agcacggaaaacggcacgagaccaaacacatttgttcgaaaacgcaaacaacaaaaaacaaggggggagccaaggaanagaagcggaacacgaaggaacacaaggacccccaaaaggagcccacaaccnaaagcaaagccggaacaggcgcagaagacaaganacacaggcaagcaacaaacaagggacccccagacagaccacaagcaggaggagacaaacaaggcacgaaacaaaacccaccagaaaaacccacaaagccacccaaggaagaacacaagacgaaggcaagacacccaaaaaaaaaaagcaaaggaagcaancgcacagacaaaacgaaggagcagaggag

SEQ ID NO: 47964 - DNA, 182 bp, Glycine max
  unsure (1)..(182): unsure at all n locations
  Clone ID: PAT_MRT3847_143318C.1
tgcncaggagantgatcgccanatcgcccctctcacatactcccacgtcaaagggaaatagggtctccgtaggaggatgcggacaatcgtcgagtctggatgttcgcacagatgtcgcggagactcgaaccgttcancacggnacttcncacgactctcggcgtttccccgatcttgactga

SEQ ID NO: 47965 - DNA, 658 bp, Glycine max
  Clone ID: PAT_MRT3847_143319C.1
gactgcactacttgttccagcctatgagcctgtttttgaggccttgatcaagtctttaacaaaagtcaagagggtcactggtgaagattttggagcattggagttttgctttgatgctcaggggtttgatcatagtgtagtgccaagattagtgttccattttgcaggaggagcaaggtttgagccaccagtgaagagctacatcattgatgtggcacccctagtgaagtgcattggaattgttccaatcgatgggattggtggtgcatctgttataggcaatattatgcaacaaaatcatctttgggagtttgacttgtcaacaaacactgtagggtttgctccttctacctgcacttaattagctattcttgtaatcttgtgaatgtgataatttccttttctttgtttttttttactctccttccctcattttcttgcgggcacaagcaagtcacattggtgcttgtcttgttcgaattggatttttattctttttaattattttctattttttcacctttgtaaaatattacgtgtaaacatgtatcatacatctaattcaagttcttatgatgttaataatacgtggctgggccacagatttccttttagataaaaaaaaaaaaaaaaaactcgagactagttctcctggtgc

SEQ ID NO: 47966 - DNA, 341 bp, Glycine max
  Clone ID: PAT_MRT3847_14331C.1
ctgaccttttccatgttcagtaattttctgtttttagcaaattaaactagcagcgtcattgttaggactcgtcaaagatgggtggagacccagggctgaccgatatcctcaacagagggggacgccatcaaactaaacccccagtgatggtctttaacactgctcataagtactactccattgacggcgttcttactcatggcaatgtcactggactcataggaccccacctcaacgtagcagactcaacacttgatatcctttctgatatcgtgtgcctgaaagtctccctacatctcattatagctaccatgactcttggtgatggaaaaggacatgca

SEQ ID NO: 47967 - DNA, 205 bp, Glycine max
  Clone ID: PAT_MRT3847_143320C.1
cgcaacagaagcagccacctcgtccttcatggggacgcgcctactgtcggcccattccggggcggtgcgggtgcaagcccgattcgagtttcgcaagaagaaagccgacgggccgtagaaactgtacacggggtcgggctctagctccgataggcccctgtggtatcccggcgccaaggcgtcgcgtacctacgatgggagcctt

SEQ ID NO: 47968 - DNA, 341 bp, Glycine max
  Clone ID: PAT_MRT3847_143321C.1
ttttttgtaatattttttgttatttcttaaaatatctttaactaatactacactaaaaattgatttgaagcaaaagtctttcccctgtagattggataaactacacagattaaatgatgtcatagtgcaatgcttgaacacaaaataacatacataaaaatttagaatttctgcatcccgtaattacagtggaaccattaaagttcaattttttactcaaagatccatcacaaattgtgaaagaactcaatatagtatatgtgaaatcaataaactttaggaagttatccatgggatgcagagagaaaaattgacaaacacaagacaatagctacttgaga

SEQ ID NO: 47969 - DNA, 730 bp, Glycine max
  Clone ID: PAT_MRT3847_143322C.1
ttataatttgggtgcaggggttgctcgggggggcaggggttgctcgcccaggcgagctaacctgccacattttttttttgagaggaacattaaccatgtcccctcctcccttacgggctagcgtttgcctacttgaacctactaaaactagaattaggtgttgattacttatttaaaacaaacaatagtaaaagaaaccacgaatgcaaaggatactgggctaccttgcagcgatgttctctgcttgtttagcgccgggaaagggcaacgatcggtcggtcgtgaccctatccccatttgcatccatccccatgtacctgcaagtaggagacaaaatacatggccaatcgtgaccggtcatcgtcttaccttggttgatttctgccattgacttgtcttgacttctgaccgtggcctgagacgattctgctccttgctaccacaagatatgcatgtgcatgtgcatgtcgggccgtttcccatgcgatgattttcttagtgaaggctggttaaattcaattttaaataggcatttggggcatcccatgaaccgagcgaagagggctcaggttataacaaactaaaacacaaggtttgaaaccaaagggaggactgaaacctcgcccatcttttcttttcaaagaaacgagacaaatacagtgaatgggaatccctagaggaacccaagaagaacgagaaaaactcagaaaaaaaaaaaaaaaaaaactcg

SEQ ID NO: 47970 - DNA, 336 bp, Glycine max
  Clone ID: PAT_MRT3847_143323C.1
gaggggcctaagagggaaagtgcgtgtttggaggcgttggatttagagagctttttattaggtaactgaagatgaagagtgccacgtggtggagtgttgaaggagacgggccggatctgcggcctggtccctctaatcgaacggctataatggaaaaggacttttcctgaacacgtggaaggaaaccgtccattccatgtttccaacaaagtctaatagtaattcatgtgaatatgaggtgctgcttctggttccgcatcctaccagaagctgcaaatgcctcttatctaagggatattgaataaactcgtccttaattacttttctttctgaaaa

SEQ ID NO: 47971 - DNA, 157 bp, Glycine max
  Clone ID: PAT_MRT3847_143324C.1
gttccaactcttctctcacttgccgtctagcaattggcgagggactccgctcatggcttcagattccaaaaaggatttcccttctgatgacaaagctggaacagaagagaggaaaagagccaaagatgagacttcatctaaagattctccagcagaa

SEQ ID NO: 47972 - DNA, 303 bp, Glycine max
  Clone ID: PAT_MRT3847_143325C.1
aattcctcgaggtgaaattaagatgagaaaaacaatgtgtagatcaatccaccttttttccctcttgattcttctaaccatgtggttattaatcaaggcagagtaggctgaatcttcttctcttaataagtctactatttcaatcaattaccacctttcatcatacgacacatacatcaacatattgtttttttccattactagcggtattttccctatcatccctccagtgatctacttttacatctacagatatacattaatctattctcacaccattaaaatctttcactaaatctctcc

SEQ ID NO: 47973 - DNA, 493 bp, Glycine max
  Clone ID: PAT_MRT3847_143326C.1
caggtatagttgatttcctgacttgtttggtcagaaagatgctaaagaaaatgaaaaagcaacctctcttgtttgtggaactccttttctggaagactcgaagggaatgtcattacatcaatgctgaatatttgttgagcgagcttggtcatttgaagaaagaaagtgccaattggaataactctcaaggagatgaagaaattggttcatccccaacaaaggtgtggacacgtagaagcatagctgatgcacttggtgaggatgaagctgatgttgtgattactcatgactcaagatgtcaacaagacaagcttgaggatgttattgaaggttttgcatctacctctggcagtaacagtggcaaagatgttcataatggggagcaattgatggaagatgaatctcaactggctccaaggagaaggaagaaacttgttcttgatggtgatttggaaagacaaatcaaggatctctatgagaaattcaaagatga

SEQ ID NO: 47974 - DNA, 409 bp, Glycine max
  Clone ID: PAT_MRT3847_143327C.1
cttggcgagcgtttatgatacagtgggattaagcttgctcttcctgcagaaagcactactggaacatgttttgtacaacaatacattgaatctatattggctcttcaagaagccagctcacaaggtgaatcccagacacagattcctcttgttattatgacatctgatgacacccatggacgtactttagagttattagaatcaaattcttattttggtttgcaacccacgcaagtaacacttttaaagcaggaaaaagttgcatgcttagaagataacgatgccaggcttgcattggaaccacaaaacaagtacaaaattcaggtatgaagctgggttgaaatgggttttattttttcaagatacaaatgggcttttattcaaggcaattccatcagcactgggcgtc

SEQ ID NO: 47975 - DNA, 3045 bp, Glycine max
  Clone ID: PAT_MRT3847_143328C.1
ccggaattcccgggtcgacccacgcgtccgatttattttcatgctagttcttccgtcttctcaccaccaccgtccacttccactctcttctccatcgatcccatttccatggcttcctccctcggcgacaacttcaaccttctctcgcctcaacagcaagagctggtgaagatgctattggataacggccaagagcacctgtttcgcgattggcctgctcccggcgtcgacgacgaccacaaaaaagctttctttgaccagctgactcggctcgattcgagttaccctggcggtctggaagcatacatcacaaacgctaaacggctcttggctgattctaaggctggcagaaaccctttcgacggctttacaccttccgttccaacgggtgagactttggcatttggtgatgagaactacatcaaatttgaggaagcaggtgtacttgaagctcggaaagctgcgtttgttcttgttgccggtggtcttggcgagcgtttaggatacagtgggattaagcttgctcttcctgcagaaagcactactggaacatgttttgtacaacaatacattgaatctatattggctcttcaagaagccagctcacaaggtgaatcccagacacagattcctcttgttattatgacatctgatgacacccatggacgtactttagagttattagaatcaaattcttattttggtttgcaacccacgcaagtaacacttttaaagcaggaaaaagttgcatgcttagaagataacgatgccaggcttgcattggaaccacaaaacaagtacaaaattcagacaaaacctcatggacatggtgatgtgcatgcgcttcttttttcaagtggcattctgaaagtatggtatgaagctgggttgaaatgggttctattttttcaagatacaaatgggcttctcttcaaggcaattccatcagcactgggcgtcagtgctgccaaacagtaccatgttaactctcttgcagtacctcgaaaagcaaaagaagctattggtggaattaccagactcactcactctgatgggaggtctatggtgataaatgtggaatacaatcagctagatcctcttcttagagcaagtggataccctaatggcgacgtaaattgtgagactggctactccccatttccaggaaatattaaccaattgattttagaacttggtcattacattgaagagctctcaaaaacaggaggtgccattcaggagtttgttaacccaaaatataaagatgccagcaaaacttcatttaagtcctcaactcgacttgaatgtatgatgcaagactatccaaaaacattgcccctatctgccagggttggattcacggtgatggaaacgtggcttgcttatgcacctgtgaagaataatgccgaggatgctgccaaggtgccgaaaggaaatccataccatagtgcaacttctggagaaatggccatctatcgtgcaaatagcattattctcagaaaggctggtgtccaagtagcagatccagtagtgcaggtcttcaatgggcaagaggttgaagtttggcctcgtatcacatggaagccaaaatggggtctgacttttaatcgaatcaagagcaaagtcagtggaaattgctccatttccctaaggtcaactctggccattaagggtccaaatatttttattgaaaatctgtccgtagatggggctctaatcattgatgctgtggatgatgcagaggtaaatgtgagtggttcagttcaaaacaatggttgggtccttgagaccgttgactacaaagatgcctcggagcctgaggtattgagaatccggggttttaaatttaacaaaattgagcagctggaaacgaaatactctgagcctggcaaatttcacttgaaggcttgaacatgcatccgtgtaaaagaagttatagtcctcatgctacattcattattattctttgtctcttttgtaacctgtctttctactctttggctcaaatgttctaagcagtgggatcagaagttttgcagagtttctctccgctcccctcccaatcttaattaaggtgtttgatgaggataagtgctaatgtactattttgttcataagttttgcccccacttcgattagagaaactgtttttgcattcctagctcaatgtgtaaagaatctgagtccatttgtattgctgtgtgcatatggaagacggttgacgtgcatttaataatgtgccaacaagttggactaaaataaagatcatattgattgttttacccatcatatacactggatctcaatctatgttccttggcctcgtatcacatggaagccaaaatggggtctgacttttaatcggatcaagggcaaagtcagtggaaattgctccatttccctaaggtctactctggctattaagggtccaaatatatttattgaaaatctgtccgtagatggggctctaatcattgacgctgtggatgatgcagaggtaaacgtgagtggctcagttcaaaacgatgggtggatccttgaaactattgactacaaagatgcctcggagcctgaggtgttgagaatcaggggttttaaatttaacaaaattgagcagctggaaacgaaatactccgagcctggcaaatttcacttgaaggcttgaacatgcatctgtgtaaagaagttttaatcctcatgctacattcattattattctttgtctcttttttaacctgtctttctactctttggctctcatgttctaagcagtgggatcagaagttttgcagagtttctctcctctcccctcccccccaaccttttaggtgtttgatggggataaatgctgatgtactattttgttcataagttttgcccccacttcgattagagaaactatttatgcattcctagctcaatgtctaaagaatctgagtccatttgtattggtgtgatagaaacttgagcagattcattatgtgtgcatatggaagacggttgtcggttgacgtgccatttaataaggtgccaacaagttggact

SEQ ID NO: 47976 - DNA, 1290 bp, Glycine max
  Clone ID: PAT_MRT3847_143329C.1
cccatcttccgctgttgaagagctcgagaatttgatggaacatgattatgacattgggtaagtcagtagtgaatacttgagcgatatttcttattccttttgatctgagtgatgaagacttttggtctatcaataatacttttcattgatattaaagcttagtgtatttattatctgatggtccctagttggaaaaggctttttttttttaattatttgttctctggttttacatctttatttagttagtttccactgaaaaatatttgttgaacttgaaatgtagtttggcatgttgagtataaagttgtttatagtacacgcccaacattatgaattcatgtccttaaaactgtaattacttttgtgccattcttgtaccagaaaaagatcagactcgagccgattcggctcgaggtgaaagtttcttcaactttttcaatcctcccgaggtccctgaggatgatgatgatattgatgaggatgctgttgaagaactccagaatttgatggaacgtgattatgacattggttctacaatccgggacaaaattattcctcatgctgtgtcatggttcacgggggaggctgcacagagtgattttgaggatatagatgaagttgattatgatgatgaagaaggtgatgaggatgaggatgaggatgaggatgaggaggaggaggaggaggaagaggaggaaaagaaagggaagagcaggagtaagagtggtggcagggtcaaacctggtaaggatcagccgactgagcgccctcctgaatgcaagcagcagtagtgtttggctgtgtacaaacagacctggatatgtttagtttcagagaagtaattactgtagagcctgggttatttcagtcataatttgcaatttaatgattatcatcattattattattttctgctcttttttattgggctgggggttggcggtggtatttttttaagtctctgcttgggtttctttgagttgccctgttatttggattttatttctctctggttttagtgttttctgaaaaaagaaaaagtaaagtgctaagtatatttgtgtcgttgttcatatttatagtggattataatatgaaactgtacagatctgcttacatttttctgcttctgcttgggtttcctgggttggtagatctgtgtcctgtgtgatggattttatttctctctcgttttattcattttgtattagcatttgaaactgtacagatctgcgtataatttctgaaagaaagaaaagtgataagtatatgtgtgtcgttgtccat

SEQ ID NO: 47977 - DNA, 519 bp, Glycine max
  Clone ID: PAT_MRT3847_14332C.1
cctacgcgtccgcccacgcgtccgattgtgtatggctactcagatttcggttccaacagtagcagaaattttatgtgaggaataagtatgcatgatgttctgctgccgaataaatcaagttttgtaatatactcgaagtcgtgcttgtaggtatgttgtctttgttagaaaacaaaatttatcgttactatatgtaatttcttgaaaaatgagctacttgaatatgagctagtttcagaaaaaaaaaaaaaaaaaaaaaaaaaaaaaaaaaaaaaaaaaaaaaaaaaaaaaaaaaaaaaaaaacaaaaaaaaaaaaaaaaaaaaaaaaaaaaaaaaaaaaaaaaaaaaaaaaaaaaaaaaaaaaaaaaaaaaaaaaaaaagggggggggcccttttaagagaaccaatttttttgcccggggttgggaaggaaatattttttttttgggggccccaaaattacattccggggcccggttttaaaaaccgggggggtggaaaaacccggggttcccccaa

SEQ ID NO: 47978 - DNA, 643 bp, Glycine max
  Clone ID: PAT_MRT3847_143330C.1
ccctctcttccgctgttgaagagctcgagaatggggtggaacatgattatgacagggggtaagtcagtagtgaatacttgagcgatatttcttattccttttgatctgagtgatgaagacttttggtctatcaataatacttttcattgatattaaagcttagtgtatttattatctgatggtccctagttggaaaaggctttttttttttaattatttgttctcggaaactaactaaataaagatgtaaaaccagagaacaaataattgttgaacttgaaatgtagtttggcatgttgagtataaagttgtttatagtacacgcccaacattatgaattcatgtccttaaaactgtaattacttttgtgccattcttgtaccagaaaaagatcagaatgaacagatattaacctttggaagaaaatgttgacatttatggatgacaccaaatgactgtttatggtgctgttcactactattttttagatgtattttttattgacgtgcaactgcagttctacaatccgggacaaaattattcctcatgccgtgtcatggttcacgggggaggctgcacagagtgattttgaggatatagatgaagatgattatgaagatgaagaaggtgatgatgatgatga

SEQ ID NO: 47979 - DNA, 309 bp, Glycine max
  Clone ID: PAT_MRT3847_143331C.1
tttccgttttcgcgtccgaagagggtaagcatattcctagttctaatattagtgcaggggaaaatcatgtagttcaaaaacccttaatggcactggaggaaattctgtcttataatgcaagcgaacacagaacatgaatggtgagtaaaaatagcaagcctaaagctactgcaatgcatgggggagctattgatattatcattgataggtgagcaagtgctgactgcaacatagttggtgcaatgcttttggttgatacttatcataccaatgctgaaaatgcagttacgtagtgttattggtgcgcct

SEQ ID NO: 47980 - DNA, 365 bp, Glycine max
  unsure (1)..(365): unsure at all n locations
  Clone ID: PAT_MRT3847_143332C.1
aggccgcaaatcaaagccatggccacctccaacttctctattgttctctccgtctccctagccttctttttaggtgctacttaccaaggcacactcgaccgataccgtttctttcaccttcaacaagttcaacccagtccaacctcttcttangcgggagaaagaagccagnaaaacaccccccgggggagaacaacccaccaaagggggcagcaacggcgcgcccaccccgggaacccccgggcgagccccngacgccgccccaaaccagaacggggacagcgaaaccggcaagggagccagccgggccacaacccngaaaagcaacacgggcgcacccaacaaaacaaacccagccgacgggc

SEQ ID NO: 47981 - DNA, 260 bp, Glycine max
  Clone ID: PAT_MRT3847_143333C.1
cataccccgcgcggacgcgccggaagccaacggggatacatacacaaccgcggcggcagaacacccaccgcagagagcacagggagctacacaccgcagaaagcaagccctgacgagcaacgccaggccgaaaacaggggccatgccgaacgctgcacaagactagccagaccccgccggaaccgagaacaaaaacagctacatgagaaacagagggcgaccaaccacggacgggcactcctctacggagaacacaggga

SEQ ID NO: 47982 - DNA, 393 bp, Glycine max
  Clone ID: PAT_MRT3847_14333C.1
ggcctttgctcgacctggctccctcactctctctgctccgccgccacggaggttgatttcggccaccataggccttgccttctgattttgcccaatccaagctgcgaccatcaaagctatttccgcccaccacgatacatttcatgaggtgagaaggagacgtgactgaaaggagtagctacataagttctagcttgtcaagaagctattggccaagccacactgtcttggctaagtaaaagtctcttaagtaataattttacattgcaagaaaggtattttctacatacttatgccaccagttcagaaatatgaagttgtatcactgttcaatccactagtacttttgcttttaggagtcatatgacaccataatgttggaaaagtatggag

SEQ ID NO: 47983 - DNA, 258 bp, Glycine max
  Clone ID: PAT_MRT3847_14334C.1
ctgggttcgagacgaaaaaaaccggtttaatacacgaaccgttagaagatgattttgcacaatatattaacaggacattgagtgtggcggtgcatgatttaagaattcagcttggcttctccgcgccggctgaaatccgagccgtttattcatgcagtgggggacccactgcgctgagctcaaactcagctcggcttggtgatttatacgctgaagaggagaaggagttgttggtggaggttagagtgcccacgtcag

SEQ ID NO: 47984 - DNA, 444 bp, Glycine max
  Clone ID: PAT_MRT3847_14335C.1
ggaagctgcactgacatgaaataatcatttacataactaacaatatattacctgatgctcatgacacatctcaataccaatgttgagattatttgaaaaatttcaatcaagtggataatgtttctagtatacatgcgctccctaaaactattatcagcttaccctaacttaaagcgagcatattatggagactcggctccatatataaccgcataccaagagttggtctatgacaatggacaaggagaaatatccttattcgaagccagaccacccttgaggttgactctatttactgtgcccatatatatacacatcttgagcacaatgggaattcaaaactgtactcaagatgctgatcaacaggctcggccactatcaaaggcaaccattcatatttggaggctctcaagttggccagattccaacccggtagacatcaaa

SEQ ID NO: 47985 - DNA, 149 bp, Glycine max
  Clone ID: PAT_MRT3847_14336C.1
ggctcgaggtggctgacgctcagaaccagcaggaatggcactttgatgcttggggatgagcctgtctgggctatgcactctcggtcttggacgagagcgccatgccagagacagaatgatggttcgtcctgctgaggggtctaacactg

SEQ ID NO: 47986 - DNA, 813 bp, Glycine max
  Clone ID: PAT_MRT3847_14337C.1
ggttggagttcccctaccgggaaactggattggggcgtaaatggagatgagctgaacaagctgaggaaatctgcttcctttggtttcagaaacagtggggtaactgcatcatcatcatcatcccccatagcacagccagaatttggcaccgagcaggatgtctcgtgggttcattcattggttaaagatgttccctccgagaggtctgagaagcaacaatatgatcatctcagcaaagagatgcttctttcaccatgggtagaagcaacaatatgatcttcttcagtaaagagatgctgctttcaccatgggtggagcagctgtatatagagcagaagcaaatggtagcatgagcagcagggctgctcatgacaatgcttcttggttattctgacatagttttatttatttatttaattattttattcattttgaaatgcttctactatccaatattacacaatattattagggataggatgacatatgttgcaaagaacaaagttcaggttaatccagagattcaaacgggagttccaacttctagatcagggaagacttggagaaacgttgaacaaaggatgctgaattttttttattgtataatataaatttataacccccttttctctaccgatggatgtattttctctggcaagtggaccccaaagtggttgtcattgattaagcagcacaattcttttttatataaaattgttatgccatttgatcaatgcttatccatcattattagaagtactttcaaggaaaaaaaaaaaaaaaaaaaaagggcggccaccaactagtgagctc

SEQ ID NO: 47987 - DNA, 583 bp, Glycine max
  Clone ID: PAT_MRT3847_14338C.1
ggtattgcaaggatgagactggctgcgctagaaaagtctgcttctttgcccacaaacctgaagagctacgccctgtctatgcttccactggctcggctatgccatcaccaaaatcatattcagctagtggacttgacatgactgccatgagtccattggctctaagttccacatctttgcctatgcccaccgtttcaaccccacccatgtctcccttgacagcttcatctcccaagagtggaagcttgtggcagaacaaaattaaccttactcctccatcgttgcagcttcctggtagccgactgaaggctgctctgagtgccagggatctggagatggagatggaactgctcgtcctaaaaagccctgcccgccaccaccaccaccaccaacaacaacaacaacaacaactgattgaagagattgctaggatctcttccccttctttccggagcaaggaattcaataggattggtgatttgaatcctactaaccttgatgacctgttattagcatctgccgacccttctgtattatctcaactacaaagtgggcttcagatgcggcaaagcatgaacaacca

SEQ ID NO: 47988 - DNA, 2664 bp, Glycine max
  Clone ID: PAT_MRT3847_14339C.1
cggctcgagcattcgtccgatcgaggtcttctcgatttccttctctacaacacaacgctctcttctcttgcaaccaaagtacttgttccagtgtctactctactcaaaaaggatttgggacatcatgtgcagtgattcgaaaagtaaactttcttccccaaccctcgtcgtcatggagaatagtaacattcagaagcagaatctggatggtctctacaactcggttttgcttgaattgtctgcatctgatgattatgaagctttcaaaagagaggtggaggaaaaaggcttagatgtgaacgaggcaggcttttggtacggtagaagaattgggtcaaagaagatgggatctgaaacgaggacccctctgatgattgcttctttgtttggaagcgctaaggtgctcaattatattcttcttcagaaaggaggaggtgttgatgtgaacagggtctgtggttctgatagggccactgctctacattgtgctgttgctggtggctctgaatcctcacttgagattgtcaagctcttgcttgatgctggggctgatgctgagtgccttgatgccagtggcaacaagccggtcaatctgattgctcctgcctttgattctttgtcaaaatcgcgaaggaaggccatggagatgttcctcaggggtggtggggaaagagacgatgaactcatgagccaggagatggagctacagatgttttctgttccagagaaaaaagaaggaagtgataataagaaagaataccctgttgatatatcgctgcctgacatcaacaacggtgtatatggaacagatgagtttaggatgtacaacttcaaggtgaagccttgctcaagggcttactcccatgactggactgagtgtccattcgttcatccaggggagaatgcgaggaggagagacccacggaaatacccttacagctgtgttccttgccctgagttccgcaaagggacctgccagaagggtgattcctgcgagtatgctcatggtgtttttgagtcctggctacatcccgcccaataccggacaaggctttgcaaggatgagacgggctgtgctagaaaagtatgcttctttgctcacaaacctgaagagctaccccctgtgtatgcttccactgggtcggctatgccatcaccaaaatcctattcagctagtggacttgacatgacagcgatgagtccattggctcttagttccacatctttgccgatgccaactgtttcaaccccacccatgtctcccttggcagcagcttcatctcccaagagtggaagcatgtggcagaacaaaataaaccttactccaccatcgttgcagctccctggtagccgactgaaggctgctttgagtgccagggatctggagatggagatggaactgctcggtctagaaagccctgctcgccaacaacagcagcagcagcaacaattgatcgaagagattgccaggatctcttccccatctttccggagcaaggaattcaataggattgttgatttgaatcctactaaccttgatgacctgttagcatctgctgacccttctgtattttctcaactacatggactttctgtgcaaccttcaacacccacacaaagtgggcttcagatgcgccaaaacatgaaccacctccgtgcgagttatccatccaacatcccttcctctcctgtgaggaagccctcagcttttgggtttgactcatcagctgctgtggcaactgcagtgatgaattctaggtctgctgccttcgcaaagcgaagccaaagtttcattgatcgtggagctgcaacccaccatcttgggctgtcttcagcttccaactcttcttgcagggtatcctctaccctttcagattggagttcccctaccgggaaactggattggggtgtaaacggagacaagctgaacaagctgaggaaatctacttcctttggattcagaaacagtggggtaactgcatcccccatagcacagcctgaatttggtgctgagccggatgtctcatgggttcattcattggttaaagatgttccctccgagaggtctgagatatttggtgctgagaagcaacaatatgatctcagtaaagagatgcttccaccatggatggagcagctgtatatagagcaggagcagatggtagcatgagctagggctgccatggcaatgcttcttggttattctgacaaagtttatttatttatttaattattttattcatttggactgcttttactatccccaacattacccaatattatagttagggatgggattaaatatgatattgcaaagaccaaagttcaggttaatccagagatttgaacggagagttccaatttttaggtcagggaagacttggagaaacgttgaatgaaaaaggatgctgaattttattttattttattgaataaaagaaaaatttattccccccttttctctacgggatggatgtattttctctagcaagtggacctcaaagtatttgccattgattaagcagcacaattcttttttatataaaattgttatgccattttatcaatgcttatccatcattattagaagtactttcaaggaaatttctcgtgtgactgcttattggctattctttcttatttaaatacttgatttcttgtgac

SEQ ID NO: 47989 - DNA, 608 bp, Glycine max
  unsure (1)..(608): unsure at all n locations
  Clone ID: PAT_MRT3847_1433C.1
ctcgagccgattcggctcgagggggtacatctaatcctctccaaatcctacagtgatgggagcctcatgcactgggcttcaccacccctcccctcctcctcttttgtttgtgccttgcatttgaatcttatacatattgctaaattactttgaatgttttggtttcctaaattaagataaaaatgatttcttctttgtgtgtgattataccatcctgatctaaattagatcattccatggatccttatcccataggagtagcttgaacatgatttctgtgtttgattttgattttgcaacacagaaagatatgcttgataaatgttaagcaatctttttaagcttcaatcaaactgccattttaagctttaatcttttacatataaaaatttaatttgttcatttccttcacataagatacagccaagcttcattctatttgtttttgtccctggacgcagcacctttcttttgttctgttttaggtccttgagcattttacttttgggagaatttccaaaaagttattattcatacataacatgaaggaagaatgattacctggtgtggggtattcanaccaaaattaaccaaaataatatgatgac

SEQ ID NO: 47990 - DNA, 1089 bp, Glycine max
  Clone ID: PAT_MRT3847_14340C.1
cgcaaggtcgtcccttccttcagcttgagtttgcagtggttagtgtgacccacatcacaggtagcgcatcctagcctccattgtttccagctgcctgcgtcgtgcagatttacatattccatgaacaaacataaccaccataactcaaaggttagaagtcctcaaagaagacctcagtgccagagttacaagtcccgaaacaggcccaccaatcagtcacaacatttcctacacgaaggatgtggagaaaattaactgagcacaccatcgacaacatcctacgcatgcagcttcacagagaccccaatgtcttgtttgtcggatacaagcttcctcatcctcttcaatacaaaattattgtcaggtgatattcttggtcgcacagttcataaatttcaccaatatggaacatagaaaatagccaagggccatagagcaccaaaggaagcatgttgatgttgatggtttcttggtaagagtgataacttgcaaccatacgggcaagacaggttccatgataagatctttgactgcacatggttctagaattgttgttttatgttcagatcatttaggagacaatgcgagtccaaatttcaacttgagaccaacatgtgcttatttcatcactgaggtagcaaaatgagcatccggaagggctcacatagtacaggcttccatagctgatggtgttttgtcaggtaatactgaccccaagaaaaatattgagttgctacaagatgctattgcttctattactctcttaggaagcataatcacgtccatccctttatcgaggcaagcatgttcatagcttagctcatgcaacttctggatatcacaaagttcttgaagaaaatagcaaactatacaatcaagttcatgatcttaagggtaaatttctgattggttggttgctataagcttagtatgagttatatctttcacacctttctaaagattttgttccttttattgtgcctccctgaaatggttaggcctcgtggagatatgatataggtataggttggataaaatttaattcgactcgacacatttttatacttaataaaaaaattcatttacttc

SEQ ID NO: 47991 - DNA, 189 bp, Glycine max
  Clone ID: PAT_MRT3847_14341C.1
ggttgttttttatttaatgaccaaagcattaaggtgctttcacttgtgggccccgtcgaccggcttggcgccaaaaccagaaggcacactttgtcctaactacaaaaaataaaatatgcgggctgttttgtttaaaccaaattaaccctctggcacggggttaacccaaccagggattttttttttttt

SEQ ID NO: 47992 - DNA, 267 bp, Glycine max
  Clone ID: PAT_MRT3847_14342C.1
ggagggcatcaaatcaataaagtgaaccaaatcaaaaggaaaaggagggcccacccaatgacattggggcccaccgataaaaaattggaaaaccagtttctcgaccccggtaacaagctcctcttaaatcctccttcttaagcgaaggacctcctccaactcctcgaccaattaaagtgttgcctatcaagggttgaccagtcccttattgactttttgcaaattgcactttttcattaattgaaagcattgatggcgaccaaactt

SEQ ID NO: 47993 - DNA, 450 bp, Glycine max
  Clone ID: PAT_MRT3847_14343C.1
catcaagacgtcgtgtggaaaggtgaatgcccaagagtgggagcctgggctgatatactcgctcattcattcaaaagaaagatggaaagcactaggatgtcacacatatacacatttaaaacatgacgattgtatggtcaaaggcacataacaccaaccctagaccaggtcctaccataccacaaagaaggcatgaatgccactatagacaccacacccgccaaggcaactgacacccccaaagccattgcaaaattcagaagcacaccacaacagaatgcacccactgaccaaagatggaccactcggcagtacccagagatacctgcaagcttggaaaatactcacttgcctaacatacaagagaagtgcccatacttcattatagacacttaggtcctacaagacccatgaaaccaactggtagacaagcagcttccagacagcatt

SEQ ID NO: 47994 - DNA, 951 bp, Glycine max
  unsure (1)..(951): unsure at all n locations
  Clone ID: PAT_MRT3847_14344C.1
tctctctctctttctctgcgacccaaacaaaaccacttttgatgttgttttggtttggtttttaaaaaatccgaaagttgaaaaggttgtcaacaagggaagacacatagttgaacctccaacacacacacacacacacacacatatactgccaccacccctcgaaatacaccaaacaaaagtttgttcttttctgcacacagaaacctgcttgctattactgtaaggattggattctggcaaggatttctatatgggagaagcacctacattcatacctcaagacctgcagaatggaacatgcaatgggtttgaattaaaaagtgggacttttgaaactgatactattgttggcaataaaaagtatgtcattggtggaacctatggtgaaaccttttcggttaaagatcaaattcttgacaacaatggtctaggggaatgggttgatctcattcagctaggtaccaaacccatttcatgcaatggccactcagccgtgcttttgaaagaccgaatactaattcttaagaaaaatgccaagccagatgattgtatatggtttctggaggtggacactccatatgtcaggcagcagaaaaaaattttggggattgatgttgttgcatggagtaagggtgtgataggaaatgctgagaagcctgttgttatcagtggtccttctggagtaggtaaaggaacattgatatctatgctgatgacggaattcccctctatgtttggtttctgtgagccacacaacccgtgccgcaagaggcatggagaaagatggggtccattaccattttacagagaagaatgttatggagaaagagattaaagatggaaagtttctggagtttgcttctgtccatggtaatctatacgggaccagtgttgaggctgtggaacntgtatcagatgcagggaaaagatgtattcttgatattgatg

SEQ ID NO: 47995 - DNA, 733 bp, Glycine max
  unsure (1)..(733): unsure at all n locations
  Clone ID: PAT_MRT3847_14345C.1
tacagctgctattgacaactatgatctactgatctaggatagctttgataccatcttagaattgggcttaaggcgtaactcaaccccacaaaaccgactcataagaggaggattgcccaagctttataagagctctatttaactcatatctcaagttgatgtgggactatacatcatcctcggagcttcaatttagggcagcccacaaagaggctgcaaataaggcaggccagagatgaccacaattaaaggcagctttccaacaaaaacccagttcgtttaaccccaggccagcccataacctggtgtaattaagtgggggataaaacagttctataatccatagccacttgcagtaatgcccagccatgcaacccattcacttagcaagaggcttgcttgaatgtggaatgcattcacatttttaggaacctagaccaacaagcatcccacaatgccataatatcataccccaccaaggcctagaccaacacttacccacatgcaacctccatcttacatncagtgttatcaatggcggatagcaaaacatggtggaaggccgaaattccaccatataaacacacgccattgtgccttattgcgccgncatggtgggcctcccttacatattgtctacgggtgggttggcaaaaaatcagccaagccattccactgtggacagtgccatggcttgcttttttttcacactgacctacattatgtcttccaa

SEQ ID NO: 47996 - DNA, 539 bp, Glycine max
  Clone ID: PAT_MRT3847_14346C.1
gcacaagcgctctgaatatgggaataataaaccatgacgaaggcaacaacttgaaacatcgtggaaatgtgtttacagcggagaaagaggaaaaaataaattattggcctatctacaaaatgtctctttcttgaatctgaatgtaccagattgaaaaaggttataaacagatgcatcaacaaatctcacccacaagcaggtctgttaacacattctgtgcaggggcttgaattttaggcccgctcatatgcccatattggaagcaatcaatagataaataagtcggctgttaagttgcctttttatggactgtaaccaattgaaaatcaatttggctcagaccaattcgaattatccaaaaaggctttatacttaaaaatggagcggactgagcaaaccatgctgaggactcattgcactctttggaccacagctttctcagcagctggataagacaatgtccgatctcttgaagtgcctttggcggtggccgagggaggagccccttttgcattggctgaaggaagcctatatgagac

SEQ ID NO: 47997 - DNA, 202 bp, Glycine max
  Clone ID: PAT_MRT3847_14347C.1
ccttttgttaatagaatccattgtttatatctaacaataaactactatgtacacctacaatggattctagctgaggcccctgaaacaccatcaagttattcctgggtgtcgtatcccaaccttctgcaaattcggctggactgcatattgaatcataggtggggggccacaagacaatgccgaggtgtcaggagatgccccc

SEQ ID NO: 47998 - DNA, 537 bp, Glycine max
  Clone ID: PAT_MRT3847_14348C.1
aatgcacagagctcattaaaaaattaccccccccccccccccaccacaaaaaaaaggtgatgtatactcaaacaaaactaattaaaaaaacagtaacatgaattaattttttttgaaactcagtaacatgaattatatttatcgtgaaatgaaccaagataagaaattaaattttagtaaaacaaacaatagataaataactgttaacttgattctccaaggcacttcttaggatttatttggattgcatgattgagaccgagacacaaaccagaagagagataaagaagaaacattccaaatgtttttcagaataagtaaagactaggtcccttgttattcctttcaaccattctttccaggattctagcattttcttgttggaggtgtttaatacttttgctaaggataaatagaacaagaaaaaaaggttaaattacttcgcaagtttctgaactatttgataatttgttattaggtctttgcactattttttttccttttcaattgagtccttgaatttatattttttaattg

SEQ ID NO: 47999 - DNA, 289 bp, Glycine max
  Clone ID: PAT_MRT3847_14349C.1
gggaaaggcttacccggccatgagcactcattcccacacagccggtgggatggccaagaagacgctgaggagctcaatccctgaaaagagatgcgctactctattgcggcgattgacatgtcactgtattccaactgacgacgtgcgcttgcggaccggaggtcgattcagaaccatatagcaccactccgatctcgctcactgctgtaacagcggaatcgacagcgttgatatgatgcttgagccgctcagagcgcagtctcctatatagagctactgcgatccctac

SEQ ID NO: 48000 - DNA, 325 bp, Glycine max
  Clone ID: PAT_MRT3847_1434C.1
gaaaacgtgtgagaactaaaagaaggaaatggcttctatgatctcgcaggtgtccaccgtaaccggccgtccgctggtgtcattcaccggcctaaatcatggtgcttcccacgggaagaccaactgcattcctcatgtgcacggggagagctgctgcaggggcccatgcagagagtcggactttctcttgcgactgtgtcccatgcaaagagcgatcctttaggaagaggttctgtggatcggtgagccggttggtccgggccacagcaccggtcttgtgcgctcgacctgggagcgcatgtgctgactgtctttaggtgagact

SEQ ID NO: 48001 - DNA, 244 bp, Glycine max
  Clone ID: PAT_MRT3847_14350C.1
gcaatatttgtgctcagagagctaattctatggacgtatccactaatatactctctagaagaccttgctctagtggacattactgcagctacacctgtgaaggattatacgctcggcacactgatgctatgcatgactaacacatccattagcattctttataagcatgaagctacagatcttacagcgctggattcacatggattcttccagctcatgctagatcctgagtactttgatacca

SEQ ID NO: 48002 - DNA, 554 bp, Glycine max
  Clone ID: PAT_MRT3847_14351C.1
gacccagcgtccgcgtcgtttatgcttcctatattttttttaaaatcttaaagataaaacattatattttaaattataataacagattagaatttagattaaattaaattagaataacaatattttctcttcacgtcagttgtgtcacttcttcactcacgtaaatctttactggttccctcgttcatgtctatttgtgggggggttgagtttgttgttgctgccgtttgttcagcttatgaccttcgtagtgtttacggttgctgactttgacttgctgtttgttgcgtttgtggttgctgacctctgatttactgttttggttctgactgggtgcattgtaactttgtaaggtttacacctttgaaaccttttctttactttccaatttttataattttttctttatctttcttaggcttgtaagaatttttagtttaatatttttttctttactttcttactgactaatacatttaatactttcagatttttaattttatatcctattttgataatagttttttaaatataacagttaaccattcatagtt

SEQ ID NO: 48003 - DNA, 223 bp, Glycine max
  Clone ID: PAT_MRT3847_14352C.1
taatattgtaatttagcaaatatcttttgagattctcataaagactgatcatatatggtcttcttacatatattgccctacctattaattagttttcatcacttaaattcatcaaaaacccagtgcttctgagttgtgatcttccatggggtcagccccatgcaaattcagcgggtatgtgctgggtggtcacactacattgttatctgaccttttgtccttt

SEQ ID NO: 48004 - DNA, 329 bp, Glycine max
  Clone ID: PAT_MRT3847_14353C.1
ttttattcttgtgaatgcagggtttgcattggccggtgctatgaatagtatatttagggggcgtgccaacgcggatatttacactatctgctctcaagactgggaattatggaatactgattgcacaaaatcgacgactatgatattgaaaccaaacccgtgtgctgatgcatggagctcggaattaatgaagcgtaccggattttattgagatattattagcgtaactggatgggctgccatcctaaggcaagatgttcaggtgacatatgattggtatattccctctcaggaatgtggtaccaggacctattgcgttttgaaaccac

SEQ ID NO: 48005 - DNA, 323 bp, Glycine max
  unsure (1)..(323): unsure at all n locations
  Clone ID: PAT_MRT3847_14354C.1
ggaggatacaagaaggtgtgacagaagcaanactgaaggttgccataaacggatttggaaggattggaaggaattcttgaaggtntggcaggtcgcaaagactccctcttgtgtcattgcatcaacgacaccggtggcgtgaaacaagcctctcacctntcaagtacgattcgatctcgaaccttcgtgnngatgtcagctgttggaangacatcatctctgtcgatggaaagaatnaagtgtctctgacgcaacctgccaccctccttgaagattgggatagcttgtattgaggactgggtgttgtagnagaaagtcnagga

SEQ ID NO: 48006 - DNA, 316 bp, Glycine max
  Clone ID: PAT_MRT3847_14355C.1
ctcctccaccatcacctccaccatctccgtcctgaacaagctcccagaggacaccttctcctacctgaactcgtccggataggtgcacacaactacggcgtcggaactgacaaaggacaagaatgcagcgctgatcgcgtgccccggtgctttacaccccacatgctaacagaatcacgtgccagccttcgagcagaaatatgctcatcttaggccgaatgtgatcgactcaatctcatgcatttcagtcaacgacaccttcgacgtgaaggcatgtaaggatgacctcaacgtctacgatgaagacattctgtta

SEQ ID NO: 48007 - DNA, 196 bp, Glycine max
  Clone ID: PAT_MRT3847_14356C.1
ccgactcgtccgaatgaagtcccattaaaattctccccttcccaatgccatgcgggggggccatatttaatatagggaaggttgaagttgtgacataacattagattaccatgcaatgcattataatctatttgacataattgcacatccaggtgcaatgccaacatattgctacacataacccttagaccagcat

SEQ ID NO: 48008 - DNA, 124 bp, Glycine max
  Clone ID: PAT_MRT3847_14357C.1
ttggaggatattacctcaaatctttcctccaccgaggtgggaattatgaggaactgcttttgatctctgcaaacgaaataaaccgaactggatccttgcctgggaagatgggttctgcaattat

SEQ ID NO: 48009 - DNA, 211 bp, Glycine max
  Clone ID: PAT_MRT3847_14358C.1
atctctccggtggattcaagcttttgaagaggaagatggtgcaaaagtggtaagggtggaaaacatggacaacccttacaagcgtccagataattttgacaagagatttaaattatctttgaacaaactctatgcgtggagcttagtggactatgacagggttgtcatgctggatgctgaccatctcttccttcaaaacacagatgagtta

SEQ ID NO: 48010 - DNA, 326 bp, Glycine max
  Clone ID: PAT_MRT3847_14359C.1
ctgttttttttttttgtaaatcctcagcagaggagcacaacaaacgacgctttggtttagactctctaagatgcgaggctgctcacaacccaaaacaatgggggcatgtatgaaagctccatagggcttcaaacggccaaaagccggaacctccactgatgttccctccaaacatgagttgactcctcaatagccgggggcgcagactcagccaattagcggtactggagagcatagaacatctcgaggagacggtggctctgacggcgtcaaagattggtcacgggcttccagaagccatacacaccactgagtgtcaagagcct

SEQ ID NO: 48011 - DNA, 172 bp, Glycine max
  Clone ID: PAT_MRT3847_1435C.1
cttagcagaagctcactcttcggttagaaatttgttagttagttaaaaaagatgttagaattagtttcaaatataactaaccaaagcagtagcgtttctctttcctctgcaactctgcagtagatataaatacgtaataaatgcatcaataaagcatcatgcagttttaatc

SEQ ID NO: 48012 - DNA, 258 bp, Glycine max
  Clone ID: PAT_MRT3847_14360C.1
aagagcccccaaaactcaaaggcctttattaaaagcaaccgttccttgcctgcacattgagggggctgcaaaaaagcctgagccaatggcaggggcaaaaacccccctaaggtgggccccaatgggaatttttaagccggtaatcccttacccccattgagccaaatcccatttctaaaagaagccccttaggacggcccaacatttggaaatatgcccccaagggccaattatgccaagttcccccccagggtcaaa

SEQ ID NO: 48013 - DNA, 163 bp, Glycine max
  Clone ID: PAT_MRT3847_14361C.1
aaaaaataatttattcttatggtacatgaaaattttacagcctagctatggaaacttcataaaaaatatatttgttttgcggttttgggattcattgtgcttccaatacttatttgtacacttcaagattaattctcgcaagttaaaatgaaataatacgggg

SEQ ID NO: 48014 - DNA, 225 bp, Glycine max
  Clone ID: PAT_MRT3847_14362C.1
atattttttattattatttattttctctttcttttcttttctgctttaattgggctttcttgatcttatatacacctcttcttggcataatatcttttattaccatccttccctagaagaacacctaaataccaagacccatccctatattttacctcaaaccccatcttaaatttggcaacaacaaaaatatccccccccaaatagcaacccccctcttcttgc

SEQ ID NO: 48015 - DNA, 1610 bp, Glycine max
  unsure (1)..(1610): unsure at all n locations
  Clone ID: PAT_MRT3847_14363C.1
accggttaggcattcccgaattgagcaccgcggaacggaatgaaaacgagagtgaagcagctaagaggggaagagcgatggaaggtgggtacggaaaccgtggttcctctttctcccaatcacgtcgtggtcgaggtcgcggtcgcggtcaaagatttccttcgaatcaatccaaagtttcaagttttgccgaaaggggcactccttcttctagtagtgccaacagagcttctgcctctgttatcagtaacacgctagaagacgacgcacaaccatcttccaattttgttggaacatgtccttacatgtgcccagaaagagagaggatccagcgtgaaaaactgcgagatttggcaatttttgagaggctacatggaaatcctggaaaatcatccccagctcttgctgtcaagaagttttgcagaactatatccaccaaatatgttcaagcatcagatatgcggcctattactgttttggaagacactttaaattaccttttgagtttgctggaatctaaagagcatttgtctgaagtagttcatgactttgtcttcgatagaacgaggtccatacgccaagatattaccatgcaaaatattgtaaacaagaaagcaatttacatgtatgagggaatggtcaaattccatgttgtatctcattacaagctttggtgttctatgtctgatccaaacactgcatcgttgcatcatctcaatatggaacagctcacaaagacattggcttctttgttcaatctgtacgaagcaaatcaaaattcaaatcatgtgcatgagaatgaagctgagttccattcattatatgtgctgcttcatcttggttcttacagccaaccgatgggggagccactttctttgtggtttcaacgtgtatcaactccagtattgaagtcaaaagaaatgtgttttgctaggagaatcttacgatcatttcgacttggtaattataaggatttcttctgtactgcagcagctcaggcatcatatctgcagttctgcattatgatgccttatatcaatgaagttcgtgtgctggctttatcttgcataaattttggtggatacaagcttcatccatatcctctgttggatctttcaaaactcctgttcataaaggaatcagatttagaatccttttgcaatcattgcggtcttgagactggtacagatgaatctggaaataagctacttcccacaaagcaaactacattcagtcatcccaaaggtgggttccaaagatatagtttcttgggcttgcaagaatatgaaaggtagtttcagagcttttgtagatcctggatggccacacctattttcactactttccctaggtattatcgagatcatacttggtgttggtgatacaatgtgactatgatcgttcacaagtgtctctttgtggtgcttttgaaaacatgggaacaaattgtactatacacaactatttttgcacccttatgccttattgtacattgagtctgtatttggtacgcgacaattgtataactctttaagctatctgtaaaccagtgtatgtaacattattatggtaaggtttctctttacttgcaaaaaaaaaannnnnaaaaa

SEQ ID NO: 48016 - DNA, 717 bp, Glycine max
  Clone ID: PAT_MRT3847_14364C.1
ccacgcgtccgcaatctgtacgaagcaaatcaaaattcaaatcatgtgcatgagaatgaagctgagttccattcttatatgtgctgcttcatcttggttcttacagccaaccgatggttaaactctacatcattggtgtgattaattatgtttctcttttcatgttaagccttgttgcaacttaagttatgaaatgtagctatttctaacgcacagggggaaccactttctttgtggtttcgacgagtatcaactccagtattgaagtcaaaagaaatgtgttttgctaggagaatattacgatcattccgatttggtaattataaggatttcttctgtactgcagcagctcaggcatcatatctgcagttctgcattatgatgccttatatcaatgaagttcgtgtgctggctttatcttgcataaattttggtggatacaagcttcatccatatcctctgttggatctttcaaaactcctgttcataaaggaatcagatttagaatccttttgcaatcattgcggtcttgagactggtacagatgaatctggaaataagctacttcccacaaagcaaactacattcggtcatcccaaaggtgggttccaaagatatagtttcttgggcttgcaagaatatgaaaggtagtttcagagcttttgtagatcctggatggcacacctattttcactactttccctaggtattatcgag

SEQ ID NO: 48017 - DNA, 756 bp, Glycine max
  Clone ID: PAT_MRT3847_14365C.1
gtccgttagcattcactgtccgtgccctcgatgctggacctgtcattgctactgaaaccattcaagttgatgatcaaataaaggcccctgatttgcttgagctcctgtttcataaaggatctaaacttctgattggagaacttccttctatacttgatggatcagcaagagtaaaggcacaacctcaagacgactctaaggctacattggctccaaagataaatccagatgaatcatggctattctttgatcaagaagcatctgttctacacaataagggtggccaggaactagagcaagagtgttagtggttgagaaaaatggtcagcagaaaactttggagattaaaattataaccacacgagttcgcagtcatgaaagtgtgcagttcgatgaagcagatgacattgcattcgttgagggtgcgttggtatttccatgtggaaggggcaccacacttgaggtattggaagttcagcttcctgggaaaaaggtagtaaactcagctgctttctggaatgggctgcgggggcagaagctgaagaaattatgagaggtggttcatcaaataggaagccatattttaaattatttttggctgtttaggaaatccatttttttttgttttgatttgattcaaatttttattttcttctttcactttatatatgatttatgctgcttttttttatggacaaattttatatgatttatgtataactatcaacctttgcaatctctatagaagggcttctc

SEQ ID NO: 48018 - DNA, 430 bp, Glycine max
  Clone ID: PAT_MRT3847_14366C.1
aacttgatacttcaattacttgttattatttcacttaatcaacttttaaccacccgattttttgggcaaaaaccagaaccacgggtaccccaaacccttaagaaacttggacttaaaccaccaccacttaaaattccggtttttatcattaacccttattggccaacttaaggcttaagtttttcaagcttcattaacaacattaacaaccagaaaagtacccacggcttttgccacggcattaacaacaaccacaaccacaacattagcaaccgccatacccaccgtcacggttacggtatccacaaccgccaccgccaccgccactacgaccaccatatccaccgccaccacgattgtatcctcctcctccttcgccgccgccgccgccgccaccgggggactgagcttcattgacagtgatattacg

SEQ ID NO: 48019 - DNA, 154 bp, Glycine max
  Clone ID: PAT_MRT3847_14367C.1
tttttgggcttggctgcaaacacgaactcaagcgtcatgatttattacgcactagctataccggataactgaaacgctgccttcatgctgtgaccttgaggagatctgacataaaagcgcaattctctgcccttagcttgtacagcgactcatg

SEQ ID NO: 48020 - DNA, 533 bp, Glycine max
  Clone ID: PAT_MRT3847_14368C.1
ctccgaactcacaagtccgaaccagatctgcaagtctttggtgtttgggttcgacggctcagtggcagaatcacagagagaatagcaataatcggtcatatacgcggaagcttgtgatatacgaggaagcatgtttgagggtatgatgcctaaggatttgaagatttatgccacaactgcatccaatgcacaagagaatagttggggaacttattgtcttggaatggatccttctccacctccagagtacatcatttgcctaggggatttgtacagtgttgcttggatggaagataagtactaaatatagtgttcttttgtaatcaacccatatataccatgtataatattctaatccaaatgttatgacactgggaggattcaaattgggaggattcaaactcgtctatgacctccttattactccaaatgttcttttttctctttctttgtttcacacttgtactcgctaggtgactttttgttttcactaaagctttttaagttgttgtgcacctcaatctatttgatcc

SEQ ID NO: 48021 - DNA, 1592 bp, Glycine max
  Clone ID: PAT_MRT3847_14369C.1
ggctcgagcgggtattgttattggttccgtggttggtgtgttgttgattctgctgcttttgttctttttgtgtagaaaaaggaacaagaaagatgagaatgaaactttgccacctgagaagcgtgtcgtggaaggtgaagtagtgtctcgtgagaagagtaatgagagtggcgggaattcaggttcagtggagaagagtgaggttcggagtagcagtggtggtggtggagataataagagtttggtgttttttgggaatgtgagtagagtttttagtttggatgagttgttgagggcatcagctgaagttttggggaaaggcacctttgggacgacttataaggcgacgatggagatgggggcgagtgtggcggtgaagaggttgaaggatgttactgcaacagagaaggaattcagggagaagattgagcaagtggggaagatggttcatcacaacttggtcccactaaggggttatttctttagcagggatgagaagcttgttgtgtatgattacatgcctatgggaagcttatctgctctcttacatgcaaatggtggagtggggaggactccactgaattgggaaacaaggtctgccattgcccttggcgctgctcgtgggattgcatacattcattcacttggcccaacatcctcccatggaaacatcaagtcatcgaatatccttctcaccaaaacttttgaagctcgcgtctctgactttggccttgcgtaccttgctctcccaacctctacaccaaaccgtgtgtctggttactgtgcgccagaggtcactgatgcacgcaaaatatcccaaaaggccgatgtctatagctttggtatcatgcttttggagctgcttacagggaaggctcctactcattcttcacttaatgatgaaggggtggaccttccaagatgggtccaatctgtgattcaagatgagtggaacactgaggtatttgacatggagcttctaaggtaccaaagtgttgaggaggaaatggtcaagcttttgcagcttgcccttgaatgtactgctcaatatcctgataagagaccttcaatggatgtggtggcaagcaagattgaggaaatttgtcatcctagtttagagaaagaggaagagaagaatcatgattttaaagatgctgataatggattttcccaacagtaccattctgttgactcgggtgtgtcacaagcttgaatactgaactgaagaaagaacccattatttcatcattggccacacccaagcttgaatatagaattgaagaaagacctcattatttcatcattggcctgtttttggcattcatattacacaaatgttgtttgtttgtttgtttattcatttgaggggaattatagaaaaccagctgtgtatgtcctttgtcttacactcttactacctttttttctccttagattttgttattctgaatctttgttgggggtttctattccccactatatttactacttcagttttagaggattattatgcgtgaatttgtgaataatttgtttgaatatatctacattgtttctccctcctaaaaaaaaaaaaaaaaaaaaaaaccaaa

SEQ ID NO: 48022 - DNA, 736 bp, Glycine max
  Clone ID: PAT_MRT3847_1436C.1
cttaatgtctcctattaaacttgacagaggtaagtattgactaagattctttcagtatgaagaagatagggacaaattgactaacatacgtacagtacgaaggagaaagggaaccttcatgcgagaaaagacactttcttctgagaagcttcattttggttgcggctgtgacatttcaagcgggagtgacacctcctgaaggagaatggcaagaggagaagaacaaacacgctgtaggatgcgcattataagcatcagatcctcatctttactatttttgcctcttcttcaacactctggcattttctatttccatctcggtaattctcttgccaatttaccaattgccttgccatttggatcagtgttttgtcctttttcccatggctattacttatggatccgctattttcttttcattcccgcacgatcctttgttattaggcttctgccttttatctgcaacttgcccttatggtattagatttctagttagaatcttctacctgaatcaaactaaacacgttcccagtctcattctactactcgacccaggctcttgattgtttttatagttgggattaatattgtttagttttggacgaaatttgactgtcgggttttaggttgtttagttcgggacgtaagtggtctgccctgtgtttgctttagtgtttcgtacttctattgtgtagccctgtggcttctttcgtgattattacttctaatttgtagc

SEQ ID NO: 48023 - DNA, 441 bp, Glycine max
  Clone ID: PAT_MRT3847_14370C.1
cccgaggcaaaaaaaattaaggttggttttgatttaccaaacctaatttttagaaaaaaacatgcaatttagttgggccacaaaaaaccctagttcgaacgggaaatatcctaaaaacaggcttggaaagaaaaaaattggatcaaacaggtttttattttgaggctagagagtcaaaccacccttttccccaggcaataacttaggggaatctaccttctccgggtttttttctcaaaaattgggaaaaacctttttttaaaaaccttaagcattaaaaatcttctcaagcctttttattggctttttaagccaatctatttttttgaccttcccctcgggttcggaaaaattaattccttgagcctctaaaaaaacagagaggttttcttttacaacagcatcagcttatccagagggaacggcttttttttcagggat

SEQ ID NO: 48024 - DNA, 548 bp, Glycine max
  Clone ID: PAT_MRT3847_14371C.1
ccagcgtccgagcttgatgagtggtggtgggccgctggacattctgatactgagacctgggtgagctacgagaggactacaatatggatcgtgacaagggacatgacaaaacccttgtctgcctacctaaccgacgggatggtcttgaccatctgcttctggcgatgcaacgagcctggcctctgggacccggtgcgcctgggtctgctccaatggctcattgcttcggtaggggttgctgcctgaggagcaagtgctccctctgcttccctggacctactatacgtcgacagctcttgccgcactttttacttccacaaactttgcttatgctgacccggtctccttgccgtccattcttgggaacatcgcctgaattaaccttctccgacgcaagccagatcatgcgctcatccacatggtagacggtgatcatgctgaatacaccgctcattctctgacgggagccatgttgctcggcaagagattggacgtcactattcgaagcatgcgaacatctcccaaggtgctgatacacatgactctgt

SEQ ID NO: 48025 - DNA, 163 bp, Glycine max
  Clone ID: PAT_MRT3847_14372C.1
tctttttggcagcggccttggtgaccttggctgcagtggggtctttcttgtcaacactgttgatgactccgacagccacaagtggacgcatgtgcctcacaacagaacgaccaaagggaggatgctctgaaaaaatgtgagcccgctgtggctctggtggaat

SEQ ID NO: 48026 - DNA, 405 bp, Glycine max
  Clone ID: PAT_MRT3847_14373C.1
ttgttttaataaagtctgttgtttatttgtacctgtctgctcctttgagggttgaagtagaaggatgaagacccagaggcaagcaggtgaagaccagtttgatcaaaagggctacagacctggccttgtagcctcagcctccaactgtcttggccaaggggatcttagtgtctcaggaatgagggagaggagtaaagccctcaagccttcccaccttctctccctaggactccaggtcctaagctggcccaaacatgagcaagggctcaggaaggacctacacggatgtgagggttcatgagcgggtccagattgggatcactgtctgctgcagcccggccgagtcgagacataagggcgaggagcgccaggaagcccagcagccccaacaggagcagcagtcct

SEQ ID NO: 48027 - DNA, 228 bp, Glycine max
  unsure (1)..(228): unsure at all n locations
  Clone ID: PAT_MRT3847_14374C.1
catgatnatccntgcccgntccatgcnaacaaacatcnttnttcttctgaaatttngccanaacttgtgtnaatcattggaatcggagtttttgggtgcaggtgaaanncnttttgcatcnggtgaaattggttccgtntagtgaatngtgnattncgnnagtatccatnancntgnngattgatntctcaaattgcganatttagggctgcctaaaganatgtggta

SEQ ID NO: 48028 - DNA, 208 bp, Glycine max
  Clone ID: PAT_MRT3847_14375C.1
tgggacaggtgtttgcagtactatcgatagctgataaaagagatatcaacatgattagtagataagaggagttgagattccctttgaggggaagatggcatcccatatgcaaagctattaagctggtcaaactaagggccgaactgaggaaaagatgaaccagatgatgggcactattggtgataacgctcaagctgcataggagaag

SEQ ID NO: 48029 - DNA, 245 bp, Glycine max
  Clone ID: PAT_MRT3847_14376C.1
tctcgagccgaatcggctcgagattcctagttcttagaagttacttgccttcagcaatcagcacagtatgaaaagataaataactgggaatacactgaagaacacagctacagatatttatcttttcatactatgctgattgctgattcctagttcttagaagttacttggattccttaccagaaaagaaagtagaagcaaataggcgaaataaaagtgggggcctcaccaccacagctggcgct

SEQ ID NO: 48030 - DNA, 455 bp, Glycine max
  Clone ID: PAT_MRT3847_14377C.1
gtttttttttttttttttttttttttttttttttttttttttttttttttttttgtttttttttttttttttttttggccaaaaacaacaaggttttttatttatacaagagccccccctgggaaaaaaaaaaaatttccaccccctttttttttttcggggttcccaccaaaatggttttattttgtctaacccttaaaaccaaacttttgttgggcccctcggatttttttggggctctctttccctaaagaaccttccgccattggttgaataaaaggaaaagggcccctaaaaatgggcttcatttgggggggtgttttttgaacccttcactctagagcctttttgtttttcccggaattggttttttcacccaccccttttggaagggcccttaaaatacacgtttaaatggggtgttcaaactttggactgtgaccaaggggcccatt

SEQ ID NO: 48031 - DNA, 435 bp, Glycine max
  Clone ID: PAT_MRT3847_14378C.1
cctttccagactcttcttcttttaccaccaccaaacaccgggcgacgaccaccacctaacccacaatgctccggccagccgtcctccgaccgctgacgcgcgccgcgacggcaccccgcttcgccgctgtgcgcgcctacgccagcaagcagccgtcgccatccgtcgaaagcgtgccggccaacaaccccaaccccaagaccccgccgcccaacgtctccgagaccaacgccgtgccgacttcctccgagggatccttcgaccaggtgctgcaggagagcgtcgaggccgctgaggccatgcgcaccgtccaggcgcccaaccgtcagggaacgtggagccgcagccaaaacccgcgcgagcgcgccatggcgggcccgcggtttgagcagacgatcatggcggatcagccttgtccctacgccgccatcgagc

SEQ ID NO: 48032 - DNA, 271 bp, Glycine max
  unsure (1)..(271): unsure at all n locations
  Clone ID: PAT_MRT3847_14379C.1
gggttatctcttgccattgattgacactataatatttgacgacaaggcctcgactcatgtccatgtcacataccactagtacctaagcaacctaaatgcttgccatgagtacgtatggggagtcattgcactagcgtgcctctacgaccatctctcctatgcgagccaatataccagcaagcagtatggagggtatatgatngtactcatgctaaagaaattattttagtattggaattattttttattattgaaattaatatttttttta

SEQ ID NO: 48033 - DNA, 392 bp, Glycine max
  unsure (1)..(392): unsure at all n locations
  Clone ID: PAT_MRT3847_1437C.1
ggttttctgccacttcgatttgtgttattccaattcctgtgattcaatncccgatccatgtgnttcgttgaggaatctgattttgtttttgatttagcattggagtttggtaattgttgccccagttctagtaattaaaattgaattttcgcacaagattggtagggttgttcattgtgatgcctcatgccaaagggatcttgtaccaggagtgtcttagagatataaaaccatttatgttcctcttgctaacatgtcaaacttttggggaagttggttggtaacgactgtcatatctcattgcatgcatcatgggctaaaaaaatgtcatctgacattaattagccagatcttacaagttaccaattcaaccaagatgttctgacagtcat

SEQ ID NO: 48034 - DNA, 494 bp, Glycine max
  Clone ID: PAT_MRT3847_14380C.1
aggaatggttgatgttgaatttgtttagtctaatgatttgattctaatgtatcccttttccctttactagtcatatcatttcattcaataatgcacagacacttcaatatagtagccttgtgtcacatttcttatttgtgtcagacacttcagagacaatttgtatatgtctacccttgtgatttattgtctttatgactcatgcttacttttagaacatggattgcttcttttcgtttaagatttgtattttatgtatttgtatacaaaacttatgcattgcacttagccctatcatgtcctatgattttgaaaattttccatatccctatgtccttgtcttattgtatctgtcattctgtctgtgtcatatatataattagagatgtcactttggaataagcccggatcattgcttgttgaaaatgtgtacatgggttttctattggtatgtttattattatttctaaatttatcattgctagcctgttagc

SEQ ID NO: 48035 - DNA, 547 bp, Glycine max
  Clone ID: PAT_MRT3847_14381C.1
ttttatgcagtcaaaaactcattttggtactgtattcaaacgagctcttgttaatttaacttagaagccctgaacatccacaacatgattggggcatcaactaatttaattcattttctctggctctaagatttccatattgataggttatgcaagcagctgctaaacttggtatttcaatcacgattagtcaagtgggcagtgatatgctgtctactggcaccccttctgctttgccaacaattaataagaatcaagagtggcaacctgcaatgtctctcaatgaagatggattacttcatcagttacattctactcttgtgcaggccatagattcttccaaatgtatgttgcttcacaataatcaattaaatgtgattttctgacctcccaattgtattatatttgctgatagcttctgatttttacaaattcctcttggtttatatttatatacagccttgcttgtatctaatatgcagcagtctccacagcagattctctagttccttgtatgcaggattgtgtggatgctatcactgaacac

SEQ ID NO: 48036 - DNA, 188 bp, Glycine max
  Clone ID: PAT_MRT3847_14382C.1
atcagaccccataccttaactttttcttatatccttgaacttatccgggcctttctatattaatgaggcagggaactaactgactcttctcaatactacttactcaaatgtcagtccatctatattcccaaaaggtattccaaacattataccttttaacagcaatctaatgacacatgccaagacaa

SEQ ID NO: 48037 - DNA, 258 bp, Glycine max
  Clone ID: PAT_MRT3847_14383C.1
aggagtgtgagcgtcaacaatggcttcttcaccttcaaaaggggcggtgtcttatcgagaaggaatacctgtggttcaaatcgccatagatggccaaacttacctcactcaatcccatctagatgttttttcacgcctaactgttttgcaagagagactatcgcaaggcaagggcggagaaacgaactttatcgctcatcgaagcgagcttcacgcgctgttatccaatattctatagtgcttcaacagtctttctac

SEQ ID NO: 48038 - DNA, 430 bp, Glycine max
  unsure (1)..(430): unsure at all n locations
  Clone ID: PAT_MRT3847_14384C.1
ccacgcgtccncagcagtggagaatagttcaacttctctgtggtcaatcatttcattatagtgttctctcccttccaatcacagcgagctccagagttagggggtcgtgatttctgtgtcactgagcaagaggaggagttgtgtatctacatctgagtccatgaggccgcgatcatcctctttgagtccatatgcggcgctcatatgtgcctctctctaaagggggggcgcatggggtaatacctttnacagagaaggagtccaagagcttggaggggacaatgtgggtttcagaggagctcatcgggggctacaaatgagccgcaacttatcaacactagctgtggaatgggtctcgaaacccgaagcttttccggcgaaaaggcaggctggttctagttcctacacaggctacacttcatcatcacag

SEQ ID NO: 48039 - DNA, 187 bp, Glycine max
  Clone ID: PAT_MRT3847_14385C.1
aggggaagcctgcgtggccgagatgtaccctgaaacgaacctacagccaaaggctcagactcctcgattcgaatcagagaacgactacagaaactatcttgaattccacgatcctaaaacgagctttctaggagaggctcgtgaggatcttgtaggaactatctgtgataccgagtatcaaaacggt

SEQ ID NO: 48040 - DNA, 1842 bp, Glycine max
  Clone ID: PAT_MRT3847_14386C.1
tacggctgcgagaagacgacagaaggggaatttgaagacatttttctcagttctcgctatcccgcaccccccaacccccgcgtatggcttcctctgcaacagacgataacccaagatctgtaaaaagagtagctgttgttggtgctggggtaagtgggcttgctgcggcttacaaattgaaatcacatggtctggatgtcactgtatttgaagctgagggaagagctggagggaggttgagaagtgtttctcaggatggtctaatttgggatgagggagctaatacaatgactgaaagtgaaattgaggttaaaggtttgattgatgctcttggacttcaagaaaagcagcagtttccaatatcacagcataagcgctatattgtgaaaaatggggcaccacttctggtacccacaaatcctgctgcactactgaagagtaaactgctttctgcacaatcaaagatccatctcatttttgaaccatttatgtggaaaagaagtgacccctctaatgtgtgtgatgaaaattctgtggaaagtgtaggcaggttctttgaacgtcattttggaaaagaggttgtggactatctgattgatccttttgttgggggcactagtgcagcagatcctgaatctctctctatgcgccattctttcccagagctatggaatttggagaaaaggtttggctccattatagccggggcattgcaatctaagttattcgccaaaagggaaaaaaactggagaaaataggactgcactaagaaaaaacaaacacaagcgtggttcgttttctttccagggtgggatgcagacactgacagatacattgtgcaaagagcttggcaaagacgaccttaaattaaatgaaaaggttttgacattagcttatggtcatgatggaagttcctcttcacaaaactggtctattactagtgcttctaaccaaagtacacaagatgttgatgcagtaatcatgacggctcctctatataatgtcaaggacatcaagatcacaaaaaggggaactccctttccacttaattttcttcccgaggtaagctacgtgccaatctcagtcatgattactaccttcaaaaaggagaatgtaaagagacctttggagggatttggagttcttgttccttctaaagagcaaaaaaatggtttaaaaacccttggtacacttttttcctctatgatgttcccagatcgtgcacctagtgatttatatctctataccaccttcattggcggaactcaaaacagggaacttgctcaagcttcaactgacgagcttaggaaaattgttacttctgacctgagaaagttgttgggagcagagggggaaccaacatttgttaaccatttctattggagtaaaggctttcctttgtatggacgtaactatgggtcagttcttcaagcaattgataagatagaaaaagatcttcccggatttttctttgcaggtaactacaaaggtggactctcagttggcaaagcaatagcctcaggctgcaaagcagctgatcttgtgatatcctacctcaactctgcttcagacaacacagtgcctgataaatgatatcatcctagatgtaggaattaggaagggtatgctttctatttaccaaaagtgttgaattaaccccttatttcagcatccgtaaacaatgtaataattattatgcttgcacagtgcaacagtcccccattttgaattgggagaaggaagttcattaaaaatttaaaatgcagacattgtagcagaactaatctttcttcagacacaattatacaaactgagcctcctgatgatcatggatatgcgggg

SEQ ID NO: 48041 - DNA, 1568 bp, Glycine max
  Clone ID: PAT_MRT3847_14387C.1
aataaaataaataaattgttacagaacaaggcgaaagaaaaacatttgaatatttgtcagaaaacgttaaaaaaagtagtggtagtaataattattagatagattaagttgcatttctgttactcttttttttctgtatttcatcaacagaagaagaagaagaagatcgaacgaaggctccttccattattccattcagcgattccatggtggcgagaggcgtgccggcgatggcggtggtggccgttgccgcccttgacttgacggaatcctccaactggtggcgggacatcaaccgctccccgctctggcaggatcgcatcttccacctcctctccatcctctacggaatcgtcgccgccgtcgctctagttcaattagttcgaatacaatggagagtgccggagtatggttggaccacgcagaaggtctttcactttctcaatttcattgtgaatggggttcggtgttttgtttttgtcttccgtcgggatgtgcagaagttgcagccagagattgtccaacatatcttacttgacatgcctagtcttgctttctttacaacttatgcactgttggtactgttctgggctgagatttattaccaggcgtccgcggacgcgtgggctgggctgagacgtgctgtatctactgatgggctgaaggtctcaaccaagtttctatactattaatattgtggtttatgttgttcagattactttatggttaatattgtggtggaaacctatcagtggactgctcattttgtctaagatattctttgcaggggtctctttgtttgcagccattggctttcttctctatggtggaagactattcttaatgctacagcgctttcctgttgaatccaaagggcgacgtaagaagctgcaagaggttggctatgtgacaaccatatgttttttatgttttcttgtcagatgcattatgatgtgttttaatgcatttgataaaaatgcgaaccttgatgttttggatcatcctattctaaacttcatatattacctggtggtggaaatattgccttcttctttggtccttttcattttgaggaagcttccacctaagcgtggtatcacacaatatcacccaattcgctgaaaaggggatttctcaatcgttctctattttcttgaatgattatcattctccatgggtaattttttagagtagacacaagtcagtcttctatgttcggtggcaaagcttgtatgctttgtctcttggacagtatggtaagttttgtgacccagcatttctgacacgatgataattggtaaaaggggatatagtgatatcttgtataaatagtgttttgaactgctacgagtgcaaaaaatgtattgtccctaatttctcactcgtattaacttactacattaatttctgctctatatccctaatttcaatcgtttagtggagctttagtttttgtttttgcagatttgattcttaagttgtttgatctttaaattcattgggaatcggagtcttactagatgaaaaaaaaaaaaaaaaaaaaaaaaaaaaaaaaaaaaaaaaaaaaa

SEQ ID NO: 48042 - DNA, 201 bp, Glycine max
  Clone ID: PAT_MRT3847_14388C.1
agtggaattgagactcgtatttttttataaaagatatatgaaggatgactttattctatcacacttttattttattggtgcttggaaacactcattttatttgacaccaaacatggggggggagatctatgggagcataaaattcttaggcatcccgtgagcttcttggctgtggccgcaaaactctttccctgacggaaa

SEQ ID NO: 48043 - DNA, 610 bp, Glycine max
  unsure (1)..(610): unsure at all n locations
  Clone ID: PAT_MRT3847_14389C.1
agacgaattaaaaactcgcttcggtggattagcctattgattattgatagtctcacttgcagttgtactctaaaattatttcaacaattcacgtgataataccgctatgagtaatatacgccataactgaccagcaaggcttaaagccatcggagatttactggctaaaaaatactaagcacattttgggaccctatccttttaacaatacagaaagtgcatattatattccataaaacttactccgatagatcttccccactattctgtacaagagacaatcccgtatacctcatgtcaattttccaaaaatccagaggcagttcctcctttattgatgattgtaaccttgcaagtgcttccttggtccgaacaagttgttcccattgtctctgattgactgtcatcatggtccccccagccggaatgccttcaaggccctctatctgtgccactgccctctctaattgctgcaatcctatcacgagtacgtcccgtgtaaacacacgtttactgaaaatatgactctggcatcctttgtcccatttggtctcagcacaaggtttacagtctatcttgttgaccacaaggatgactgnngtgggatgat

SEQ ID NO: 48044 - DNA, 780 bp, Glycine max
  Clone ID: PAT_MRT3847_1438C.1
ctcccaggtaagtaagctcctcatcacatatctaaaacaaacccttccaaaaccacgcgtccggacaattcttcaaaggttcattccaatggcaccctcgtcaagttttgttcatttggtaaatctaggtttagttttagtactacttggttttattgtccctagaagtgaagccaggccaagagcattctttgtgtttggagattcgcttgttgacaatggaaacaacaactatttgcaaaccattgctcgtgctaatgcccctccttatggaattgactacccaactcatagagcaactggacgcttctctaacggcttcaacattccggattttatcagtcagcaacttggtgctgagtctacaatgccttacttgagcccggacttaacgagagaaaatctcttagttggtgccaattttgcttcagctggcgttggaatccttaacgatacaggagatcagtttatgaacataattaaaatgcacaaacaaatagattattttaaagagtaccaacaacgactgagtgctctaattggtgtctcacgaactaaacgactcgtgaatcaagcgttgatccttatcactgttggtggcaatgattttgtaaacaactacttcctagtggactctactgcaaggtctcgtcaatattcactcccagactatgtcaagtttctcatcaatcggtatagcaagcacttgcagaggctatataatctgggagctcggcgagttcttgtgacagggtcagggccattgggttgtgcccctgc

SEQ ID NO: 48045 - DNA, 795 bp, Glycine max
  unsure (1)..(795): unsure at all n locations
  Clone ID: PAT_MRT3847_14390C.1
gaaccagtaaattcaactgtattaaacattccaaattattaacctcagtgtaaaaagaattcgttatgtttgtcaatgtacaaaagtaagcccagccattacattagaaagagggatttagaattgaagcaaaaacaacacttgcaggattcttaaagtctatagtttttcatttatctaactgacacaagatatttatctagcttgaaacctgctatctcggcctccctgcagagctctttgcactttgctatcctcccagaggccatgtaaatttgaagcatgtccttgtataagccaaaagagggagaaaatccagcctctttaagttttgaaaaatatcttgtggccctagatagatcattcaaagcaacaaacagttttatcaccacacgataagcaggaaggtcaaaaaggcaatttgaggcctccatctcccaaactaccgccaatgcctctctgtatttcttctctgtgtaacggctgtgaatcacagaagtgaacataactatgctcggttgatagccagactgtttaaaccaactaaacaggctttcaactacttcaaatttccccatcttaacgcagactttcattatagctgtacagtcttgctggcttaaattcaattcatctcgttccccaagttcatctaacaaaggcaatacatgcctgtgtctgtcagggttctttccaagttctaatattagcttcgcatatatgctggaatccaacattcttttatcccttctggcaactattagaaccttccatgcaaatctnnnctcgtgccga

SEQ ID NO: 48046 - DNA, 262 bp, Glycine max
  Clone ID: PAT_MRT3847_14391C.1
ccctaacctactcctcttgctgtcttccattatgttgggaggaatgtccaactgcgactctatgaatgccttttccattcttgctgctaataataatgcctccttcacccaaagtttgatacccggcacaatggtgtaggtatctaaagatcctcacgcgcctatcatgactttaaatgctttttttcaattcaagtaggaaaaaaagaaggtgtttatctatgaacatactgacctcaaatcattgtgtgttgtgggcata

SEQ ID NO: 48047 - DNA, 565 bp, Glycine max
  Clone ID: PAT_MRT3847_14392C.1
aaagtagaagataaatattttcctagactgcatgatcgatctatagcttgattgagtcaatacgtggaagatttcattttatctcattgtagtcacgttactgaaagagttaaagtgaaaggtcttatctaaaaaccatattttcacgagagcattaacaaccgtaaaccaaagaaacagagatagccaatttcttctaggagatatgttgataggtggatatttgtttcctcgtatgccactgccaagttattatcttttttccccctttagacattaattatattcgaaaagttgcacgtgaccgaaaaaatataatagtaattaagtatcaatagagagggcacaaaattgggttagtgtttatgaatttatgtgcacatacatatatatagttcagcattcagataaggaagttgtttacctaattttcatagtttaatagctcaagtggatagacaatattttaattagaagttggaattcttgatggggaaggaaaggatcccaaaaataatcaaattaactttggcatatgataaaaccaaagtttcacattttacag

SEQ ID NO: 48048 - DNA, 1078 bp, Glycine max
  Clone ID: PAT_MRT3847_14393C.1
cttattgcttcttggtctgcaaaaaaataaccttattgcaagtttctttgttggacatggcagaaacgagtttctttgttggagttttctttctcctgtatgatattctcatgtttcataattgtgtacctacgacgttgtagaaaaagaagcacggatccaccgaagatttctcaagccttccttatatttgcacattgcttaattgctccctcttgacttactatggaatcataaaagctggagagtaccttgtggccactgttaatggcttcttcggcatcgtggtggagatctactatgttctactattcctcatatatgctccaaaagggagaagtatggaactgatattttggctgtgattttggatgtggctcttgtggcagcagcagtaattactactcaattagcatttcaaggaaaagctcgtagtggtgctgttggtgttatgggagcacgcttgaacagtgttatgtatttctcacctgtctctgacatgaaaacagtggtgaagacaaaaagcgtggagtatatgccattcttgctttcttttttcttctttttaaacggtggcgtttggttgttgtatgctgttcttgttcgtgatgttatcctcggggtgccaaacggtactggatttttactgggagcgatgcaattagtgctatacgcaatctacagaaatgggaagcctagttcaaataacagattagaagaaggattgcaacatgagcctctcatctcacagcctaataaggagtcacatcagataagggaagacaggcccatctagtttgtcttcatgttttaaagctccatatatgcatgctagctccaccatcattgtttgttattttcaatgtaagaaaaggtaaattagaagctcaaatgattgctttattcaattattatagtatattttgagcacatggatgtgagattgtttaaacttaataaaaaatcttaagtttatattttgacatacaattatattaaatatttataagaaaagttttgttgtttatagtaattttaattatgtggtttaagtatgattatttcttgtaaatatact

SEQ ID NO: 48049 - DNA, 298 bp, Glycine max
  Clone ID: PAT_MRT3847_14394C.1
tcgtgtcgtctttgattactttcgtagttctaatttttctataataatattattgtccagggaatatgcaactcataccatgataatatgttctatcatacaggtggaaatggcatgtctagtataagaaatatgccaacacaattttcataaatctatgtctggttgaactgctcggaaatgcaaacctccacaagtctttttatctgctttccaagcttcagtttcactagatgtctaacgatatttcttataggaggaatatatataccgggtagaaaatttcactactaagaat

SEQ ID NO: 48050 - DNA, 432 bp, Glycine max
  Clone ID: PAT_MRT3847_14395C.1
tggaacctttgggctgatttatgtgcttgcatggtcgtgagaagatgatagaagggggaagaagaagggaagacgaatccgagacggacggaagtggcgtcgttgtcgggaactacagtgggaacgtctcgtgctacgggaaatgtctagcaccatacctataaacttgtgtacggtagattcaagtatactgggaatgacacgcgggatgcggttacggaatgaagggataagaagtccgctgagtaagttctctttcttaaccaatactgccgccccgttaacgataccgcgaagaaaacaaatcgtctattcggacccatgatcgcgcctcagggaagtagggccaactataagaactaaaccttgctcgcccctccgcacgtaacctaatacaagacccacaaacacactcacgccttaactataaaa

SEQ ID NO: 48051 - DNA, 276 bp, Glycine max
  unsure (1)..(276): unsure at all n locations
  Clone ID: PAT_MRT3847_14396C.1
ttnagangaaaacgangaaaaaggttgttaagtccgaagaaaaggaacagcctttggttcacggnggctaatggancanagcaggaggatcccaangcgctttccaacttccaggatttcggaacacttgaggcacaaattgncngcgnagggtatcgaattcactntttcccattcaggccatgacttcgaacaccgttctcgatggttctnatttggtcngtcgnnntcgcaccggttcagggtaaaaanccggcatttatnttgcccatatta

SEQ ID NO: 48052 - DNA, 368 bp, Glycine max
  unsure (1)..(368): unsure at all n locations
  Clone ID: PAT_MRT3847_14397C.1
taggtcantccacgtccgaagtatgcactttctgtctctgctgactgtaaagtctaatggaatattgagtaagatatacaggttgagagcagaacaagcaagatgttgtaaacgagctaaaaaaaaaaaaaaaaaaaaaaaaaaaaaaaaaaaaaaaaaaaaaaaaaaaaaaaaaaaaaaaaaaaaaaaaaaaaaaaaaaaaaaaaaaaaaaaaaaaaaaaaaaaaaaaaaaaaaaaaaaaaaaaggggggaccgttttaaaggatcaaagttaacctacgctgttatgcaaagttttaactttttatttgggtcccaaaaattaaattaaaaggctgatgattaaaaatgaggtaattggaaaaacc

SEQ ID NO: 48053 - DNA, 356 bp, Glycine max
  Clone ID: PAT_MRT3847_14398C.1
gttgtgtgggggtggctttctttctatacccacctgtcctctgctatttgggtgggggttcctgcctcggttggccttgtgctgtttcttaaacgcgggatctgcgtgcagcaaatactgctggctgacgttttttttttgtccccctcttactctttgcttgcggggggaccaaatctcgctctccccgcatgcgcctgttctctgtcggtgcgcggtctctccatggcctattcccgcgcgttggccaccctcttgcccgtgtctcctctgctttgccttggccccagacctttggccccccttgcctattgtccgcccacgtcccacttttctgttggccttcgctccacgct

SEQ ID NO: 48054 - DNA, 473 bp, Glycine max
  Clone ID: PAT_MRT3847_14399C.1
aattcggcaccaggtcttggctccctctgcgacctaaattaacactagatatcattctccctaatcttcatccttgaatcacaaaaccaaagatctcagttccccttccacagtgcttccttacagccacagctgccgatgtcggcttcccgcagtggaagaatctcatggccgcaatggaagtcaagaagcaacttgaaaaaaaataaaaaaagaatcctttgctctgaatctcacaaactcttcccaacgccaagcaagctcaagaactaaaaatccataaaaccggtgagccccaattttctgaaagcactcttagtccccaatattcaacagcggcggcggcggaagcgacgaacgagaagcaagcgcagttgtcttgccgtacacattttcgtcggaggggggaagggtgtacgtgaaggttttgacggggaagtggaagtcgccattttcgtcagtcatgtctacat

SEQ ID NO: 48055 - DNA, 477 bp, Glycine max
  Clone ID: PAT_MRT3847_1439C.1
gggactgtaatactttattattagaaaatttgaataattttttcttggatatcaaaatgataatttcttagatcttcttgatgtaaggttttgatgtgcctcacacttatataaatggtggcttcattgatgtaatagtatgtctcttgtgtgtttgtatgaacacactccattaaatactaccaaatcatttcatttcatgattatattttcttacttcttgacatttcttaatggagatttgttgttggtaatttgtatcaatagagattcctgagaaccgaaggtggatgtattagaggttggatgctaataaatgttggacaaataagtttagagaaggagtgtttgaatttgtatagtttgttactagtcaggacatgcttcaaatgcaaggagaacaaacaaggtgtccctgcaagaaatgcaaatataatgttttcaagtttgttgatgatgtgatgagggatctttatg

SEQ ID NO: 48056 - DNA, 356 bp, Glycine max
  Clone ID: PAT_MRT3847_143C.1
ttaatagtcagcgatggcacagaagagatttatcattaaaggctagaaggccaaagaggccagcgaaggaaggccttgtagaggacctgtctatggtcacctcttctccaaggatggattccctgctcctatacaaggtctcaatagatgctgagacgttcttcgagtgtctgatgagaaatatgcatgaaatccattgcttgttcaccaggaaattgtcaatgggaagcctatcaagtacaaatggctaacatacaatgaaatatatcaccagtgcatgaatgtcgggaattatattcacagctgtggctatggagaaagtgtaaaatgcgcgatttactgtgctaagactgcat

SEQ ID NO: 48057 - DNA, 334 bp, Glycine max
  Clone ID: PAT_MRT3847_14400C.1
cgcgcacggaatcatagagtggcacgttgcggtgcgagatgctgttctgaatgtactaatgaagagaatctatatctgaatcggaggataagacgagggattacgtgtcggaagcggtgccggcaactgcgcccgcaagtatcttcacctgggggttgacctggccgctgtcgttgaggcttatggacacgctcatggacacccgctccaacttcgactccgaattaacctagttatcaaccgcggtgtactaccaccagttcctggaacactgactggcccaccgcctcggcaactactttttattcgacttaaaattcgacacacaatcctt

SEQ ID NO: 48058 - DNA, 336 bp, Glycine max
  Clone ID: PAT_MRT3847_14401C.1
tggccggatttcattgatataacgttttcgtttcttgatcgccagccctcacaacgtaggacattcaagtgacagtagtaagatggatacactgtgaacaccgtggaatcaggaccctttgaggcatagcttcacacaatcctctattgaccaattggggggtggaataactgtcgtcacaactgggcactggctcacacttatacagaatgcctctatttataactggaggagcgttgccgcttaatactatggttatgaatttgccaaaagctggacttccaatgatgcgatattcagaaggagagctcgggtctgattggtacaagatgactt

SEQ ID NO: 48059 - DNA, 103 bp, Glycine max
  Clone ID: PAT_MRT3847_14402C.1
gccggccgaggccgtcaggtgcgcgtcgatcttgtagctggccttgatgtcgaacacgctgtagctgctgatgccgccataggtgtcatggttgctgtcgctg

SEQ ID NO: 48060 - DNA, 674 bp, Glycine max
  Clone ID: PAT_MRT3847_14403C.1
cggacgcgtggggttaatatgatcttttagttattatataaaatatataagtttattatatataatttgtgatcgaacgattatatatattttatatgtattgtcaccacactaattaattatattcttataaaaactatatttacctcaattaaagagacaaataagagttaaaactttaaatttgtactttgtttcatttcactcgaccaaccttgtaattaaattatcaaaccttttttgaatgaagtatgaaaatacttttttgttttaattttttgatttattagagaaaagtaattttgaccaatttaaaatttgatcaagaaataaataaaaatgaatttggtcgagagatcaataaaatatgagaagaaagtaagtaaaaatacttaaaataggaactagttggatgatacgaatgtttttgggtgaaaccattgtacggataacatgaatgttttctacttttggcaaaattgtaaattgttctttcactttgtcttcaatttacaaatttggtatcttattcttataaatccttataaaattggtcttgtaagtccgattgggacgtgaaccattaacctcaaactgtctacgtgtcaatgtcacgtgtcaatggtttgagtggtttcatgtaaatgctttatttttttgtaggtaaaattata

SEQ ID NO: 48061 - DNA, 245 bp, Glycine max
  Clone ID: PAT_MRT3847_14404C.1
ggctcgagatctcattcttcacctgcaactatttggattgctgatttttggtacattctccactttttagagtttttttccttccaatttgttcatatggatgatcattaattattgtccaaaagttgatatttttttcatgttctttctgcagttaataccatatttactgatattggcgcatttctttgagaaagttactaattcctagatagaggcaaaaatgttgggaattttcaaggaga

SEQ ID NO: 48062 - DNA, 248 bp, Glycine max
  unsure (1)..(248): unsure at all n locations
  Clone ID: PAT_MRT3847_14405C.1
ttttaacgatcggagtaagtggagaggcctgatnagaaaaactttgattgaaacattctatactattggttaaaaagacgggaagagagagagactttttcttgtttgactcacaaggaggaagaagaaatttagaaaataattcacttttgtattcttaaaatttggatttcaaaatataaataggagtatttattcaatacatttgtattttttaaaattatcacacctcccttccaaattttcca

SEQ ID NO: 48063 - DNA, 429 bp, Glycine max
  Clone ID: PAT_MRT3847_14406C.1
ggaaaatgttaaatttatgttggctagctgacttgatgggagtttctactccttgatatattgctgtgtagttttttcttttgggctttttaacccgccctttcaataccaataaaataaaataaaatccatgagtagcataaatacttacttttttactcaggagtcaagtttatgcgcatttaacgacccgagtttatctagaaaaagagtttgatagtgagttaatttgttttctctacctagaatagtaaacttgcaagagtcggagttaactcaagagtttgacaacaatgctccaaaggttcttatcaattggcatcagagccttcttcctccatgtctcagctgcaaaccagtggcatagtttttgctaggaactaatcaaaaggttaatgcactaccaatctgcacgggcatcgggactgt

SEQ ID NO: 48064 - DNA, 237 bp, Glycine max
  unsure (1)..(237): unsure at all n locations
  Clone ID: PAT_MRT3847_14407C.1
ccgggccgaccacgcgtncgaaaaaaaaaaaaaaannntaaaaannnnntattattgtgttctgncgctctaaaagaaccaagcggaggggcccgtccatgcaacggcttcactcttacatacgcgcacctaaaaccaattaactggccatcgtgttacaccaaatgtaactggaaaaaccctggcttaaaccaacttaactggcaaaaccacatcccccctaactcaactggctta

SEQ ID NO: 48065 - DNA, 496 bp, Glycine max
  Clone ID: PAT_MRT3847_14408C.1
tggatcgagccattttataaatgccaaaaacactttcacgttttctcattggaaaattgatgaacatcggtgggggtgattatggtgaacaggaaaagtaaacatggttgaagcaaaaaggtttatggaggattctttataaataaaacaaagcccttaatagtgaaaagttgatgcagaaccatatctattgtaagaacaggaagattggacagaaatacactcaggactaaaagttgatgaaacatagaacgtaggaggatatggccttgaatggaaggactaaagttaagtgtgatttattggatcagaatgggatgatgctttaaatggaatggggcggcatataacaatatttattaatgagaagaatacaagatctgaggtggtaagacttatacaggtagctgcaggaacggttgccattgattaaagctagtggaaggaaaatggtagaaaagaacgattaaatttgactaatttaatttcaattgtt

SEQ ID NO: 48066 - DNA, 206 bp, Glycine max
  Clone ID: PAT_MRT3847_14409C.1
gactacgacggtcggggaaggtgcatgagtttgttccgacctttaagcttgtttatcgtgaggagaatatcaggttgtttgtcttctttgctgctgcactagatttggtagcatggccatgccatggcgcaggctaccaaaggttccctctccgaatgaacactggctattggtgagcgttcttcccacgtagaatgcccacgttt

SEQ ID NO: 48067 - DNA, 1054 bp, Glycine max
  Clone ID: PAT_MRT3847_1440C.1
gtctaagggacttgtcttctcccggaaaaagtggcagcattttctatctttctaaagatgatagatttgtgataaagactgtgaataaatctgaactaaaggagatcatgaaaatactcttataacaaaattcttcgggctccatcggataacattaagaggtggaaaaaaggtgcgttttgtggtcatggggaatgtgttttgcacagaactacaaatccaccgccgatatgatctgaaagggtctaaacaaggaagatatacaaacaatgataaaatcaattgcaacacaacattgaaagatcttgatctaaaatatgagtttcacatggataaaaaattgcgagaatccctactcaagcaaatttccctagattgcaagttcttggagtctcagcatataattgattacagccttctgttgggattacatttccgagctccagagaatatgaaggccttcgtggaacatcatgaatcagtgcagcgtcaggagagtttaccttctggagatgaagggcagctcttgattcttcctaaaggcttgctgttagtttcccatgaaccgagtatagtcaacacggctcctggaccccacattagagggaacacattgagagcatactccatgggtgataatgaagttgatcttctacttcccggtattgcaaggttgcgggtgcagcttggagtaaacatgccagctcaagctactcgcaggcttcaggaggataaggataaggtggaggcaaaagaagtagagctttttgaggtatatgatgttgtcctctacatgggcgtaattgatatattgcagaactataatctgagaaagaaaattgagcatgcatacaaatcgctgcaatttgaccctatgacaatatcagtagttgaacccaagatttatgatgaacgtttcatcaaatttttagaggaaaaagttttccccaagaccccctgattttatttttctcccatacgtcacttcttggcttaatccatatatgtaattaatttgtttctaattaaaggaagagtgttttttgtttttttt

SEQ ID NO: 48068 - DNA, 1498 bp, Glycine max
  unsure (1)..(1498): unsure at all n locations
  Clone ID: PAT_MRT3847_14410C.1
ctttcgcgtccgtacggctgcgagaagacgacagaagggggaggttggtaagacggtgaaatccgaacccctccatcaaagtgaagaaaagagaagtaggctctacggttttcgcgagtaagtgtgggtcagaattcaaaatccgaatcagcaactccaattcaaaaccggttatccgaatcgaaatttataaaagtaccaaatcctctgtgactgctagttaatcagagagagtagtgagccaaagctgggaagttaaacttggttgcatgcgaagagcaagaaatatgagaccaaacatcgtttctgaggccgggttgcctactaggatgagtcaatggtgggaaagcattccgtttctcacttctgcagtggtggttgtctgtggaatcatttacttggtttgtcttttggttggatatgattccttcaacgaggtttgcttcttgccgtctgcggttgtttcgcggtttcaagtttaccggatttatacctccattcttttccacggttcactgcttcatgttgtcttcaacatgatggctttagttcccctgggctctgagctggagaggatcatgggctcagttcgcttgctttatgtcattattttggtggctacaagcaatgccatattccatgttctcatagcactgctggtggcgcacaatcctttacttacatatgattacctcatgaatgagtgtgcgataggcttctcaggagttctattttcaatgattgttatagagacaagcctgagtggagttcaatcaaggagtgtgtttggattggttaatgggcctgccaagtggtatgcattctttttggtggtagtgttccagcttctcatgcaaaatgtctcactacttggacacctttgtggcattttatctgggtttgcatatacatatggcttgtttaatttcctcatacctgggacatcattttattcttccattgagtcctcctcctggttttcatcatgtgtgagacgtccaaaatttatcggacgcgcgggtggaaatccttcgggttatattcctacacatacaagccaaaattcaacaaccagtggattactttctggaaatgtttggaggaacctatcatcatttatgcctcaaagggaagtgtctgctcagtcaactgaggacagtaggttccctgggaggggaaggacccttggtgctgttcaaggtcaaactgcttctcatcttcattcagattcaaaccttcaagctagacttttggaggatagcagtcccaatagtcctttagattcatccactcctagtaatcctcaacggttgtccgaaggaaggcattcagttgacaatgtagctacagcagctgctggtgttctacagaatcagggtgcagctgtttcggaagaagggattagaaaacttgtatcaatgggctttgataggacgcangtggaagtggcactggcagctgctgatgggatctcaatgtgcagtggaaaactcatgag

SEQ ID NO: 48069 - DNA, 309 bp, Glycine max
  Clone ID: PAT_MRT3847_14411C.1
cggctcgagcggctcgagacggctgcgagaagacgacagaagggggaaaaataaatagtaagctgtgggttgaattctgttgtgtaaacttgttgtaggtttattgggccgatttgtctcgttatatatgaatttttgctttgctgtattggttaatattggcactccttcaatgataacatgattgtccttttttgtttgttgctgctgattaaaaaattactataataatcaaatcacttattaataaatattatttattgcgtccccccactttttttgcctctttttccctggataattattttt

SEQ ID NO: 48070 - DNA, 1008 bp, Glycine max
  Clone ID: PAT_MRT3847_14412C.1
tttttgctcataaatctcatgttatcgttgacgctctaaatattatattatgatcagctcaaagcctacagcacatagatttcattcctcttctgattttataatatgagatttcattaactattctacattctactcttcatattaaacgttcacacttaaatgatccctcaattgtgtccagaatccatcatctcatttcactgcgcacacacctgaaagttggggcacaaacgcatctgccgaccaagaacaagaaggcattgtttgcacaatgaacaaaaaggcaatcttctgactgaaaattttcactgtcagaattttgttctctatataagctgaacgcaagtttaactttcactgttaggatttgtattctatataagcttctttcaaaactgagcatacaatcaacttccgtttagaccattatggtgagaaagcagggtcaggtttggggttgatcccacttgaacttcctatgctttgaaatgaggcccagagttttggcgcccgtcgtaatttaaaagctctgcaagggatccttttggtctcttaccaaaacgcctagtacctgttgctggcttgcccaaagacgttgcgtttaccatagtggttagtgtgtccacaccttctaacattgctgacacaccaatgcacccatcacatgacagaatacaagctatagcatgcacagatgccgccatgatgggaggaagtgtattccttggatgtgtgactttgtataaaattgctgctgataatcgctctctcaagcagtatagctgagcaacatcaattgctgttgaacgaaaataaagccaacggtccatgattactttaaccatattatcaggagaagacatcaacttatcctcacggcctccactggactcggcatcaaactccatcccatcttcacttccagcttcatcttcactacctactgcatcatccacatccccctcgtcattttccggacgcgtgggtcgacccggtaatccggac

SEQ ID NO: 48071 - DNA, 228 bp, Glycine max
  Clone ID: PAT_MRT3847_14413C.1
ggggggaaatcttaaaatactttttttattggggggaattaaccctttttttttttttggaacaaatctatttcaggttcctctggcacaggaaagaaagtttatcaaaacaaaatttggttaataatcattgaacaaacctttatgggatccacctaattaatacacccttctaaatgggaaccacctcaagatttttacatttatttctccatccccaatagtttt

SEQ ID NO: 48072 - DNA, 354 bp, Glycine max
  Clone ID: PAT_MRT3847_14414C.1
tattctttttattaatgcgtccacaagaaagccattaacgcgaatccacatggttgtaaagaatgtcacaaccgtttgtgctgaattcatcttcaaacaccctatacaatgtgaaacatataatttgattccatttatagaggtgcaatccaagatctataacattggggccaaaatccttaagggcacaaatctgcttctaccccatggaagacatatctaacacagaaagatcttggccctcaggatatccatcctggatctgcataaccagagttccatcgatgagaactctattgcattccttagaacaaccagtctcatgtgacagactaacctagttttttaattgaa

SEQ ID NO: 48073 - DNA, 223 bp, Glycine max
  Clone ID: PAT_MRT3847_14415C.1
cactgagcagcgctctagctatctcgatcgaactgtccaaggtcctgtcacgagcaattgcaaatagattaactagcacagcaaatacatttaacactggagcagagagcgggagagatgaataaggatagtataaattggaactgcaagttaatgagtgagcacaatcagcaacacggccgttaacaggacacaagcagcccgcagataatgactcccattg

SEQ ID NO: 48074 - DNA, 408 bp, Glycine max
  Clone ID: PAT_MRT3847_14416C.1
ccacgcgtccgaccgattcaaaccctgaacagagccctaacagacacaactcttatatgttgagcgcctctttttaacctatgccggataccaccaatgagagctgcgatgcaacctgatcaccaggaatgggcaatgacagagggcgagctgcaccaacatgtacgaccgtgcggaccacccaacagatgatggagagatcttaataggcgaccacaacatcgccgatagaatatgccatggtgctacgggcatgtgctgccggagcagaggaacacagcaacatgctggccaccctaaatgctacagcgcttgtacacgccaaagatgtaaagcaaaccgatcagcagaaacatataacttcattaccgatgtgaaaagatatgccagatgaatgccatgtgcatg

SEQ ID NO: 48075 - DNA, 209 bp, Glycine max
  Clone ID: PAT_MRT3847_14417C.1
gatgaggatgaagatgatcaccatgacgaaggactagaaggtgatgcatcgggtaggtcggcgcagaccagctgtgaagagaagactcgcaaggcaatgcttaaacgtgggatgacaccggtcacaggtgtcagtctagtgacactcaagaagatcaggacgagctggttcgtaatctcaaaaccagacgttttcaagagtccaatatc

SEQ ID NO: 48076 - DNA, 389 bp, Glycine max
  unsure (1)..(389): unsure at all n locations
  Clone ID: PAT_MRT3847_14418C.1
nnnnttgctccngtgcagaatgcacgaatttataagcacgcatgcacgcgctcgtaatctgggtagtgggatacagactgagtcacgcagggtccatgctccaatccaacggaccatgacctccatcataatgattgagcgttccaacatgagctgatggcccagaacactctgccacattagcattaggaccttgtggcccaagctggccttgcaccagcatgggagggagactcctgatgctgtcaccttgagagagaaccggctgcattgaatgctgctgtaccagatatacatagatgctggaggcatggatgggacgataacatcacagctattgaaatttgttgctatcatgagaactaatgagactgaacttggccgtctta

SEQ ID NO: 48077 - DNA, 693 bp, Glycine max
  Clone ID: PAT_MRT3847_14419C.1
ccacgcgtccggccgcgtgtatcgtactcgtcgcattttccgtgtctcattaaaccctagttatgatcggtcaaacgcaaagtttgttcttattttgccgatcgaacctcgatctggttctcaggggtgattttcgttggaggtttcggcggcaccggtgattatcgtacgtgatctttctgcggtggatgttgatggtctcgtgtcgaaagactcgaatcagagtaattaacgccagattcgctgtgtaatttagaatttattggtaaaataatcctttaggagtttatattttatatggttattcgatattcgatctgattggttgaagtcaaggttttaaataacggattgcaattgcgaccgcataggtggcatgtggcatttgtctgcgatttgccgcgatatcaataaacgcgataaactgcaatgcgactcgcaaccgatacttaaaaccttggttgaagtgtggtggttatggttgatacttgcgagagaggagtgtctgtgagaggtatatatatacagcaagaatgcaagatagttgtcctgtttttttttttttgttattggtaatggacctttgccatgtcaggtgcgcttgcatggcgggtccgaaaagcgctaataaaaattaatattgttttttgttttggggagggaaggtttcgggggtggttttttttttctttt

SEQ ID NO: 48078 - DNA, 569 bp, Glycine max
  Clone ID: PAT_MRT3847_1441C.1
ttttttttttgggggggggtcttatttaatcaatttccggaattagaggcaatgacagttgcagtacttttgaagaaataaacttctgcaattaagagaaatataaaaaataaaaaattgttaaatagtataaaaacattctataaataaatatatctcttttttttagttataaataaataaatctctaatctttatacgtagatgaataagtatagtttgactacgaataaaataaaaaaacttgtaaaaacatttttcttaaaaaattcttatgaaagaagcaaaggactgaactacttgatagactagtaataatttgatctcgatatcatcgggacgccgcaattttaatttcaagggccatcttcatcaattattcatttctaattttttaagggagagaaaaaacaccacggggtgttgggcttcgagattcgtgcaccatgatcaagtggcacacgcctgaatcatgtcattcatttatttatttatttttgggtaggggggtatgtccgactctgtgatctacgaaactcaaatttacaatattagattatatgtgctct

SEQ ID NO: 48079 - DNA, 2392 bp, Glycine max
  Clone ID: PAT_MRT3847_14420C.1
gttgccgcgtgtatcgtactcgtcgcattttccgtgtctcatcaaaccctggttatgatcggtcaaacgcaaagtttgttcttatttcgccgatcgaacctcgatctggttcttagggatgattttcgttggaggtttcggcggcaccggtgattatcgtacgtgatctttctgcggtggatgttgatggtctcgtgtcgaaagactcgaatcagagtaattaacgccagattcgctgtgtaatttagaatttattggtaaaataatcctttaggagtttatattttatatggttattcgatattcgatctgattggttgaagtcaaggttttaaataacgggttgcaattgcgaccgcataggtggcatgtggcatttgtctgcgatttgccgcgatatcaataaacgcgaggaaactgcaatgcgactcgcaaccgatacttaaaaccttggttgaagtgtggtggttatggttgatacttgcgagagaggagtgtctgtgagaggtatatatacagcaagaatgcaagatagttgttctgtttttttttgttattgttaatggacctttgccatgtcaggtgcgcttgcatggcgggtccgaaaagcgctaataaaaattaatattgttttttgttttggggagggaaggtttcgggggtgtttttttttctttttggccccgattctcttctctctctatggtgttgttgtgttttttcctttcctttcttttcctttctctcttctatgtcctgtgaatttttctatactctagttcgcgtcgtaagggctcaacaacatgacaaagaattggcaactcggcaaggtacatattacatagtgctgaacgtacgctttaatttattttaatttcgttgtttacaatttaattcaatttttcaatatatataattaacatggtgcctcgcatgtaattaaattataattggctttatagtttcgtaatttaaacaaaaaggcaatcgctacaattgactgcatgttttagatatttgttcacagtatggtgttatggtttcgtaagtaaaatggtttatttactcgtatgtatacagtttaatgtttttgtgattagaattgaattgaaagtcgcttactattaaatgattcgttaaatatcgtaatcactatacaatctccttcaaaagagatcaatgtagctagctcgctcttgactgtatgatggtttacacccatgtatactgtgacgtattttatattttcatgatttggattgaatttgaagcttcttacaattaaatgactcgttcaatatattgtagtcaggatacaaatctacttcgttcaccataattttgattgatttaattaactattatgttcactataattttgattaatttaattaactattaatctttgagaatagcaataatttttaatattggtttcgagtttttaacttgttcaataagaagttgcaagttttatttatgttcagcatacatttgctatttatcaacctatatctgtattttaaatcagatgtagaattgtgcctgtattttagggttgattgatgttttgctgccattgtaatatgtagcttttagttgcacctgtacttggttcttttggggatatgtgggagtttgatgtattatatataaaatgtgccatggatagcttatgtggcaatgagagtacagatggctgtaaataactgcatgtagtgtagcttcaagattccttccagtcttctgttttggatcatcatcagatttggccttttttcaagaattgtgcaactgtattacatattcgtcgagtttagatgtctgaagaaggagcgagatatctgccagatgatgaaataatgcatccttatgtttcgcgaagaagcagggaaggacattatgactctctgcttgaggtttatgttaattgtccttcacttgaaggaaatttaatttaagtgatgtactgtttgatcaagagatttggctttgctgcatcatcatcaaacgattgtgctatgccctgtcctgtaataatctacttcgatagtcttgggtggatgtttttgtagccttgatcgttgttattgaaattcatcctcattttctgtagttcttgggaacaaagtatttatcactggtttgtgttcttctctactttttactttgataatgttgaaacagtttccggaaacagtctctttgcatatgcaagggtaaggttgtgtacaatatccctcccccataccttcgcatagcgaagagtctctgggcaatggggtacgaattttattttttttaatgttgaaacagtttgtccaggtctctttctataaagttttctattttgtagactatttggagtagtttgactatggcaagcgcactt

SEQ ID NO: 48080 - DNA, 742 bp, Glycine max
  Clone ID: PAT_MRT3847_14421C.1
ctctcgtttccgcggacgcgtgggcgttgccgcgtgtatcgtactcgtcgcattttccgtgtctcattaaaccctagttatgatcggtcaaacgcaaagtttgttcttattttgccgatcgaacctcgatctggttctcaggggtgattttcgttggaggtttcggcggcaccggtgattatcgtacgtgatctttctgcggtggatgttgatggtctcgtgtcgaaagactcgaatcagagtaattaacgccagattcgctgtgtaatttagaatttattggtggcatgtggcatttgtctgcgatttgccgcgatatcaataaacgcgataaactgcaatgcgactcgcaaccgatacttaaaaccttggttgaagtgtggtggttatggttgatacttgcgagagaggagtgtctgtgagaggtatatatatacagcaagaatgcaagatagttgttctgtttttttttttttgttattgttaatggacctttgccatgtcaggtgcgcttgcatggcgggtccgaaaagcgctaataaaaattaatattgttttttgttttggggagggaaggtttcgggggtgttttttttttctttttggccccgattctcttctctctctatggagttgatgagttttttcctttcctttcttttcctttctctcttctatgtcctgtgaatttttctatactctagttcgcgtcgtaagggctcaacaacatgacaaacaattg

SEQ ID NO: 48081 - DNA, 185 bp, Glycine max
  unsure (1)..(185): unsure at all n locations
  Clone ID: PAT_MRT3847_14422C.1
tacgcctgcgaaaaaacgacagaagcactccacgtagggtataangctctcaacagtcccacaaggccggatacttgacggcatggcattgatatgccttaacctgatctatctggaactctgcgtttgccctacactcgatggtgctatgctccagctacactatgatcatgtgttgcaggctc

SEQ ID NO: 48082 - DNA, 341 bp, Glycine max
  Clone ID: PAT_MRT3847_14423C.1
acgcgctcgcgttcgtccaaccctccgaccgtggttgaggttgaacacgcgtctaacgactatgtatgaaggagagtggtcctctacaactggcctagctgaaccatcaatgcagtgaggtgcattgaccaacctagcccactaggactctaatgagttgatctaaagtttgcctgcgacgttcaacgatcggattccatcggcccaagctcgtgacgcccattaacaactctaagaaactgactccaaggttaccatacgcttacacactgcttatctgcattatatatcccaaggttcataaactcttgatcaatgaccatcgcaccatgacactgaaa

SEQ ID NO: 48083 - DNA, 1038 bp, Glycine max
  Clone ID: PAT_MRT3847_14424C.1
tgccgttcactcattcattattaggtaaacaacacaaaaaaagaaaagaaaaaggaaagaaacagtcacaacaaaaaaagaacaaaaaaaatccaaatcatcgatgggtggtaaatctggcgtggtttggattttgctggcgttgatcgccgccgcttggtgtctgttaactccagcgagggcgaattcgacgacaatatatgaggagctccgggcgcagggtcttccggtggggcttcttccaaagggaatagcgaagtactcgatgaacgcgacgagcggggagttcgaggtgtggatgaaggaagcgtgcaacgcgaagttcgagaacgaggtgcactacgactccaatataaagggtgttcttggctacggtcggatcggggaattatccggtgtgtcggcgcaggagctcttcctgtggttccccgttaagggtattagggttgatgttcccacgtcggggctcattcatttcgatgttggtgttgcggataagcagttctctctttcgctctttgaagatcctcctgattgtaacccccaggcccaggttaatgttggtggtgaaggtgagcaaagggctgtttggtagaagataggaggaatgttgctgcatttcaaattatacagctcaatcggcccctctatgcctgtggttggtcttcattgatatatatatatatatatatatatatatatatatatatatatatgatatacagtgcggtctttttcatatctgctgctttgattgaatcaatcgcctgtctcaagggactaaggatgacaattttggtggtccgcaagcatatggtttttttttggcaaaatctgtgacagacaaggatgtagggttaggttggttttgctaatataccaaggttttactatctgtattttggtcttgttatttgtgcatataaatgtttcagacttgtgttagattcaactatattatattaaacaacataatctgttaggtggttcttctattatgattttctttttatcaatgattcttctattatgactgat

SEQ ID NO: 48084 - DNA, 498 bp, Glycine max
  Clone ID: PAT_MRT3847_14425C.1
tcggctcgaggccctctctctagacccctgtacttaaacgccgccgcaaccaaactccatctgggggcttctttacactgcctttggcaccgaaaggggggaaaatataatcaacaccgatttcgcgaccaaatcttctactgcgagaactgggacaacgagaaaccggatctcagtctcaggcaggaaacaaaaaccgcctttgagcgcaaaaaaaccagagtacagacgcagggcctccgtccttcgaaactgcgccacaacctagctggaccggcggacaaaccatgccatcaagcgcctccagacggaatacagagcccctcgccaagagccagctcctcatgccgaggctcgcccctccccagagacctcccggagcggcatcacactgatggagggcagtgacggaaccccctcagccagcgcaactaccaagggaaaaccaagactccccccgaataaaccacctaaccccccggaaacaacccgaccacc

SEQ ID NO: 48085 - DNA, 170 bp, Glycine max
  Clone ID: PAT_MRT3847_14426C.1
cagaagcagaatcaaagggaagcgaattcagagccaccctcaactaaacattgatatattctatggggtggatgccatttcgtgaagtgcaaattttatcaaatgaagatttggttacttaataattcttttgtgttaagttatgttaaaaattttcatatatatactat

SEQ ID NO: 48086 - DNA, 174 bp, Glycine max
  Clone ID: PAT_MRT3847_14427C.1
ggaaaaagaaaaaaattactaaaacccaatacgaaagaaccatttgggtcacaaaacataactttatccgacgaagttcaatggaccattaagtggggcgaatcaataaacaaacaatttatagggtgaaacgctaagaacacttttccatgaaaactcagtagaaggcagaaa

SEQ ID NO: 48087 - DNA, 338 bp, Glycine max
  Clone ID: PAT_MRT3847_14428C.1
gaggacaacgcgagcgggtgaatggttcaccgctcgagtgtctgcatgtggactatttcatatggcatcccctagtgcaccagagacatcaaagacagagtggcgatcgatatacagtcgggtctgacaggatgatatgcctatggctagaggggcgggtgcgtcaaatactgggaaattgggtgcaactgctgaatatgctgatttgaaggctgatgtcatgtcaatgtttgacgatcttactcaagatgatcatgatgctgcccaatagatggctgaggagggctgtgctggtcttggcaagctggaggagccacaagattgtgttgcacatatac

SEQ ID NO: 48088 - DNA, 556 bp, Glycine max
  Clone ID: PAT_MRT3847_14429C.1
attttcgctttggttttggttcagtacgcaaccatggggttttcaggccaatggtacgattttctaatattattgttgttttctaggaattcccttttctaatccttactcaacgttcaacatgtggtgcagagtggtaattggttagcagtgttagaaagagagttggaggaaaggctgcgtacacaacctcaacagacaccaaagatgaaagcgtatgcacctgcggctgattacgggtacgttcaccaccgacaacatgggaagtctgacaagttcatcaagcaatccttcttcaggaaagtggcgcacgtgcaagaccgtagctaccctaaccccattctcagagatgcctatgcttatacccctcgtgtcgatccctcgcacgtgtaactagacaattagtctagtttttgcttttgttacactggataaataaataaaatagaacaactcaagtctatgtctctctgcctcttctatgtgacttgtgttctggcttttaatatttcagctttgtgcgtatatgcataagcgtaatgcaaaatatgggcat

SEQ ID NO: 48089 - DNA, 398 bp, Glycine max
  Clone ID: PAT_MRT3847_1442C.1
cttaggcgttcgaccacgcgtacggtggtgctgataaggcactcgcttatggtgcaaaagcaaaaggagctagggtagagattgcaaaccgtacctatgaccatgccatacaacttgctcatgcagtcggaggatatgctgtaacccttgttgactaaaataatcaccattcgaaggacggtttgattcttgctaacacaacattaattgtaaagcaacctatagatgatgagacggctgtttctaagcacgcttctgaaatattactggcctaggtggtgatgctaggtacacgcccaagattgctagactcttgctagaatgctaagaatcaggagccactattgtaacaggattggcaatgtatattgcgcatgcatatggacagtatgagaatt

SEQ ID NO: 48090 - DNA, 371 bp, Glycine max
  Clone ID: PAT_MRT3847_14430C.1
tcacaggtggccggaccttagaaccgttaacaaaagcatgcgttacttgatttcaagaatctgacaattatctgcctactactgggtgtccgactgcttcagggaaagaaaatcactctctgtgctggccacagactcaacgaatcattggcttttccactcttagtatatgcgctgaacactctctatttgatataggactccgggtcagattcaaactccttgtggcactttgtaacagtctgcttaacatgcgagctcacgctggtgaaaacttggattagtgctcccactctcctatctggtctaggactacgtgggtagactgtattatgtgcgtcctttctctcactctctagttcaactgatcc

SEQ ID NO: 48091 - DNA, 332 bp, Glycine max
  Clone ID: PAT_MRT3847_14431C.1
tctgatcttaacagattgagggtggcttctgtgtcactaaagtcaagactagaccatgagaagactgttctggtatgccttaatcaaagtctgcaaaagtctaggactgaggttgtgtatcttcgacctgaactgtccaagtctacgtcatccatagcttggatacagatgatggacattgaatcatgagagatgatgtctgagttgccctacatgctgctataagcatcatatagaggctgatgaggtcaaatcacttgctcatgcaacttaggcaaagctaatcgaagcacaagacgaggttgaaccagcctatgctacatgcagcacat

SEQ ID NO: 48092 - DNA, 544 bp, Glycine max
  unsure (1)..(544): unsure at all n locations
  Clone ID: PAT_MRT3847_14432C.1
cgggcattctcttaagcaaccgcgtcatttccatgcacgctcgattcaaactncttcccctaattggtgcttcttcgaggacaacatgctccccgtcgaagtcatcgacaacggcctcacctccctcgccagcggctgccctaatttgcgccgcctccacgtcatcggcaccaccgagatcggcctgctcaccgtcgccgaggagtgctccactctgcaggaactcgaattgcagcgctgcagcgacaatgttctgcgcgggatcgccgcgtgtgggaatctgcagattctgaaactcgttgggcacgttgatgggttctacgattcggtggtgtctgatattgngttgactattcttgctcaggggtgcaagaggctcgtcaagttggagcttagtggctgtgaggggagctntgatgggattaaggctattgngaagtgttgccaaatgttggaggagttgaccttctctgatcataggatggatgacgggtggctcgccgcaatttcgtactgcgagaatttgaagactttgaggtttcag

SEQ ID NO: 48093 - DNA, 256 bp, Glycine max
  Clone ID: PAT_MRT3847_14433C.1
gaatggaaaaatgttatctcataagcgaatttttggggtggaaaccccgactaaaaagattttaaatgctacaccatcctgcgacaccctctaaatttttaaagaaaaaagaaagctgaatttttttctggtttttagcacacaacctttgggccgtctgaaaacgaatcgaacctattgtttaggctctttcacaccaacacctgctcgctaggaagatctgatggggttttttatgagagccccacaaaaactc

SEQ ID NO: 48094 - DNA, 461 bp, Glycine max
  Clone ID: PAT_MRT3847_14434C.1
ttgggggggggggggggggggggggggggggggggggggggggggggggggcggggggcccgggggggggggggggggggaaaaacaaatcccccacaactaccccttcctcccatttgtgggaagtaatttattttcccggaattttacccttgggggggctctaacccggttttcaccccccaaaatttgcttggggttccccagaataatttttgcaatttccaaaggccccttggccccttatttactttttggtagaagggcctaccccaatttggttggctttagattaatttttgggccaactgcggcccaaataagaaggggtttacctgtgtgtattccacataaaacaaacttgcgtggggcccttaaactttttttccccccaaaacatttccccgatggctcgtatcccattttgggctgcccggactttaacggggtgttaagctttt

SEQ ID NO: 48095 - DNA, 163 bp, Glycine max
  unsure (1)..(163): unsure at all n locations
  Clone ID: PAT_MRT3847_14435C.1
catattattttcacatgaagattgccgggaacaggaagcaacggctgatgagcagggtggtggtgaagatgctctagtctgcactctgtgcattgctgangtgcgcaagttcagcanacattgtagaagttgtgattaatgtgttgattgcttcgatcaccac

SEQ ID NO: 48096 - DNA, 353 bp, Glycine max
  Clone ID: PAT_MRT3847_14436C.1
agccccgctacgttggacgtgcgcgattcttcgtcaactttaacacaccgtttacagtctcaacggatacgatcaggattcgggaccgtgccgacgtgcaacgggtccgtcatatgcgaagatctacaagaacaagtcatgctcttcgaatcgttcgcatacaacattaatcactgcatactcctgcaacttacagcagatggtgcagcatgtaaccggcctgcggctcgtaagcacaccagaaataccggaccctgaggttgaacatcgagacatactcctgaggctcacaatcgttgtactcgtaaaacaaggatcatcgatcttacgtacaatgcatctaataacgagct

SEQ ID NO: 48097 - DNA, 722 bp, Glycine max
  Clone ID: PAT_MRT3847_14437C.1
ctcttcgtgttgattttgcttgcaattgctgcgttgtgccccatcaatatgtacgcaattttccgcttcactcgccctttcccccttcactgaagatcaatcattggaagctttttagctttaggttcacgttgttattgtgaattaatgaagttaaaggaacttgggacattgtttgttttattgttagtgtgataagatgcataatgatactatgaaatgaccttagtgtagggaaggctaccactgtagttgctgaaacttgaaattactatgtaaacattggtaacattagtaatctaggtgttacagatttgggaatgacctcttattttttctggtcttgtgttgttggaggatttgatttcattagcactacaagaaaaatgactactcctattatataaataaaatttaattgcaataaaaattcctgttatcatataaatagagatatgcagagacaacacacaagatgtttcagagaagcctttaagctttcaaatgctatataaccttgacagagtgcacaagcttttagcttttatttacataaccttgatagaaggaagaggacagagtatgctccaaatgtatttcaagattcaatggtgatcgcctagtaaatgtgagctacattcaaattgggaaatatctatggttataatgatgaaaggaaaaactctaaacaagatccttattgttagtttcatatctactgg

SEQ ID NO: 48098 - DNA, 695 bp, Glycine max
  unsure (1)..(695): unsure at all n locations
  Clone ID: PAT_MRT3847_14438C.1
tncttcttcttcttccagcttccactccacctcgtaaagttttttttttcctttcacttcgtgaatccgaaacattctgagcacgcatgtgtaactagcaacaacaaaaaaaaataaaatccgagaatgccggtttcaacgcggtctcagatcagcgtcagcaacaacaacggcgaaagcgaaccgaatccatcatcggcagcgacaaggctgagaaacccacaccatgggctgaaggagaagctgaagacactcactctcttatacgagcagcagaagcaagcctctgcatctctcagaaatgcgtctttcactttcaggcctcctcctccagagaaggccgtgatgcgagagaacacaatgcctaacaccacaataaccagaaccttcgtcttaccccagcccccctcaaacgacaatgacgatgcaaaggaaaacgtaatcatgggagcagatcgaattgtggcgttctcgtgtccgagaaagacaatgaaagcaaataataatgttttggcttcgcagtctgccagcgtggcacggaaactgtcgatggggccggtgagagtggaggcggtttcngagaagcatgggaaattagggagcaggattctggtgtttgtgagggtgagacctatgaatagaaggaaagggagcgctcacgtgctgcgtcgagtcgtatcgcgtgacgtattacg

SEQ ID NO: 48099 - DNA, 280 bp, Glycine max
  Clone ID: PAT_MRT3847_14439C.1
attcgagggacgactgacgccatcggtaacttaatcactacgtcctccatttgggctttttctgcacaaatccaaagtctagaactggggctatttgaatccatcctagcgttgcctccgaccatatatcctaccctatttatatagctgcacacaccaaatattataggataatcggagttgcactgacgtggagaaacattgacggcggatcatcccgacgattgccacagcctgcgggcaatcgacggcatacagtgcatttaagacggaaaggggg

SEQ ID NO: 48100 - DNA, 311 bp, Glycine max
  unsure (1)..(311): unsure at all n locations
  Clone ID: PAT_MRT3847_1443C.1
ntgntgcacnngtaagtaagatcggaattnggctcgagagaggtgttncnaanntgatnccagnantnnattctggaagtgntcccggttanagcgcnnnncaanngagtannncncngcatncgnctncggcattgcnaatctnanaaaggctnnacnnacanagncaanatgngnnccataannatgngngctcattgccgngnnnnagnnctnagctannacangtctncgcngnntnnnanaagnnggnnngcntcncgnctanaggttganncacnacanctcntactncnggnncaaggnncagg

SEQ ID NO: 48101 - DNA, 1721 bp, Glycine max
  Clone ID: PAT_MRT3847_14440C.1
ctcgagccgcaggccaggggtgtatggccgatcatggcactgcgcttctgggatatgctggttgtccttaccacaccactcttctccatcaaccacctccaccagtttcttcggctaggtcctccttctctctcccgttgcacccagcaacgcccccccccactcttttctcaccctgaaaccgcagggtctgccacctctctcctcccacacccatgcaaccaccaccatcgtgtttaggtcattctgctctctttgccgtaccctaaaaccgaaaaaattgttccttttacttttctcctctcacacacattcccacttcccccttttcttccaccgttatgtcgggtagaaaccgcggacaaccccttcctccgccgcacgcggcgggaatatcgccgccgctccacgatccgctgtacggcccgcgggcccaccaccaccaccatcatcatcatcatctagtgggccccgtcccgccccacccccaccaccttctacatcccggccccgccgcgcggctaccgccgccccccccccgcccccgggcccccccagcgcgcccgccggcggcgatcatcgaggagcgccttgccgcccagcatcaggacatcgcagggtctgctgggcgacaaccagcgcctcgccgccacccacgttgccctccagcaggagctcgaggccgcccgccacgagctccagcgcgtggcgcacttccgcgagtcgctccgggccgataccgaggcccgcatgcgcgagctctacgactaggcggcccagctcgaggccgagcgtggtggcgctgaggccgcccgcaccgagctcctccaggtccgctccgacgtcaaggagctcaccgccgtccgccaggacctgtccggacaggtgcaggccatgacgcaggacttggcccgcatgaccgcagacgcgaaacgggttccggcgctgagggctgatgttgaggccatgaaacaagagttgcagtgtgcaagggctgccattgagtatgagaagaagggatttgcagaaaactatgaacatggtcaagtgatggagaagaaattggttgcgatggctcgggagatggagaagcttcgtgcggagattgccaatgcagagaaaagagcacgggctgctgcagcggctgggaatccaggtcaagggtataatgcaaattatggcactgctgatgttggatatgctggaaatccttaccctggcatttatggcatgaatccagtacagcctggagtggagaattttcctcattatggacctgggcctgctgcttggggtgcatatgacatgcagcgagctcaaggacaccgataaattcctgttaaggaatcttataactggtaccttgggttgcaactttctagatgattgattcagggttttaagagttatctactcatgaacgtcatggaatttgtctattagatggtccttgaagttgtacttaaattaaaaagctcatatgttggttgatggtgcagtagatgatgtttatctatggtgtcaaataaaggaccttttgcttatattatctttttattgcggtgtggctgtcatgctaatcttgctctttaaaaattcatgtcttcagcttgagttttcctttattcctatctgccatggttgattgaaggttgctcattgtcaaaattatgcaactatagttggattttatgtaaatattagcttcttattatcactcc

SEQ ID NO: 48102 - DNA, 588 bp, Glycine max
  Clone ID: PAT_MRT3847_14441C.1
cggtccggaattcccgcgtcgacccacgccgtccgaacgcaaccaccaccatcgtgtttaggtcattcttctctctttccgtaccctaaaaccgaaaaaattgttccttttacttttctcctctcacacacattcccacttcccccttttcttccaccgttatgtcgggtagaaaccgcggacaaccccttcctccgccgcacgcggcgggaatatcgccgccgctccacgatccgctgtacggcccgcgggcccaccaccaccaccatcatcatcatcatctagtgggccccgtcccgccccacccccaccaccttctagaagacttccgcgactcgcagctagggctgggcccaacgcgcggcgggtccatcccattgcacccggcggcggcgatcatcgaggagcgccttgccgcccagcatcaggacatccagggtctgctgggcgacaaccagcgcctcgccgccacccacgttgccctcaagcaggagctcgaggccgcccgccacgagctccagcgcgtggggcacttccgcgagtcgctccgggccgatacccgagggccgcatgcgcgagctctacgac

SEQ ID NO: 48103 - DNA, 1963 bp, Glycine max
  Clone ID: PAT_MRT3847_14442C.1
catgggcttcccgggatcgacccacgcgtccggtatttaattcggatctcattgttgatttagtattaaatttctatgtagttgttgtttgtagtaatcatcaactcactcagttgccgtaggttgtcgtgatccatcacaacactttgtcactgaaattcagaaaaatggcatcagcaatgtttcgtaggaacatcatcacccactactccaagtttgcttcttctttgtcttcgttgcctcgccattcctcaatctacaaccctctctctatgtctgtttcttcatttcatagcgaaagtgttggtggtggtggtgggttgccatcttccatgcgtggagctgtgtattgggaaccgaacaagcctctcaccatcgaggaatttcacatgcctcgccccaaggccggtgaagttctcatcaaaacaaaggcctgtggagtatgccactctgatctacatgttatgaaaggtgaaattccgtttaccagtccttgtgttgtggggcatgagattaccggtgaggttgttgaacatggagcactcactgacagcaaaaccatagaaaggcttccagttggatctcgagttgttggggccttcatcatgccttgtggcaactgctcctactgttcaaagggccatgatgatctatgtgaagctttctttgcctataaccgggcaaaaggaaccctctatgatggtgaaactcgactcttttttcgaaacagtggaaaaccagcatacatgtatagtatgggagggcttgctgaatactgtgttgtgccagcaaatggagtgtctgtgttaccagactcattgccatatacagagtctgcaattctaggatgtgctgtttttactgcttacggcgctatggctcatgcagctcaagtgcgtcctggtgattctgttgctgttattggaactggaggtgttggttctagttgtttacagatagctagagcctttggtgcctcagatataattgctgtggatgtacgggatgaaaagctacagaaagcaaagacatttggtgctactcacactgtaaattcagcaaaggaagatcccattgaaaagatacttgaaattactggtggaaagggtgttgatgttgctgtggaagccttggggaaaccacagacatttgctcaatgtacacaaagtgtgaaggatgggggaaaagctgtgatgattggactggcacaagctggttctttaggagaggtggatataaatcggcttgttcgcagaaagatacaagttattggctcctatgggggcagggcaaggcaagatcttccaaagttaattagactggcagaaacaggtatcttcaatcttggccatgctgtttcaagaacatacacttttgaggaggcgggaaaagcattccaagatctcaatgaaggaaaaattgtcggtcgagctgtgattgagataatatagctctatattcccagaaatgcttttctgcagcagcaatagctatgcttttcacaccccacaagatatacatgctttggagttgcaaggtgttggtaccctgagaacataaataaatagatgtcttctgatgtttcattgcaggggcatgttcaaatgaaaactgtttttctttttgtgcatttctttgcttctaagttctaactcatgtaatcaaataggtacaccaaggtgaagaataatagtctctgaatgctcatcattggcgtgtcgtaaaactgatgatgaaaatgcaggaaaataacagaaaagctagagatgctccaagaaagtaaattaaaaaaaaatgtttccgacatcaatttttgtaaaaattaccgggggatgcggcttttcctggggttccccacgttcttgccctcccggccaatcccccttttccccaggggggtaataaaaaaaagggcccccccgatccccctttccaaaattttcccacccttaatgggaaatgg

SEQ ID NO: 48104 - DNA, 476 bp, Glycine max
  Clone ID: PAT_MRT3847_14443C.1
ggctcgagctgattggagcctctctctgttacaacagtttctgaccctcactgatcttttctcgtccgcccacgcgtccgatttttcttctctctaatctcttggttgcgtggcagactaaatgattttgtgtttttggttctcttttaggttggaaatcttgggcttcagctgccatggtactttctgcaaataattgtcagcgcatggtatttcatatcagtcgtgggtaatttgtttgaaagctatttcatctctttaaagaaatacaagtctcttcattcgggaaaggttcggtaccttgccattgtcatagaaagtgaagaagcttatcagatttccaaagttgttaaactttcgcagtggcttgactctattggtgtaaagaatgtgtgcctttatgacatgaatggagtattgaagaagtctaaggaaaccatgtttcaaaaattgaagaatgcaaaatccattgagtg

SEQ ID NO: 48105 - DNA, 246 bp, Glycine max
  Clone ID: PAT_MRT3847_14444C.1
ccctcgcgtccggaccttggatgctctaaaagatgaattgcttgtgccagtgtcatggaggatcgaaaagaataagggtatgtttcaacaaaacgatggttcgtggaagctgatggatcatgaagaagatgacttttgatccttaattaattgagacttgagaatgcctttatttcgttaagtttcacatttgaggttgttgtcgattggagaaaatattaactaattggatttgtttattatgta

SEQ ID NO: 48106 - DNA, 658 bp, Glycine max
  unsure (1)..(658): unsure at all n locations
  Clone ID: PAT_MRT3847_14445C.1
aacaagaacaaatttccattacatatcctgtcaaaatcttattaagatgtacaacataaactttccttcaaagatatttgtaaaaataaaaaacccaaaaacgtaaagttgttgaattaggaacgtgaatttggtgacaagtgcaagcgccctctctgcacagagaaaaaaggtctaattagaatactcaaaagtacttatgctatatcaaaattaatagtcacaatttattatttaaatttacatgcacattaaatatacattaaagattttagttttatatataacattatttattttataacataattaacctattaactcagttagttagagcgtcatgctaataacatgaaaatcacatgtttgactcttgtttgatccattaattttaaattaattcgtaaaacatatttttgagttttttttaaaaaaaacacttacgaattaggctcatatagatcagctaatccgtaaacctcatacggaaaatgaaaaaagcgcataattgctgagtgtaccagcaattttgttgggtgcatgtaacaatgtccattactattttttagngtgttttttgcagccctagagtagggctattaacttcttgtgacaaagattcctttgntgttgtggcggagctttttgtgactggtct

SEQ ID NO: 48107 - DNA, 385 bp, Glycine max
  Clone ID: PAT_MRT3847_14446C.1
gatttcggtggatttgatttttaaatctcttgttagttttctttgtttgggggtagttttttatgttcaaatgtgaacttaaattagaatatgttttttactgcaaaaaacatattctaatttaagttcacatttgaacataaatcacaatatgttttttgcagcaaaacaaaaaattcatctgaggggggtaactcttcctccattcacattgtacttctcgttatcttacatttacgttcccattgatcattccggctatttccatccagattcatttccccctgattgccaaagttagatttttcactctctaccctaaacttaaatctacttccctttattctacaatgctaggattgcaaaaactccgtcgttacccatc

SEQ ID NO: 48108 - DNA, 145 bp, Glycine max
  Clone ID: PAT_MRT3847_14447C.1
tgtgaattgacaagaaggaagcaccgtagcagcgcaaaaaggatgagcgcagcactggatgatgacccagaaaggagacgcttgaatagtgggttgaagcgctttcagcgcgatctgatggctggggcggtgatgggtggtgtgg

SEQ ID NO: 48109 - DNA, 235 bp, Glycine max
  Clone ID: PAT_MRT3847_14448C.1
aataccttctcacatgaaagtttgtacatactctgagtatgcaaaatccaacgacactctcaagcttaatccaagtgcggctttgactgacgcgaaggaaaaccataccctcatcaaggtcgctgctgcttcccttacccccattgatcataagataatggaaagatatttcaagaactcctactcccctttacctactgctccgaggtatgatgttgctggattggtggataaa

SEQ ID NO: 48110 - DNA, 265 bp, Glycine max
  unsure (1)..(265): unsure at all n locations
  Clone ID: PAT_MRT3847_14449C.1
ggcgaatcttcgtccctgagctggcaggaccattagcatttgtcatttatgtgtgcaaactctataaatacgactatgaataaatgagaaggcatcagaaaattcaccaaatttcctcntctnttctaaattctaggaggcagtccgcacctcgaattcaggaacattgatccacttaccacttgccttaccatggtggtgaatctccacaagaaatgatttggaacagatgctggaatctactaatgagggggccaaagttata

SEQ ID NO: 48111 - DNA, 311 bp, Glycine max
  Clone ID: PAT_MRT3847_1444C.1
ggcctttataatcaagagggggcggcaataaatggccggggacattgacaaccaaaccacatcactgtaggcaactgtgtcagaaggcaagatgaaggcattgaatatgctgcatgtacaattccaaatgattgtgggccatgggttgccgccaagggtggaaataacaaacaaattgatggttgccatgctgatggaagcaaaggaagactgggatatgctgcattgaaaccatatgttgcgccagaagtgcaagctcaaagtgctgaagtttactatgaactcgtccctgtggaggttgatagtcaaga

SEQ ID NO: 48112 - DNA, 294 bp, Glycine max
  Clone ID: PAT_MRT3847_14450C.1
ccaaatctactggttttggtattttgcttgaacttttgcaaaagtacttggagtcattgctggatcggatccgggtccagataccaagtgaattggggaaagaagcccttaaaatccttgtggaaagaaaaaccgagcccttatgcacaggggggacaaattatgccatatgagttcacctttagatacttgatatgcgcataatttcactcccttttggcgcgtgcaattttgtcttcccccggggatcatacagattaaaatgcccatgatcattttttctctactcccttt

SEQ ID NO: 48113 - DNA, 146 bp, Glycine max
  Clone ID: PAT_MRT3847_14451C.1
gattttcaagaatgttgagaaaataagacttaaagagagtagttaaatgcttggtttataaaaaggctgagttttatgatgataggtacttttataaaaatataacggttggttatgaacctagagataatagaatggatgaaccg

SEQ ID NO: 48114 - DNA, 1720 bp, Glycine max
  Clone ID: PAT_MRT3847_14452C.1
gttgacgatggcgtttcgggtgcgaagccctgacctccgctctctctttcttctctctctcttgtccatcgcttccgccaatgtcttcttcgaagagcgtttcgatggcattacttttccaggatcaaggtttttctttcgtgtctgagcctcgatctgaaaagcttcgatggttcgatttgtgttttgagttggaaatcgagacgggtgggaaaatcgatgggttaaatcagattggaaaaaagatgagaacgtggctggggagtggaaccacacctctggtcaatggaatggagacgctaatgacaaaggtattcaaaccagtgaggattacagattctatgctatttcagctgagtaccctgaattcagcaacaagggtaagacactagtctttcaattttctgttaagcacgaacagaagcttgactgtggtggtggctacatgaagttgctcagtggggatgttgatcagaagaaatttggcggggatactccttacagtattatgtttggcccagatatctgcggttacagtaccaagaaagttcacgctattcttacctacaataacacaaaccacttgataaagaaggatgttccttgtgagactgaccaacttactcatgtttacacatttatcctccgtccggatgcaacctacagcatcctgattgataatgtggagaagcaaactggtagtctctactctgattgggatcttctccctccaaagacaatcaaggatcctgaggctaaaaaaccagaagattgggatgacaaagaatatattcctgatcctgaggataagaaaccagaggggtatgatgacatcccaaaagagctcccagaccccgaagccaagaagcctgaagattgggatgatgaggaagatggtgagtggacaccccctaccattgccaaccctgagtacaagggcccatggaaggcagagaaaatcaagaaccccaactataaaggaaaatggaaggcaccattgattgataacccagatttcaaggatgaccccgacctctatgttttccccaacttgaagtacgtggggattgaattgtggcaggtgaaatctggtactttgtttgacaatgtcttaattactgatgatcctgagtatgctaagcagctggttgaagaaacatggggcaagcacaaggatgctgagaaggcagcatttgaggaggccgagaagaagagggaagaggaggaatcaaaggatgacccagttgactctgatgctgatgaggaagaggaagatgctgatgaagctggcaatgactccgatgctgaatcaaagacggaagctggagaagacaccaaggaagagggtgtacatgatgaactctaggaagtttgcaaaacggataaagagtgagcggaagttatattccggaaagttatatctttttcagttgtagtgtttttttgtttttatttttccctagataagcagaccgtggaaaactgcaagtgaaagctggagcttttgcttcaatcacatttgactatttcactgattagaacaggcaaagatgtctcttttgggttgatctttttatgtttcgatcaattgaattttccattatgacaccgtcctgaaaatctaattaattgcaaaaaaggattatctttgttaaaaaaaaaaaaaaaaaaaaaaaaaaaaaaaaaaaaaaaaaaaaaaaaaaaaaaaaaaagaaacaag

SEQ ID NO: 48115 - DNA, 418 bp, Glycine max
  Clone ID: PAT_MRT3847_14453C.1
acggctgcgagaagacgacagaagggacttccatagtttcatgattgaattctaagtattttaaattttcattactaatgaacacattattaagaacatcaatcaaaaatcaggaagcataatcagattggatgcaagagtctagaaatgcaaaaatttgaaatatgctatttctagaaacataacttgtacacaaatgaagaaaattggttcaaatggcatgcatacactttatgcaataccaaaagctgcacttgaacagaaattggaaaatgagtcattgttgtgttctagaagctggaataatgctataatcaggggaaattcttaggcatgtgttgaagcttgctcaaaacatcataagacttcatcattgacttgtgctaatgtgaacaaggcaaagacaatttttgaaaaa

SEQ ID NO: 48116 - DNA, 1774 bp, Glycine max
  Clone ID: PAT_MRT3847_14454C.1
cccacgcgtccgcccacgcgtccgtacggctgcgagaagacgacagaagggggaacttctcacgttcatttctacacatccctagctctgtcgttccgtcgttgacgatggcgtttcgggtgcgaagccctgacctccgctctctctttcttctctctctcttgtccatcgcttccgccaatgtcttcttcgaagagcgtttcgatgacgggtgggaaaatcgatgggttaaatcagattggaaaaaagatgagaacgtggctggggagtggaaccacacctctggtcaatggaatggagacgctaatgacaaaggtattcaaaccagtgaggattacagattctatgctatttcagctgagtaccctgaattcagcaacaagggtaagacactagtctttcaattttctgttaagcacgaacagaagcttgactgtggtggtggctacatgaagttgctcagtggggatgttgatcagaagaaatttggcggggatactccttacagtattatgtttggcccagatatctgcggttacagtaccaagaaagttcacgctattcttacctacaataacacaaaccacttgataaagaaggatgttccttgtgagactgaccaacttactcatgtttacacatttatcctccgtccggatgcaacctacagcatcctgattgataatgtggagaagcaaactggtagtctctactctgattgggatcttctccctccaaagacaatcaaggatcctgaggctaaaaaaccagaagattgggatgacaaagaatatattcctgatcctgaggataagaaaccagaggggtatgatgacatcccaaaagagctcccagaccccgaagccaagaagcctgaagattgggatgatgaggaagatggtgagtggacaccccctaccattgccaaccctgagtacaagggcccatggaaggcagagaaaatcaagaaccccaactataaaggaagatggaaggcaccattgattgataacccagatttcaaggatgaccccgacctctatgttttccccaacttgaagtacgtggggattgaattgtggcaggtgaaatctggtactttgtttgacaacgtcttaattactgatgatcctgagtatgctaagcagctggttgaagaaacatggggcaagcacaaggatgctgagaaggcagcatttgaagaggctgagaagaagagggaagaggaggaatcaaaggatgacccagttgactctgatgctgatgaggaagaggaagatgctgatgaagctggcaatgactccgatgctgaatcaaagacggaagctggagaagacaccaaggaagagggtgtacatgatgaactctaggaagtttgcaaaacggataaagagtgagcggaagttatattccggatagttatatttcagtcgtagtgttttttgttttccctagataagcagaccgtggaaaactgctagtaaaagctggagcttttgcttcgatcacatttgactatttcactgattagaacaggcaaagatgtctctcttgggttgatctttttatgtttcgatcaattgagtttcccattatgacgcttcctgaaaatctaattaattgcaaatttttataagaaaaatgattgattgatatttcaaatttgaaattttatttcaaaaattgtaaatcgtttgctaagctagtagaaattttacttgtcaagtaatatatggctcatggttggctaaaaaaaattaaacaaaataaatga

SEQ ID NO: 48117 - DNA, 299 bp, Glycine max
  Clone ID: PAT_MRT3847_14455C.1
gacaaataatttgctatgtgtacaatactaaacaaaaacaaaacagatccaccaataaggagggtggtttttatcttttttcgaaaaacggaaataatttctacagaaatgacgaggagaaatatgaattaagggttgttaaacaacctctcgtcaaccttctttttaattctaaacgatggcatcgtgcctttcgatatataaaaaatcatcgattacgaaatgacattataaatgaaatttcaaaatctttttttatatacatgtcacagtgattgaaaagaaagaatatctgttat

SEQ ID NO: 48118 - DNA, 272 bp, Glycine max
  unsure (1)..(272): unsure at all n locations
  Clone ID: PAT_MRT3847_14456C.1
tcgaggattgagcgaaagctanggancaacatatatttttttccataggctggacgaaagagggaacctgtagtcgaaagagcaaggatctgaccgagcgagcgatcataggggcgtggtgccatgatgcttcgactgcaaaccagaggggcccggcggcagggcgcagagcgagaccgcctgcatcctgtggccgagatagaggacgcggttttgaacgccactgtatgccgaggatgtccatgcgggaatcagagaataagaggatgact

SEQ ID NO: 48119 - DNA, 730 bp, Glycine max
  Clone ID: PAT_MRT3847_14457C.1
ccacgcgtccggatagttgttactacatgtctttctaatcgctacaaagttccgcttgtaacttttgttggagttaaccatcatgggcaatctgtactgtttggttgtgggctgttatcgtatgaagactcagagtcatttgcttggttgtttcaatcattgttgcattgcatgtctgatgttccccctcaaggaatcataacagatcattgctgctagaccatgcagaaagcagttgaaactgtatatccctccactcgacatcggtggtgtttatcaaatataatggaaaaacttccccaactaatccatggatatgctaattacaagtccttaagagatcatttgcagaatgttgtatatgacacacctacaataagtgaatttgagcagaaatggaagaagattgtggaggattttgacctcaaggacaataaatggttgaaagagttgttccttgagagacatcgctgggctccttcctttgtaagaggtgagttctgggctggaatgtctattaatccacacaatgaaagcatgcatgcattttttgatggatatgtaagccggctaacaactctgaagcaatttgttgatcagtatgataatgctttgcaatataaggctgagaaagaatatgtagctgacatacattcatcaagtaacagtcaagcttgtgttaccaaatctccaatttgagagcagtttcaagctgcatacactcatgcca

SEQ ID NO: 48120 - DNA, 656 bp, Glycine max
  Clone ID: PAT_MRT3847_14458C.1
ataggtgcaaccttcagtcatcaaaaacttattgattacatgatggaacagagtatatactttagtttagagtccgaagcaaacatgatggtcagaaggtcttaatatctctgctggcatggcaggaggccacctaatcgttgttaagaagagggacctagaaaaacaggctccatacttgggagcttcccaaagcttatgggctatttcatgcactaccctatttgttggtgttggaagacttccaccatgctgccttacacgatggccaccatgacccccagattattctgtatccaagaattacaggataactaaaatggataacaagccaaggagaattccatgacagcttgcagctcaaaccatgagtttgcaaaaactgcgaacacttacaatctcagaatcaaatatgtggatgaataacatgaaggttttaagtattgaggtatggaaagtggtgtacactgaacatcattcagatcaacacgtagaaacactaattggaataaatcattattaaattgtcaataaagcctggagtcaaatcttgaaccaaaccttcataagatcttcaaaggagagtctctctgcattatgcttgcgagtcaccggacattgtcattgagcatgtaacatgggagaaatgatgtctg

SEQ ID NO: 48121 - DNA, 1611 bp, Glycine max
  unsure (1)..(1611): unsure at all n locations
  Clone ID: PAT_MRT3847_14459C.1
acgaagtttccagatgttaacttctctgacatgctgggaaatagaatgccaatttcacatatcaaatagcttggaaaaaagttcaatgagatcctttggttttctcagggattttaaaattgttggcagttggtgatatcaatttttcatgaagtttatggtgggagattctcaggattagtttgagacgaatacatgtatgacattatggatgcttacttctgtactcgaagtcatgcggagaagtgagaaatgctcggggtcatgtgtatgccacaatcatgttgaatagttgcttatcctaattccttgtttttctctgatttggcataattgaaacaaatataagcggtgcatgcatctgaagaagttatgtatcggggcgtgcattttttgtatgtaatgtatatacttatgcaataactcaggaagggggcaatgtctcaagacgggttgaatcctgtcttaccaacctagtcatattgccaagttaagcatatattaacagcattaatagtaaggtttgatggaatatcttgttgaaggagtttcatatacgattgtgcactttttggttgaatttttcattcgtgaatagcttcctcaatgtgatgatttctgctactttttgagctgaaagttcaatagcaaaactggattataaagctcatctgctggggaaaagagcagggtttgcaaggaagtttgtttgcctggtgcaacaagctgtttcaacagagttgatttttgcatgatttaatttactaatgtctaacgaggaccaagtcaccaagcactgcagcgaagcaaactgtagaaattaccctttagcatccatggattcagagatggagtcatgatcgttctgcatcttcccaaaagagtcttggaataggggagcttcatgaaccaaagtcttcaactgctgtgctaaaagagttaaaaaaaaaacagtttccgagcattgctgccatggccctgatgggaaaagcaatgaacaatttgaatccctctgagctgataaaaaagggacctgtgatagtttggaatatgaagggattttgatattgttggccattggtgatatcaatttctcatgaagtttatggtgggagattctcaggattagttttagaggaattaggaatacatgttatggcattattatggctgcttacttctgtactcagtcatgcggagaagtgagatatgcttaggtcatgtgtatgtcacaatcatgttgaatagctgcttatcctaattccttgttctcctcagatttggcttaattgaaacaaagcggtgcatgcatctgaagaagttatgtatcggagcttgcattttttgtatgcaatgtactgaatatactcatgcaataactcaggaagtgggaaatgtctcaagacgggttgaatcctgtcttaccacccaagtcatattgccaagtttagcatatattaacagcgttgatagtacaggtttgatggaatatcatgttgaatgagtttcatatacgattgtgcaccttttggttgaatttttcattcgtgaaaaatagcttcctcattgtgattacttctgctactttnntgagctgaaagttatttaaga

SEQ ID NO: 48122 - DNA, 447 bp, Glycine max
  unsure (1)..(447): unsure at all n locations
  Clone ID: PAT_MRT3847_1445C.1
ggctcgagcttctattcacccttcactcgacacaacacttcctgcttcacttctctcacctgcattctatagcaggttgagaaattaatacaactttgtctttaacttttaactttgacaccaccatggcctgcttagaagtcagcaaagaggtaaagttcaaaggtgacacggaagaactcactcttgatggaagtgttgattggcatggtcgccctgcaattagagccaaatctggcagatgggttgctggaaccatcgttctattgaaccaaggtctggcaaccttagcattctttggagtaggggtgaacctagtgctgttcctgacaagagtgatggggcaagataatgctgaagctgcaaacaatgtgagcaagtggactggcacagtttacatcttctctcttgtgggtgctttcctaagtgattcgtattggngaagat

SEQ ID NO: 48123 - DNA, 692 bp, Glycine max
  Clone ID: PAT_MRT3847_14460C.1
attttttttgctgatcaagaaacgtcaaacactaaatatggtattatctcgaaatgaataatttctcccgacttatattgtcatctaccagttaagccccacatgaccaaacaggagagcaatgaaatattttcaatttaatggattctaaaccacaattctattctattataaataaatggcgccatatatgaagcaaaatatatatatatatatatatatatatatatatatatatatatatataaccagaatgatgaaaattttaactgcactacacaaaactgtaccagttatctcacttccatctgagagactgtctaatgcctgtataaatgagtcctaaagacctcccaatcaagctaactaaaaagaatgagattgcatcactcactttatcaataactgctctaattagaggcatgcgtatgtcagacaactcaagaaagaggctgaaataatatcgccaccctgtcacagctcttaattccttggtccgctttacaggcattgagaaatggctaatgtcaatacaatgtaattcaggtgacattgcttttgaattttgctgggtaagcctcttccaccaattttgctcttcggtctgaatactgtctgttacatcaacaggttggctctcaagaatacacaggtcaaagcgatcctcatacattgacacaactgtgtccatg

SEQ ID NO: 48124 - DNA, 160 bp, Glycine max
  Clone ID: PAT_MRT3847_14461C.1
aaaacgtataaatgaaaatgtattcccacgaaagataatataatcagatgctctggtgttagttacaaagaaatacaaggaaaatcctcacccggggccaaagattatgttatagtacatggcgcaatcattcggatcaaagagatcccatcccctgaat

SEQ ID NO: 48125 - DNA, 302 bp, Glycine max
  Clone ID: PAT_MRT3847_14462C.1
attcactcatacccaacaacaggctacctctccatgttgtgcagggaaaacccattccggtaggccacatacataatgacctgcacacattgtgggctgtggttattcttctaagaggttgtcatccaggttcagaagccgtgttgctggaacaggagatgcgcccccagaagcatgatgcgcgcgggcttggatggatcacatgcacctattaggtgggtgaaagccaccccatgtcacgtagtgccacatgcaggacaagtatggacccaaattcaccttgcgtctgggtgctcacaaaa

SEQ ID NO: 48126 - DNA, 138 bp, Glycine max
  Clone ID: PAT_MRT3847_14463C.1
acataaccatcattactatttcacctccaatgacactgattatatcttatatataaatcatatatactgttctattgttttcattacccatattctctattactactttatcatataattcaaatacaatatctattc

SEQ ID NO: 48127 - DNA, 296 bp, Glycine max
  Clone ID: PAT_MRT3847_14464C.1
aattcggctcgagcacatactaaaagttctaatcataaatcacatatcttatatgataagtttattgattttctctgaacaattcatacgaattaaactctaatttagaaattttttctaaggggatctttaattggttgatagtttatgagttatgacggcacatgaagttagactttttttttttttttttaataatgttgtgatctgagtaaaataatgattttcttgaaaaaggtgtttcttgaaatgcaatctatgatgttgctgccttgaaagaatctgtgccttgttat

SEQ ID NO: 48128 - DNA, 212 bp, Glycine max
  Clone ID: PAT_MRT3847_14465C.1
ggaaaagaggtaatcaagtttttatttttaccaacttgtttcttgactcgcctaattttgttcgatcttattctattgtgctactgtcggacatactgccatctgattttcctgttaaatatctaccatttatcatataattttttgaaaaaaaccaaacaatttataaaaaaatattatttaaatttttatatgggggggccgcttttaaa

SEQ ID NO: 48129 - DNA, 608 bp, Glycine max
  Clone ID: PAT_MRT3847_14466C.1
gcacgagctggtgccgctggtgccgcgtcacacacttatcccttatattgatggtaaaaaaatccaaaaaaaatattgtgcactagttccatggacaaccacttcaaaataggagcacaaaatcgaaaaaaattatgatttgaacacttgcaactatgcaaatacccatgttctgcattttttttaaaactatgtccaacaaattaatgatattcgtgacacacattttccatagattgaacatcaaagaattcaaaaagaaatatatgatgcaccatttccgtgcacaatcacctcaaaataggatcacaaaacgaaaaaactatgatttggacctttgcaactatgcttaagtgcccgtgttctaaattttttttgaaattattcccaacataatgattatatttgtgaccaacattttccatagattcaatatcaaagaatccaaataaagtatatcatgcactagttccattgacaaccatctgaaaataggagcacaaaatcgaaaaactatgatttggatcctttcaactatgctcaaatgtcaatgttctacaatttttttaaattatgtcctacagattaatgatattcataacacactt

SEQ ID NO: 48130 - DNA, 465 bp, Glycine max
  Clone ID: PAT_MRT3847_14467C.1
gaaagtttgagcaaaaataataatactgccttaatttgaagtaccgaggggtaccttggaatatatattgacaggccagatcttgggcccatgacatataggtattcattagaaccaatcaagcaactaggtatatttaggagggttgtttctttatcaaatttcactgagggggtgcacccatcagttacatggaactgcatatacaaaatgtaattcatattgtgggaaaaaagtaataatcataatataaagaatctttcaaatgtgtaagtagtaaagcaaacaaaaaattggttgcttccaattttaaatttgaaagctgcaagattacacacacttcattggtattgccaattttgaagcccaccacgccaccaccataatccatggggggttgttggaaaacagccaccggcctccaccatggggctggcatggccactatttgacaacactgactac

SEQ ID NO: 48131 - DNA, 1507 bp, Glycine max
  unsure (1)..(1507): unsure at all n locations
  Clone ID: PAT_MRT3847_14468C.1
tttggggtacgacctgcaggtatccggtnccggnaatttcccggngtcgacccacgcgtccgacaaactagctgagatcttctcttagtgctcgtgacatgccaccagaagactttgatgtgttgcaagattttgatggccagcaacaccttttgagtgacttgggctgtttctcgcagccccgtcctggcgccatttcagtgagtcgatctggtcggtctaagacactaaccccatcaaatctggatgaactattctctgccgagatttcttcatctccccggtattctgacccagcagtggcttctgtattttccccaagacacaaatcaactattatgaatcagtttcaacagcttcaaagttcgttatcacccataaacacaagtgtctcctctcctaggaatgttgagcatcctctattacaggcttcatttggtgtctcttctcctggaaggatgtcaccaagaagtatggagccaatctctccaatgagctctcgattatcagcatttgcacagcgtgagaaacagcaccaacagctgcgaagccttagttcaagggaccttggtgccaatgttcctgcctcaatggttgggtccccagttaactcctggtctaattggggttctcctcatgggaatggaaaagtagattggtcagtaaatggaaatgagttaggtcgattgcagagatcatcatcatttgagcttggaaacaatggggaggagcctgatctatcctgggttcaatcccttgtcaaggaatctccgtccgagataaaagagaagttgacaggttctggccctgttgcatctgttgatggaccgagttcaaatccaaagtcaaatccgcaagttgagtctgttgatcattctgttctaggagcctggcttgagcaaatgcagctggatcagcttgtagtctaatcaaatttgacccattccatcttgtgataggtatttaatttcacaacgtattctttttgtcaatttttttgggtggagcaaggagagggaatgtaatgatactgaagcgagggatggctgcaaagtacccgaatgataatctatttttccccccccattattttgtcattcattgttttactaaagagcttcagggggagtggtaagaaaccctctctctggggttgatgatatcccagtaaaaaagaaaatattcttccaaaactctagtttcaggactcttttcttcattttattcctagccatggaaaaaccaagagcctcatatttgtattcaagttcgttttcttggtaggaatctgctagtatattgctatgctattgcatgtatagaagactagagtgtgtttattgttaaggaattagaggtgatctgcgccattaatatttattgccggcagatcgtttagacatactgaaggctactgtgtatgtatcggttattttcaaattcaatgtagctgttatatttatgggtattatctaaattcaatggaaattattaacctttttttttt

SEQ ID NO: 48132 - DNA, 525 bp, Glycine max
  Clone ID: PAT_MRT3847_14469C.1
cccacgcgtccggaagaataaaagattttggagttggagtggctcactcagcgcgtctatacgtgctaagcgcaagcaacacaacaaggaaggtcacatgacaagcatttggaagaaaagaggccaattggaagttcttgaaggcgctcaatgcgtcaatacttgctaagctcattggtttcacagtgaggatttgggctcagtgcaacatgctgggctaagcccacggccacttaatctaatgttgcttttgcatgtatgccacatgttgggctaagcaggcagacgattatgcaataacgacaacgtagtgcatttggccctatttaagctccatgtatgcaaattgaaggcaaatttggttgggggagctatctagggttgaggtgaagactgggaagctctcccttgctcttcatggcttccctaccatttctcattatctatttcatctattttcttcttttcttcttatggttatgtagttagatttattcattttggagattgatgtaacttaactct

SEQ ID NO: 48133 - DNA, 255 bp, Glycine max
  Clone ID: PAT_MRT3847_1446C.1
ggctgtactcgtaatggcttgccctttgaattttagaggatcacgcatgcatgggcggcagcgcctacgtcaccggcatctggtggagcgggttatgatacatgggcccttataatcagatgaagaggaacaactgcgcacaccttacacacaagactggaaatttaaatggaacgcatacatgatatagctcatccacgcctggatgaaccaatgtaacatcgggaagacattgccgaataccacaatacaaca

SEQ ID NO: 48134 - DNA, 1533 bp, Glycine max
  Clone ID: PAT_MRT3847_14470C.1
ccactggatctgctgttccctcgcctcgctcatctgcctctactccaaatgtcatggacatggctgctgcaatgagcctctttcctggttcgccgtcatcaatttcttccatgtctccatctccctttgcacagccaatgtctccatccacaagtggcatttctcattcatctaatgcttggccacagccaaatgttccagctcttcatttaccaggaagcaatattcaaactagccgattgagatcttctcttagtgctcgtgacatgccacctgaagacttggatgtgttgcaagattttgatggccagcaacaccttttgaatgacttaggctgtttctcgcagccccatcctggtggcatttcagtgagtcgatctggtcggtccaagacactaactccatcaaatcttgatgaactattttctgctgagatttcttcatctccccggtattctgacccagcagtggcttctgtattttccccaacacacaaatcggctattatgaatcagtttcaacagcttcaaagttcattatcacccataaatacaagtgtctcgtctcctaggaatgttgagcatcctctattccaggcttcatttggtgtctcttctcctggaaggatgtcaccaagaagtatggagccaatctctccaatgagctctcgattatcatttgctcagcgtgagaaacagcaccaacagctgcgaagccttagttcaagggaccctgggtgccaacattcctgtctcaatggttgggtccccagttaactcctggtctaattggggttctccgggtggcaatggaaaagtagattggtcagtaaatggaaatgagctaggtcgattgcacaggtcatcatcgtttgagcttggaaacaatggggaggagcctgatctatcctgggttcaatcccttgtcaaggaatctccatctgagataaaagagttgggaggttctggccctgttgcatttgctgatggaccgagttcaaatcctcaagttgagtctgttgatcattccgttctaggagcctggcttgagcaaatgcagctggatcagcttgtagtctaatcaaactgacccattccatcttgtgataggtatttcattttactacgtattctttttgtcaatttttttttgggtggagcaaggagagggaatgtaatgatagtactgaagcaaggagagatggctacaaagttcccgaatgataatctatttttttcccattattttgtcattcattgttttactatagagcttcaggggggaggggtaagaagcccgccctctctctggggtgcgatgatatccccgtaaagaagatgttcttccttaaaaaatctagtttcaggactcttttctttcattttattccgagccaagcaaaaccaagagcctcatttgtattcaagttcgttttcttggtaggaatctgttagtatattgctattgcatgtatagaagactagagcgtgtttcttgttaaggaattagaggtgatctgcgccattgaagaaa

SEQ ID NO: 48135 - DNA, 5712 bp, Glycine max
  unsure (1)..(5712): unsure at all n locations
  Clone ID: PAT_MRT3847_14471C.1
agacgttactttctctattctcaaagtcacacacagcactttctctctcatcttaactctctcccatgtttcctcagtttcatcgatggagagtgaagccttaactctgcttattccgtgtcccagatctcgttgttgcttccgattctttgattcttcgcttctttcttcttctcacttcacattccgattcgtcgcagattcttttggtttctaaacatcatgatcgtcactgcctccatctgtaatcggtgattttctctcttttctctcagctcatgaatttttcctttttctttattagctgatgaatttacatgatcatcgagtaaatcactttttttccttctatttttatagtttgaattgttttttctattttcagtttctttttacacttgtcttgttattatgtttaatcctgtaaagatgattctagatttaccttagatctgngctctaggtgtggttcattttttacgattaacgggggtccggattcccgggtcgacccacgcgtccgcggagtgggcggacgcgtgggcggacgcgtggggtgaatttcgcgtgtggggcgaacaaaaccactgccctccactgtgctgcttctggtgcatctaccaaggctgttgatgccgtcaagcttcttttatcggccggggccgatgtcaattgcgtggatgcaaatgggaatcgccctattgatgtgattgctgttcctcccaagctgcaaggtgcgaaagccgttcttgaggaacttctttcggacaatgcttctgatgtgtctgttggtgaattctctgtcccggtgtctgttaattcttccagtccgggttctcctgcccattcgtcgaatgggatgccgtacactccttcggtttcaccgccatcccccgtggctgcaaagtttactgatgcagctatttgttctttgtcggagaaggcgagggaatacccgattgatccatcgctgcctgatataaagaacagtatatatgcgactgatgagtttcggatgttttcgttcaaggtgagaccttgttcccgggcatactctcatgattggactgagtgtccttttgttcatcccggagagaatgctcggaggagagaccccaggaagttccattacagctgtgtgccgtgccctgattttagaaaaggggcttgcaggcgtggagacatgtgtgaatatgctcatggggtgtttgagtgctggctgcacccggctcagtatcggacacgcctctgcaaagatggcaccagttgcaatcgaagggtgtgtttttttgctcacactgcagaggagcttcgtccgctgtatgtgtccactggatctgctgccccttcgccccgttcatctgcttcaggtcctaatgtcatggacatggctgctgccatgagcctttttccgggatcgccttcatcgggctcttccatttcactttcaatttctttctctctagacgttactttctctattctcaaagtcacacacagcactttctctctcatcttaactctctcccatgtttcctcagtttcatcgatggagagtgaagccttaactctgcttattccgtgttccagatctcgttgttgcttccgattctttgattcttcgcttctttcttcttctcacttcacattccgattcgtcgcagattcttttggtttctaaacatcatgatcgtcactgcctccatctgtaatcgctaattgaaggcatgggaggtggtccagagaaatcaaaatctccttcaacttcgtcttccctttaggtgtaaaagtcacagctaacgataaagaaatgaaatcgctaactgttaatactgaagattctttttccagtttgactggaacttgcttctaacaatgatattgaaggcttcaaggtgcttttagagaaagattcttcttcgatcaatgaggttgggctctggtatggccggcaaaacggatcgaagcaatttgttcttgagcacagaacccctttgatggttgctgcaacttatggtagcattgatgttatgaagatgatactgttgtgccccgaggcctgtttttgatggccatcagcagcgaacttagaatgacctggctgttaggtaccgccgcggcctggtaccgcttctgtgagtgcatctggtcggtccaagatcctaactccatcaattcttgacgttcgttttagtgctgagatttccactgctcccggctcatctgatccatcagcgggtaccccgtgtccaactagggacctactcatgggtctggaaaagttgattggtcagtaaatggaaatgagttaggtcgattgcagagatcatcatcatttgagcttggaaacactggggaggagcctgatctatcctgggttcaatcccttgtcaaggaatctccgtccgagataaaagagaagttgacaggttctggccctgttgcatctgttgatggaccgagttcaaatccaaagtcaaatccgcaagttgagtctgttgatcattctgttctaggagcctggcttgagcaaatgcagctggatcagcttgtagtctaatcaaatttgacccattccatcttgtgataggtatttaatttcacaacgtattctttttgtcaatttttttgggtggagcaaggagagggaatgtaatgatactgaagcgagggatggctgcaaagtacccgaatgataatctatttttccccccccattattttgtcattcattgttttactaaagagcttcagggggagtggtaagaaaccctctctctggggttgatgatatcccagtaaaaaagaaaatattcttccaaaactctagtttcaggactcttttcttcattttattcctagccatggaaaaaccaagagcctcatatttgtattcaagttcgttttcttggtaggaatctccttgtcgccgtcccactttgggcagccaatgtccccatctgcaaatggcatgccactgtcttctgcttgggctcagccaaatgtgccggctcttcatttaccaggaagcaatcttcaatctagtcgattgaggtcttccctaagtgctcgtgacattccaccagaagacttgaacatgatgtctgatcttgatggccagcagcagcaccatctgaatgacttgagctgttacatacagcctcgccccggtgccagttctgtgagtagatctggtcggtccaagaccctaactccatcaaatctggaagagctcttttctgctgagatttctttgtctccccggtattctgatccagcagccggttctgtgttttcccctactcacaaatcagctgttctcaatcagtttcaacagctccaaagtatgttatcacctataaatactaatttgctgtctcctaagaatgttgagcatcctctttttcaggcttcttttggtgtctctccttctggaaggatgtcaccaagaagtgttgaaccaatctctccaatgagtgctcgtttatctgcatttgctcagcgagagaaacagcagcaacagctgcgcagtgttagttcaagagaccttggtgccaacagtcctgcctcacttgttggctcccctgcaaacccttggtcaaagtggggttctcctattgggaaagctgattggtcagtaaatggagactcccttggtcgtcagatgcgaagatcatcctcgtttgagcgcaagaacaatggggaagagcctgatctctcttgggtccaatctctggtgaaggagtccccacctgagatgatcaaagagaagtttgcatctcctatgcctactgcatctgctgatggaccgaattcaaattcccaaattgaatccattgaccattctgttttaggagcctggcttgagcaaatgcagctggatcagcttgtagtctagtcaaaattgaccctttacatatcttgttgagataggtatttaatttcgtaaggtacatattcttttggtgaaattttttgggaagacaacaaggaaagaagtgtagtaaaaggaatggaggattggttggctgcgaagttacctgaaggatattctattttttcttctttttttaaataataattgtcattcattattttactacagagcttcaagagagttgaagaagctctctctcttggggctgaaattcaatagtaggagaaaaatcctgtcgaggttatctatttttcttccaaaacggccccgtttcaggatttttccccttgctattttacttgatttctgagttcactatcaagcaagctagtttggtttataatggaacaaaaaccattattagcctgcgtttgttttgaaagatttttctgaagttcactaagttaagccaagtcaatgatttgctgttgcctatggttgaagttgtttctttctgagggaataattagagatgatctgcactgttgaatatttacggcagataaatgagatagtgaagtttacattgttcttcctgttaagctgtgttaccttgaattgtactggttatatatatccatttcgtttctaattcaaatcaaatgtaatgtttttcttttaaaaaaaaaaaaaaaaagtggagcaagggggaatgtaatgatacttaagcgagggatggctgcaaagtacccgccacgcgtccgatttttttcccattattttgtcattcattgttttactatagagcttcaggggggaggggtaagaagcccgccctctctctggggtgcgatgatatccccgtaaagaagatgttcttccttaaaaaatctagtttcaggactcttttctttcattttattccgagccaagcaaaaccaagagcctcatttgtattcaagttcgttttcttggtaggaatctgttagtatattgctattgcatgtatagaagactagagcgtgtttcttgttaaggaattagaggtgatctgcgccattaatattcattgctggcagattgtttagatatagtgaaggctactgtgtatgtattggttatttttcaaatttaatgtaacggttcatttatgggtattattcaatggaaattatgaatattgaaaaaaatagtaaaactaaataaattaaattaatgaaatctaaaaggttgagggcggcatatgtattgttagatctaatctggtgccctaagtatatgccgaaggatttgtacgatccatcttaaatgtgaatcgtacttttggtaagaactttagttggtggggtagtgatagtatctatttttggttcaaattttaattcagtttaaattgaaatcaacttatgtgtatgtaatatgtagaaatcgttgttaaacactttaatgttactatttaattattttcattaatatgatttttaattaatatttattattattattattattagactatctcaattataattattcttgcaatttaactactattgatgtctttttcatgtttaaattatactaaaggttgtctaattttgtttgatttctcttactaattatttatttttcttattttgaaaaatattacactgtttagtcttataagaagggtttgttctgttgtaatgaaaaaagaaaaacaagggggttatgtgtaaaattttaggtgttaatttattctaaaaagntgttttattggatgctttatataaattaatttgatctcattgtgagtgttttctggagccacaacgtaaaatggtactgcggca

SEQ ID NO: 48136 - DNA, 2960 bp, Glycine max
  Clone ID: PAT_MRT3847_14472C.1
ccacgcgtccgcgttgttgttgcttccgattctttgattcttcgcttttttcttctcacttcacattccgattcgtcgcagattctttcagtttctaaacttgatgatcgccactgcctccacctgtaatcgttagttgaagtcacgtgaggtggtccagagaaatcaaaatctccttcaacttcgtcttccctttaggtgtaaaagtcagctaacgataaagaaatgaaatcgctaactgttaatactgaagattctttttccagtttgctggaacttgcttctaacaatgatattgaaggcttcaaggtgcttttagagaaagattcttcttcgatcaatgaggttgggctctggtatggccggcaaaacggatcgaagcaatttgttcttgagcacagaacccctttgatggttgctgcaacttatggtagcattgatgttatgaagattatactgttgtgccccgaggcagatgtaaatttcgcgtgtggggcgaacaaaaccactgctcttcactgtgctgcttctggtgggtctgccaatgctgttgatgctgtgaagattcttttatcggctggggccgatgtgaatggcgtggatgcaaatgggaatcgccctattgatgtgattgctgttcctccgaagctgcaaggtgcaaaagccgttctcgaggaacttctctcggacagtgcttctgaaggctcaattggtgaaaagaaaaacattgcatttgatttgaatttgaaacgaaatgatatataaccagtacaattcaaggtaatacagcttaataagaagaacattgtaaacttcactatctcatttatctgctgtaaatattcaacagtgcagattacctctaattattccctcagaaagaaacaacttcttcaaccttaggcaaacagcaaatcattcacttggcttaacttggtgaacttcggaaaaatctttagaacaaacgcaggctaataatggtttttgtcgcattataaaccaaactagcttgcttgatagtgaactcagaactctagcttgcttgatagtgaagtgaactcagaactctagtgaaatagcaagggcgaaaaccctgaaacggggccgttttggaagaaaaatagataacctcgataggatttttcgcctactattaattgatcagccccaagggagagagctttttcagctctcctgaagctatgtagtaaaataatgaatgacaattattttataaaagaaaaaatagaatatccttcatgtgactctgcagccaaccgatcctccattcctttactacacttcctttcttgtctttccaaaaatttcaccaaaagaatatgtaccttacgaaattaaatacctatctcaacaagatatgtaaagggtcaattttgactagactacaagctgatccagctgcatttgctcaagccaggctcctaaaacagaatggtcaatggattcaatttgggaatttgaatttggtccatcagcagatgcagtaggcataggagatgcaaacttctctttgatcatctcaggtggggattccttcaccagagattggacccaagagagatcaggctcttccccgttgttcttgagctcaaacgaggatgatcttcgcatctgacgaccaagtgtgtctccatttactgaccaatcagctttcccattaggagatccccactttgaccaagggtttgcaggggagccaacaagtgaggcaggactgttggcaccgaggtctctcgaactgagactgcgcagctgctgctgctgctgctgctgtttttcgcgctgagcaaatgccgatatgcgagagctcattggagagattggttcaacacttcttggtgacatcctacccgaaggagatacaccaaaggaagcctgtaaaagaggatgctcaacattcttaggagatagcaagttagtatttataggtgataacatactttggagctgttgaaactgattgagaacagctgatttgtgcgtaggggaaaacacggaacccgctgctggatcagaataccggggagatgaagaaatctcagcagaaaatagttcatcaagatttgatggagttagtgtcttggaccgaccagatcgactcactgaaatggcaccaggacggggctgcgagaaacagcccaagtcattcaaaaggtgttgctggccatcaaaatcttgcaacacatccaagtcttctggtggcatgtcacgagcactaagagaagatctcaatcggctagtttgaatattgcttcctggtaaatgaagagctggaacatttggctgtggccaagcattagatgaatgagaaatgccatttgtggatggggacattggttgcccaaagggagatggagacatggaagaaccgatgaaggcgagcccggcaaaaggctcatcgcagcagccatgtccatgacattaggagccgaggcagatgacctgggcgaagggacagcagatccagtggacacatacagcggacgaagctcctccgcagtgtgagcaaaaaaacacacccttcgattgcaactggtaccatctttgcagaggcgtgtccgatactgagccgggtgcagccagcactcaaacaccccatgagcatattcacacatgtccccgcgcctacaagcccctttcctaaaatcagggcatggcacacagctgtaatggaacttctctcggacagtgcttctgaaggctcaattggtgaattctctgtcccagtgtctgttaatacttccagtctgggttctcctggccattcctcgaatgggatgccgtatactccttcttccgcctcctcaccgccatctcctgtggtggcaaagtttactgatgcagctgtttgctctttgtcggagaagaaggaatacccaattgatccatcgctgcctgatataaagaacagcatatatgcgaccgataagtttcggatg

SEQ ID NO: 48137 - DNA, 126 bp, Glycine max
  Clone ID: PAT_MRT3847_14473C.1
aacaaatgatcttggtcatttcctccagaagaaccttcttctcgacaagatgaaacaaatcgcataagacactggaactgagggcaggatcgcaaatctgtcatcaattgctcatcatcacacaac

SEQ ID NO: 48138 - DNA, 546 bp, Glycine max
  Clone ID: PAT_MRT3847_14474C.1
cttttttttttttttttttttttttttttttttttttttttttttttttttttaattcaaggggaaaggagaccccaagggttatacaggataagcattttgtttcctttgccctcatcctcattttccccttttggctcggctcgggggttattctacctcctatcagcccaccttaaattatgggcttaaatatatttaagacttctaataaaggattaatttttaattggggttcctaacaagttttggggggggatgggatctctaatatatttaaaggtttgttttggtcgagttcatggtgtcggttggggggcgattttacctcctctcaacgggggaaatattttgcgaagatttattcacaggggggcttgggtaatcacttttttgtgaggaaaggatggtgggtaattattagttgttattggggggcggggggaatcgggccaatgaccttttcctccctccttttccttttgcacccgagggaaccttttggcttggggggggggtccccttacctgggccctggggaggggg

SEQ ID NO: 48139 - DNA, 553 bp, Glycine max
  Clone ID: PAT_MRT3847_14475C.1
ggctcgaggttttgcacatatgcgttggagttccctgctgtagccaaaaaagattctgtaaaggaggaagagagaccaaatgtgagaaggagcatcttgtatcaacataaagaaaaatattagacaaaaccaggaaacacagcactaacagaacaagacaaattacctttccaaatgcagaaggatttctgatcgataggtgaaccagttatagtctgaataacttcaaacaacatgctctgcggagtgctcctgagctcttgtacaaccccatatatagttttcccattatcaaagtaaatgtgattattggggtgttttgtcttgcaaccagcatgtcgctcaaattcaaatgcattaataacctgaagaaatgtaacattagtcagagatagcaatttggctcgaaaaggattctcctctatgataaatggcttggagaaactttaccttggaaaaattacatgagtgacaactgcacaaatagccagcaccttttataacacctcggagttccttctaacaagcataggaagaatgcagacatgtgatg

SEQ ID NO: 48140 - DNA, 415 bp, Glycine max
  Clone ID: PAT_MRT3847_14476C.1
tcaagttaaatttaacctatctcacaaggatcattcaaattttgagatttctttatgatattcaccactctccaccctatagataactctcaaaacgaacaaagaaatttaccctcttctatccaaattccacccaactcttatttacctcttcactttcattacttcaaccatcactcacaactctcttacaaaatatacatccttatatccaacaactctttcctcaactccttcctcccatacattctctcctatttcatcttactccatctctttcaacatattcaactcatcatctatacccatctcttacttttccattctctctttttatccaccattacccttattactttctttcttatacttcacctcccctaccttttcctcttctctctcatatcaattccct

SEQ ID NO: 48141 - DNA, 151 bp, Glycine max
  Clone ID: PAT_MRT3847_14477C.1
cgttttgcttttctctctccgaaaaggacagattctctgtctctgtctatctatgtgccttttaggggtgattgtgtataggagatcgttcgtcgggttcttcccactcacacactcagcgttggtgagatgggtatgtcatggctgagct

SEQ ID NO: 48142 - DNA, 681 bp, Glycine max
  Clone ID: PAT_MRT3847_14478C.1
tcgacccacgcgtccgtacggctacgagaagacgacagaagggatattgggacatttcatttatttattatagactttaattaacttataacaatgatgatttaattgagaaattaaatcaactttatataatttatcttgataatgattgttgttgataaaatgtgttatcaatagatttacaactttattgtgtatatcatgatatgacagtcaaatggaagctaccaaaaccaaacttctgttttaatttaatcatttttaaaatgcttcatttctcgcctctgactctgcctcaaagaattaagcttccttcaaataaaagactaattgaacaataatttagccttgtctaagaattgaagggtgaggaagtataggggttgggactacggcttcattgagtttcagtgttctgttattagaatgataaggttaattagctactcttttatgtgacacaagtaaagtgattaaacgctttagtttgtggagaaaacataaaatttataagaaaccccatggctatgataaaatatataaaattaatctaaaaagtttaatttaaataaaaattttaaattccaagaaagaattcatgtttcaagtatgagcataagtcataataaccatccaaaaaaaaaaaaaaaaagaaaaaaaaaaagcggccgatctagagga

SEQ ID NO: 48143 - DNA, 473 bp, Glycine max
  Clone ID: PAT_MRT3847_14479C.1
acaatttttcctgatagaatattaagattcttattgttttaggaggtatgactcttattatgtgtgtagaactatagaagtagtcctattggacttcacatgttcaagttgtaacttgacctatattatggttagtgtttctaattccattctttatgattagtcttacaagggaaagatttctgagtatcatttagtcaaacattcttatgcaagtagggaaaagaaaattgtaaatagaaaccaaaatggtaaaggtagtgttaaccagttttagtagcacatccttataaattataatccatttggtccattttaaaaaaaaaataattctgatcgcaggcagatgttgacaacagtggcacaattgactacagagaattcatagctgcaacattacatttaaacaaaggtggaagaaaagatcatttaattgctgctttttcattttttgatagaagtgggagtggctt

SEQ ID NO: 48144 - DNA, 421 bp, Glycine max
  Clone ID: PAT_MRT3847_1447C.1
ccctcgcgtacggttaggtatggatggggaaagtgggacatccgagacgctaatatgtctggaaggtcacactatgcatcatatgactcaaccatgccttgcctcaggcagaaccagattcacacttagaaggcttaggagcccaacactacgaccacgactcggaaaactctttcattcatccatcctactctccgatcaccccccttctgctaccctactgcaactccccagcctccacctggggatctacccaaacaccctccctgaattttctggaacgacgatgaataccaaggctgaaccgtggaacactcctccggcgagccttcctgcgatcccaaatgcacggaaaacgcgctctagaccgtcaccactactcaaaccaagacatccctcaggcctacgtggctacttcacc

SEQ ID NO: 48145 - DNA, 4050 bp, Glycine max
  Clone ID: PAT_MRT3847_14480C.1
ggcgctcccgcaaaacacaccctccgtctctctcactcaatttccagactcctcctgggaagaatattctttttggtcactcaccacctcaagtctccttcttctctttaaaatcaccagcaaatcataaatggcaggaaacgattggctgaacagctaccttgaagctatacttgacgtcggtcctggcctggacgatgccaagtcctctctgcttctccgagagagaggcaggttcagccctactcgctacttcgtcgaagaggttattggcttcgatgagaccgatctctatcgctcttgggttcgggcttcctccaccaggagtcctcaggagaggaacaccaggctggagaacatgtgctggcggatttggaacctcgctcgccaaaagaagcagctggagagtgagacagcgcagagggtgaacaagcgtcgtctggagcgcgagcgggggcgcagggaagccaccgctgatatgtcggaggacttgtcggaaggagagaagggcgatcccttgagtgacttgtccgctcacggcggcgtcggcgacttcaaccgatccaggttgcccagaatcagttccgctgatgccatggagacttgggccaacagtcagaaagggaagaagctctacattgtgctcatcagcattcatggcctaatacgaggcgagaatatggagctgggacgtgattctgacacgggtggtcaggttaagtacgttgtggaacttgcaagggcattgggatcaatgccaggagtttatcgggttgatttgctaactagacaagtgtcggcgccagatgtagattggagttatggggagccgacggaaatgttgtctccaagagacacagatgattttggagatgacactggagaaagcagtggttcttatatcgttcgtattccctttggtccaagagataaatatattccaaaagaacttctctggccttacattcctgaatttgttgatggagcgcttaaccacattatacagatgtccaagtctcttggggaacagattggcagtgggcatgctgtctggcctgttgccatccacggacattatgcagatgcaggtgactctgctgctcttctgtctggcgcattaaatgttccaatgctttttactggccactcacttggccgagataagttggaacaacttttaaagcaaggtagactatcaaaggatgaaataaacacaacttacaagattatgcgtaggattgaagctgaggaattggcccttgatggttctgaaatagtcatcacaagcactagaccggaaatagaagaacaatggcgcttgtatgatggttttgatcctgtattggagcgtaaactacgagcaaggatcaggcgtaatgtgagctgctatgggagattcatgcctcgcatggcgacaattccacctggtatggagttccatcatattgttccacacgatggtgatatagaaggtgaaccagaaggaaatttggatcatcctgccccccaagatccacctatttggtctgagataatgcgcttctttaccaaccctcgcaagcctatgatacttgctctcgctagaccagaccctaaaaagaacatcacaactttggtaaaagcatttggagaatgccgtcctcttcaagagcttgccaaccttacattaattatgggtaaccgagatggaattgatgagatgtcaagcacaaatgcttctgttcttctctcggtacttaagttgattgacaagtatgatctgtatgggcaagtggcatatcctaaacatcacaaacaatatgatgttcctgacatatatcgcctagcagcaaagacaaagggtgttttcattaatccagctttcattgagccatttggtcttaccttaattgaggcagctgctcatggtttgccaattgttgctactaaaaatggaggtcctgttgatattcatagggtacttgacaatggtctgctcgtagatccccatgatcagcagtctattgctgatgctcttttgaagcttgttagcaacaaacaactttgggcaaaatgtagacagaatgggttaaagaatattcatttattttcatggcccgagcactgtaagacgaacctaccctcaatcagatgttatgccattagacagccccaacatcatcgaagcaactgaggggtctaagggtgctgatagatacgccttgatcgaaaaagtgggatatctcactggaggatctaaattggaaatcattttagtaatgagagaagagtgagggtagtggaaatgacaattctttgaattctgatggaaatgctgctgatagaggggcaaaattagagaatgctgttttgtcatggtcaaagggcatctctaaggacacacgcaggggtggggctacagaaaaatccgatcagaatccaaatgctggtaaatttcctccattaaggagaagaaaacatctgtttgtcattgctgtggattgtgataccacttcaagccttcttgaaactattaaagccatctttgagtctgctggaaaggatagggcagagagcattgtaggtttcatattgtcaacatcattaacaatatcagagatacagtcatttctaatctcaggtggcttgagtcccattgattttgatgcttatatttgcaatagtggcagtgatctatactatccatccctcaatcccggagatcgcccatttgtggttgacttgtattaccactcacacattgaataccgttggggtggagaagggttgaggaagactttagtgcgatgggctgattcaatcactgataagaagggtgataatgacgaacaaattgtgagtcctgctgaacagctttctactgactactgttatgctttcaaagtgcgaaagccaggaatggctccccctgtgaaggagcttcgcaagttattacggatccaagctctgcgttgccatccgatatattgtcaaaatgggacaagactgaatgtcattccagtgctggcatctcgttcccaagccctcagatacctatatgttcgatggggttttgaactgtcaaagatggtggtgttcgttggagaatgcggtgacacagattacgaaggacttcttggtggcctacacaaaagtgtcatactgaagggagtgggaagcagtgcaatcagtcaactccataataacagaagctaccctctttcagatgtcacgccattggacagccccaacatcgtcgaggcaactgaggggagtagcggtgctgatatccaggctttgatcgaaaaagtgggatatctcaatggatgaaaaaatttgaaagtcatttctagttatatgcctcttagtgtgtgtctgctatgaaacctacttctgagcaagcagatatctgaattttatccacaatgttcataaagcttttttcctcctctcttctctgtaacttctatatcattctcttcctcacaaacttccccatgaaacatatttcctcttgtttccccacttatctccttgttggttctgtatctacatattacatttttaatgaaggccacttctcatttctcgtgcctcaaaacttttgtcgattttataccggcttattctcgtgactggtgatcacaatctcgctggatggcaaatatccaaattcctcttatactcaacatactctttcttcttttccttttcttcttcctcgttcagtacaaaaaaaaaaaaaaaaaaaaaaaaaaaaaaaaaaaatcaaaatacaagaaccaagaatataggagattcaattcaggtcagtaaagatcattgtccagaccttttgtgaatcataaagaaacttgatggtttttactcgaatagggtattttatgccttgagtgtcaagtacatctttattttgtcttgtggcacactcgattcctaatatgaagtggcccataatatttcatttgacgtgagaaatcttatttgttacagttttatatgtcatccccattcttttgcaattcatttgtattcgttactcagttagaataaacgcccaattggttcgtg

SEQ ID NO: 48146 - DNA, 152 bp, Glycine max
  unsure (1)..(152): unsure at all n locations
  Clone ID: PAT_MRT3847_14481C.1
gaanncggctcgaggcggcatggtggtgccagtgcttaatctctactttatacatcgtctcttaccttccaacatccttcttcaacattcagactacactgtgccacctattttgatgcgtctagagtccacaccttattcatctactatca

SEQ ID NO: 48147 - DNA, 2911 bp, Glycine max
  Clone ID: PAT_MRT3847_14482C.1
ctctgctactctcctatctggcgcattaaatgttccaatgctttttactggccactcacttggccgagacaagttggaacaacttttaaagcaaggtcgactatcaaaggatgaaatcaacacaacttacaagattatgcgcaggattgaagctgaggaattggcccttgatggttctgaaatagtcatcacaagcactaaacaggaaatagaagaacaatggcgcttgtatgatggttttgatcctgtattggagcgtaaactacgagcaaggatcaggcgtaatgtgagctgctatgggagattcatgcctcgcatggcgacaattcctcctggtatggagttccatcatattgttccacacgatggcgatatagaaggtgaaccagaaggaaatttggatcatcctgccccccaacgtccgcttatttggtctgagataatgcgcttctttaccaaccctcgcaagcctatgatacttgctcttgctaggccggaccctaaaaagaacatcacaactttggtaaaagcatttggagaatgtcgtcctcttcgagagcttgccaaccttacattaattatgggcaacagagatggaattgatgagatgtcaagcacaaatgcttccgttcttctctcggtacttaagctgattgacaagtatgatctgtatgggcaagtggcctatcctaaacatcacaaacaatatgatgttcctgacatatatcgcctagcagcaaagacaaagggtgttttcattaatccagctttcattgagccatttggtcttaccttaattgaggcagctgctcatggtttgccaattgttgctactaaaaatggaggtcctgttgatattcatagggtacttgacaatggtctgctcatagatccccatgatcagcagtctattgctgatgctcttttgaagcttgttagcaacaagcaactttgggcaaaatgtagacagaatgggttaaagaatattcatttattttcatggcccgagcactgtaagacttacctttctaaaatagccacttgtaaaccaaggcatccacaatggcagcgaagtgaggatggaggtgaaagttcagaatcagattcaccaggtgattccttgagagatttacaggacttgtctctaaatctgaagttttcattagatggagagaagagtgagggtagtggaaatgacaattctttgaattctgatggaaatgctgctgatagaggggcaaaactagagaatgctgttttgtcatggtcaaagggcatctctaaggacatacgcaagggtggggctatcgaaaaaacagatcaaaatccaaacgctggtaaatttcctccattaaggagaagaaaacatctatttgtcattgctgtggattgtgataccacttcaggccttcttgaaactattaaagccatctttgagtctgctggaaaggataaggctgagggcactgtaggtttcatattgtcaacatcattaacaatatcagagatacagtcctttctaatctcaggtggcttgagtcccattgattttgatgcttatatttgcaatagtggcagtgatctatactatccatccctcaatcctggagagcgcccatttgtggttgacttgtattaccactcacacattgaataccgttggggtggagaagggttgaggaagactttagtgcgatgggctgattcaaccactgataagaagggtgataatgacgaacaaattgtgagtcctgctgaacagctttctaccgactattgttatgctttcaaagtgcgaaagccaggaatggctccccctgtgaaggagcttcggaagttattaaggatccaagctctacgttgccatcctatatattgtcaaaatgggacaagactgaatgtaattcctgtgctggcatctcgttcccaagctctcagatacctgtatgttcgatggggttttgaactgtcaaagatggtggtgttcgtcggagaatgtggtgacacagattacgaaggacttcttggtggtctacacagaagtgtcatactgaagggagtgggaagcagtgcaatcagtcaactccataataacagaagctaccctctttcagatgtcatgccattagacagccccaacatcatcgaagcaactgaggggactaggggtgctgatatccaggctttgatcgaaaaagtgggatatctcactggatgatagaaattgaaaatcattttagtaatatgcctcttcgtgtttgcctgctatgaaaccctacttctgagcaagcatataatctgaaatttatccacaatgttcgtaaagcttttttcctcctctctcctctgtaacttctatatcattctcttcgtcacaaacttccacatgaaacatatttcctctggtttccccccttatctccttgttggttctgtatcttacatattacatttttaataaaggccacttctcatttcccgtgccttgtttcttttgtcgattttataccggcttatctcgtgactggagatcacaatctcgctggatggcgaatatccaattcctcttgtactcaacatcctctttcttcttttccttttcctcgttatgctatagtaggagcgtacacaaatatataaaaaagagattacgaagaaaaaaaatcaatattcaagaaccaagaatataggagattcaattcaggtcagtaaagacattgtgcagagcttttgtgaatcataaagaaaccaccagatggtttcttctcgaatagggcattaggctttgagtgtcaagtacatcgttgttttgtcttgtggcacacttgattagtggcccgtgatatttcatttaatgcgagaaatcttgttatagttttatttatctcttagctccattcatttgcaattc

SEQ ID NO: 48148 - DNA, 176 bp, Glycine max
  Clone ID: PAT_MRT3847_14483C.1
tgcgcattcctctcccaagacagaacaagcgggagacatgcatgaaccatcgaacacaccacggtctgttccatacctttttacatcattctaccgaaacacaccatcattattggacacactatagtacacgtagaacatgccgtaacacacacatttcgattgaatgctttcag

SEQ ID NO: 48149 - DNA, 233 bp, Glycine max
  Clone ID: PAT_MRT3847_14484C.1
tttgctcgccaatgcccacctttgggccggggcctagcttttaatccctaacctaaaatttcactttaaaccttattcttcttattatccaacattatttttgcgatggtccactgttttttaaatcttattttttcaactacattactattcaatacatgtacctttccaattgcacatctgtataacactttagattaataacttattgaacttttaaaacatacttcttt

SEQ ID NO: 48150 - DNA, 481 bp, Glycine max
  Clone ID: PAT_MRT3847_14485C.1
catctctagctatctcgatcgaactgtccaaggtcctgtcacccacaagcgcgtaacgagcgagcaatgggtacaccgttgggaatgtgagagtaggcacctatatagctagttgggggagaggcctactatgagcagaaaggcccgccaaacttaccatatgtgtaatgcaggtactagagaagatttcacagttacaaggatgggcggaaacgttaggataaaccttaaggttaagagttacttcgaagcgctgcggtgatgaggcatagtgaatttcgcataagcgatagaagcgccaggcagcggtgggggcggcaattgctcaaccaacgatgttgccagtactgatcgtaccgtggaaaaaaaagagtgaatagtatcgtagcgatcggtagggtgcagctcgcgaacgtttggtgctgcgaatcgtaggcgtggacagagactatagagcattggtatcaataggcggggggat

SEQ ID NO: 48151 - DNA, 1392 bp, Glycine max
  Clone ID: PAT_MRT3847_14486C.1
cgaacattgattgcacccacggtagtaagtgagtttcccttataaaattcaatccagaaaaggtttctctcaacatgcgcaaaaatttaaagaaatcaacacacacaaacacaacaacatatggaggtgctaagggtgcaaaccatagcttccaaatccaaagatgctgccatcccagccatgtttgttagggcagagacagagcaaccaggcatcacaaccgttcaaggggtgaaccttgaggtgccaattattgattttagtgacccagatgaagggaaagtggtgcatgagattttggaggcaagtagggactggggcatgttccaaattgtgaaccatgacatacctagtgatgttataagaaagttgcaaagtgttgggaaaatgttctttgagttgccacaagaggaaaaagagttgattgctaagcctgctgggtctgattctattgaagggtatggcacaaagcttcagaaagaggtgaatggcaagaaagggtgggtggatcatttgttccacattgtgtggcctccttcctccatcaactacagtttctggccccaaaaccccccttcttacagggaagttaatgaggaatattgcaagcacctaagaggagtggtagacaaattgttcaaaagtatgtcggtagggttggggcttgaagagaatgagctaaaggagggtgcaaatgaagatgacatgcattatcttttaaaaatcaattattacccaccttgtccatgtcctgatctggtcttgggtgtgccaccacacacagacatgtcctacctcacaattctggtgcctaacgaggtgcagggccttcaagcatgtagggatggccattggtacgatgttaagtatgtccccaatgccctcgttattcacattggcgaccaaatggagatactgagcaatggaaaatataaggcagtttttcacagaacaacagtgaacaaagatgagacaagaatgtcgtggcccgtgttcatagaacccaaaaaggaacaagaagttggtcctcacccaaagttggttaaccaagacaatccaccaaaatacaaaaccaagaaatacaaggattatgcttattgtaagctcaataagatccctcaatgaatgaagtgggcactacgagataattatagctcatggtttctctgttttgttatttaatttatggaatgaaagtgtgacttgtgggaagtagattaaataagatctgtgactaatgttggtttctctgttttgttatttaatttatggaatgaaagtgtgacttgtgggaagtagattaaataagatctgtgactaatgttggattaatcttatgcttttgaagtaaataaagatgacaagaaacagtttgtctgttctgttattatc

SEQ ID NO: 48152 - DNA, 197 bp, Glycine max
  Clone ID: PAT_MRT3847_14487C.1
aacggggtttgtggcaggtgttaactggacagtggctagggcaacaccaacaatagcagaggttgaccttctgatttttggaatatatggtcctgcagctgttattgctgcgaaaagatcaacaggagacttagtttggcagtcaccttttgacagcacatatctccagtagtgtcaccatagtttggatcttacta

SEQ ID NO: 48153 - DNA, 592 bp, Glycine max
  Clone ID: PAT_MRT3847_14488C.1
ctgattacgttgtagcccggatttacaacaaaatgacatcttcggcccaactgaacggttcaaagagcaaacttaacaactgaatcaatcatcctgcaaagtttgtgatgggccaataattatttaacattttctgtaatatcaaagatatcatataccctttgtttggacaggtgtatttaggaaacaataaaatagaggtggtagaataattttctatgatttggatgaaggaaaattaagagaggttggaattgaatttttgtgggaccaactacaaaaataattattctcttatatgttgattcaagttgatgagtcaatctactcaacctctctttaatttgttggattgatagactatgtgagttggttgattagttgagtcacctgatccgcgtctcttttcttggtgagtgaactcaatgaattcaacatgctttgtcacctttatcttagaggaaagagcgagatttagccaacacggtgttgcaacattgtacttttcataatgtttgattaagtgattttaattaattagtacatgtaattaagtttaaatttaagtgtctataaatagttaattaccagg

SEQ ID NO: 48154 - DNA, 310 bp, Glycine max
  Clone ID: PAT_MRT3847_14489C.1
gaaatgcacgacgcttacattgccaatctcgacaatgagatacgagaattgtatttgcacagaccaaaggaagctcgccaattgaaaaggaaagctatctctcgtattgaatggctgcaaaaagctgatgtagcctaccatagcacagattgaagaggtccattctatgcagatgatgattaacgctcctgattcaaatgatactatagatctactgaagagcattgatctgaagggtttacaaggagcaggtaacagctttttcaaacaagcatagatgtgatgataagctagtgtaggctaacacaca

SEQ ID NO: 48155 - DNA, 1401 bp, Glycine max
  Clone ID: PAT_MRT3847_1448C.1
gttcagagtaaaaattatttacttttaaccacttttttgagtcctaaacttcccttgcccccttccttaacctccctccctttaatgaaacccagttttttctaattaatgcagttgacttgatttcctcgcatgatcctaatttatggaaagcaaaactagtacaagttgtatgttacacaaattggcctgtgaatcaatacagcatgatctctacatcaacactgtcaccgaaaggaaaggtgagttaaaaggtcacgggaaaggacagacatgactacttgtggtaggtattgtcaaaaaatcacatctcggtggctacgggactactacaaatccttcttataaggataatacattatacatctctgacaatgcttcaaagccgatgattttgtatgttcattcttatgtacaaaaggaaagaattgatcaagaatccaacaaacacctgagtctaatgtgcttttaatgacgcgatgttgggcttctcatgactcccaaggtctccaggtatgacaccttcttgttggtcactatggttggaagtttttgttgctttggatcatcatcgtctttgcataagtcatccgaaattgcataggggtccttcttcatgtctgcttcaccttgatcagagccccaacccataaaatctgataatgtcattgaaccagcttctgcactagccttgtctatctcttctctaaaaggccttgaaactgagcttctccttctccctgatagattttgagattgaatttgataatcagcttggagtacatcatctattcttgaaagtactgtaaaagccaaactttccaatactcttgaatagctttctagaacagcttgccccacatccctgttgtattggattttgcttatccaatgcagattgaggaaggccagggaaacgatgctttaagagaagtaatatggtttctgctctctcttcaaagagctctcttttttccaaactcactgcagaaccccaagcagatttggaatctttttggtgcatctttcgcttccaaatcactattgatgcttcaattctattcttgagatctaggattttatgttctgatgataagtccatggttgataggaactggtcaggatcaaaaaattcaactgttatactcctgtagttcgagtcccctagacttgctcttccattcttgggcagagagtcaatatagctttcggggatctccatttctgttagaatttgggcatttattgccatggctgctttaagtacttgtttaacacaatctttctgatactgcagaaattgtctagccatatcagatagaccttctgcaggaaccttaggggtaggtaaccaccacttatcatcattttttgtctttgcactgtcttgatctgaatcat

SEQ ID NO: 48156 - DNA, 287 bp, Glycine max
  Clone ID: PAT_MRT3847_14490C.1
gggggcccaaaatgcgagatacctacccccttttccgaagggaaaacttccttatagggggcgcaaaatttaaacaccgggaccgcgtttaagcacctgttgaagggaaaaaccccgggggggcccgcccaaaataacggggaagcaatacccctttcgccagtggggcaaatatacaaaagggcccgagacggagccctttcaaaaaagagtccaccccaaaaggggaaagggcaccccccgggaatccctaaataaaccccggcagagttttgggaccctcggaa

SEQ ID NO: 48157 - DNA, 272 bp, Glycine max
  Clone ID: PAT_MRT3847_14491C.1
atcgcgccctccttcttgaacacagaatatgggtgacgtttaagaatgcataccaacttggggacgttggaccccttgaacttggtgagctcaacaccactgtgctcctgggttcttagcttcgcggcactttcaaacatatgtttaaagattgttgacgccggtgatcaaaaacccaatatggggaacaacaattgctgggtgcttgaggagacttaagatcttggccgaaaaacaatctcccttgatactgccactgcggggcaagaaac

SEQ ID NO: 48158 - DNA, 400 bp, Glycine max
  Clone ID: PAT_MRT3847_14492C.1
aaaacacgcgaaaaacttgccagcacagaacttgtccccaacacagcgcttaaaaagcttatccagaaattctgttccgaaaacggcgttatagtcgtgaatccgattgatcataatcaaacagtaaccaaaacaagcgacgcaggcagccccgccgcagcacacgccatgcagtttttgtcatggtttctctccaggaggctcgtgttcggaaccgaggaacagaaaaccaaagcagcgtacgagattcgtttgctggcgaagtccagcgttatcaacagggcgtgtttgtgtggaaatgggaactgtgccgacacttttggatcttctcgccgcagacgacaaaaactggcaagagagcgcaatcagtgctctgatgaagctctctaagcacaccaac

SEQ ID NO: 48159 - DNA, 843 bp, Glycine max
  Clone ID: PAT_MRT3847_14493C.1
gtcatttgtcattaaaattctcccttctctctcccctccttcatttctctgtttcaacttgcactattttctattcccccttcaacccttttgacattctctgcgcggacattgccacagccttttttcactttaccctcttaaactaaactccattgtcttcccttctcacctcacactcacaccaccaccatcattccctctcttctcatttcactataataataacaacaacttcccattcctcttcccctgtagtagccaacaaattaaacacaccaaaaatgcacgagagatcgatgaaagaagctgctggcacgtgcccacaaaggagaagaaccccttccttctcctcttctcttctcgacgccatttaccgctccattgacgaatcaaaatccaaccttcacgacgatcaacaactgggtcaccaccaccaccacgatcaaaccttagccacacacagtttcacctctgaagaaaaaggtggcaaaaaggagagaatgaatcttcgccgagcagtgatgttggaagattggatggagaagtatggttcttcccgttccctcaatgctcagttgctaaactcgagttcaagctcctcagaatgcagctctgcagggggaatattctcctcttcagaaacagacacgacaacaacaaccttgaagaaacaaagaccagcaaggcccacatcggagaagaagaagaagaagaagaagaagcaggaccatataatgagttcagaaaaaaagaacaaagaaggtggttttgcaaggaccaagttgagggcgttgaaaatttacggtgaattgaaccagagagtgaagcaacccatttcac

SEQ ID NO: 48160 - DNA, 781 bp, Glycine max
  unsure (1)..(781): unsure at all n locations
  Clone ID: PAT_MRT3847_14494C.1
aattatgcatcacttattttttttaatttttatctatttaacaaatattttaattcttttttatatattactaaatagactcctcaagtagccttttgtcgttatatttcatccatgctagttagaaaatgtcaacggatacattaacgaatactgacaattattattattattattattttttaatattacatgtagggcccataaaaacttttaagatgaatgcttaataagcgggtgatgcttcactgaaacatgtcaaacgctcctttcggtgcacattcttattattaagcttactagactcgaacaccattgccgggtgtgctcttataaaactatcaaagataagctgttattaggacataaaaggccctaaatttaattgagaaaaagggtcatgtgacagtatagcaagttttatacagtgatcaaaacttatcatgcatagacattaaattcaatttaatttataaacaaaatttaaagttaaagacttgtgtttcatttggtagttttgggtcagccaattgctcattttaccacctttagtgaagattgaatgagaggtgaagtngactaaacaacaaatggagaaaaaaaatatcccaaggaacaagataaacttttaaaaatttaaaactattactattttaatcaataacaatttcataaatgttcacccaaacacactttatangaggaaaacaggagaggaaaggaaaaattactttatttttctttaactaaaataataaaaatagccttgggttaaaaataa

SEQ ID NO: 48161 - DNA, 258 bp, Glycine max
  unsure (1)..(258): unsure at all n locations
  Clone ID: PAT_MRT3847_14495C.1
cgttcaccaatttcnngaggggaaagaggaanngcctttangccttcgtagagaagnagaacggggcatgttccttttctgtcctctctctctctntntntntgatcagacagacagacacgcgcatattacacatagatgncgcagagaaactctctctnctctctctntntctctctctactctgcatattgctccaaanccacacagagtacaganggatcnncgaatatagcggttttancngctggaatctgc

SEQ ID NO: 48162 - DNA, 348 bp, Glycine max
  Clone ID: PAT_MRT3847_14496C.1
ttacaaaagtccttttccaaaattctgaatgtcaccaataataaaaaaaggaaataaacccagccgttaatgtttttcctcaataaggaaactccaccaacaaaattcaaacgcgcccctcactctcactccccatgccgacgcccgtggcagccgcgcgccaatgcctaactaccgacgccgcgcgcgccctcgacgaggccgtctccgtcgcccgccgccgcggccactcccaaaccacgtcgctccacgccgtcttcgaccttctttccctcccatactaacccctcctccgcgacgcctgctcccgcaccagaaactgcgcgtattccccacgccttcagttca

SEQ ID NO: 48163 - DNA, 257 bp, Glycine max
  Clone ID: PAT_MRT3847_14497C.1
ggttcgaggccacccgtggcatgctgcaaccattctacgcggcgtgtctctgacatacgccaggggaggggcaactaccgaccacagttgatgatctgcactgctcccgatgaaactgattcacacgataccgtttttgcttcgcatagcctcaatggggccataggttgacccttcgatcttgatatgaacatgagagccatgacgctcatatataatgacagacgccaggtttataaggggaggcaaatctcgat

SEQ ID NO: 48164 - DNA, 257 bp, Glycine max
  Clone ID: PAT_MRT3847_14498C.1
gtggaaggatttttcgccagtcaagaatgtttatgttaataggtttcaattgctttcggattctgatgatttggatgttgatgttggtgctgccaacaaagctaaccttgacagtaatttagaaaaaaataagaaaacattgcttgatgaggatctatggaaggatttttcgccagtgaagaatgtttctgtcccaactccggccttcaatggatgtgtgaagagtactttcgttctgcctattgcaaggaagtggg

SEQ ID NO: 48165 - DNA, 319 bp, Glycine max
  Clone ID: PAT_MRT3847_14499C.1
ggaaaaaaccccaaaaaccaaaagggttaaagccccgctttttttaaaggggaaaaatagttggaaccccctccaaaaaaaattaggcgattaaaaccccattaaaaaagcctaaaggaaaaaagggttttaaaaccgggtttggggggaaagcagccccctttagcccactttccaaaatttggggcccacccccttttcccccaagggggggcccccttcctgatccctgggggcaccaactcccccaacgggggggccacacccccctggggccatgcgggaaaaaaatggggggcaaaagcctcccaaatcccta

SEQ ID NO: 48166 - DNA, 1070 bp, Glycine max
  Clone ID: PAT_MRT3847_1449C.1
cccacgcgtccgatacattatacatctctgacaatgcttcaaagccgatgattttgtatgttcattcttatgtacaaaaggaaagaattgatcaagaatccaacaaacacctgagtctaatgtgcttttaatgacgcgatgttgggcttctcatgactcccaaggtctccaggtatgacaccttcttgttggtcactatggttggaagtttttgttgctttggatcatcatcgtctttgcataagtcatccgaaattgcataggggtccttcttcatgtctgcttcaccttgatcagagccccaacccataaaatctgataatgtcattgaaccagcttctgcactagccttgtctatctcttctctaaaaggccttgaaactgagcttctccttctccctgatagattttgagattgaatttgataatcagcttggagtacatcatctattcttgaaagtactgtaaaagccaaactttccaatactcttgaatagctttctagaacagcttgccccacatcctgccaacccaacaaatcctttatcatgttaattcatgcaacacaaatgaaaagaaatccattaatgatgttatgtctagatattaagaccggaactagagtatgcaaatagtgaacaacaaaactcaagcttcacacaggacagactcttaccctgttgtattggattttgcttatatccaatgcagattgaggaaggccagggaaacgatgctttaagagaagtaatatggtttctgctctctcttcaaagagctctcttttttccaaactcactgcagaaccccaagcagatttggaatctttttggtgcatctttcgcttccaaatcactattgatgcttcaattctattcttgagatctaggattttatgttctgatgataagtccatggttgataggaactggtcaggatcaaaaaattcaactgttatactcctgtagttcgagtcccctagacttgctcttccattctgtaaatgaagaaaaggaaaaaaaaaaaaaaaaaaacccattttatgtaaaaagatgtcacaatgttgattc

SEQ ID NO: 48167 - DNA, 229 bp, Glycine max
  Clone ID: PAT_MRT3847_144C.1
aaactagtattcctaatatgcccattatttgcgggatatattttaccaaaggccccatgggccggtgcctttaaagggttccacctaaaccagcctttggcccgaccccttaccaccattggatttggtttacctaaccctacttcctcaattcatggctcccaaaagggctgaattgggttaacctggaaccctaaaaacaaactcctttgtttccttaacctttcct

SEQ ID NO: 48168 - DNA, 153 bp, Glycine max
  Clone ID: PAT_MRT3847_14500C.1
tagccttgccaggctaccaaattcctgaaataaaaagaatgcccattgaggaactttgtttgcaggtcaaactgcttgattcaaactgcagaatagcagactttctgaagaaaaccttggaccctccaatcccagaaactgtaagaaatgcta

SEQ ID NO: 48169 - DNA, 183 bp, Glycine max
  Clone ID: PAT_MRT3847_14501C.1
tggttccggatctatttaattatttttaaggtccaaacaagaaatatgaacatggaaggttttatggaaaaaagccactgttatgagtcttcaaaatgatgatctgtctcatcaaagatctcctcctacacagaaatattgacacatcagtacatcgttctacacgtaaataagcttaaattt

SEQ ID NO: 48170 - DNA, 362 bp, Glycine max
  Clone ID: PAT_MRT3847_14502C.1
gagttgaaattgttgcatcacctatttcaatggagactcaacaaataaaagtaaaatgaaagcaaaagcaagaatcttgatccttggcaaaattacttttgcttcaaaagtcactttgtaccggattgtcaaacatgctctcagttagcggcatctatttattccttgcctatgccttctgcttttaatttcctcacaacttctctgcttccctttctccctctctatcgaggaaacatggtatttttgggtgttctcttggtggggtttctcttaagtgcttatggggacagtgatggttggatggatgctcatgctaccttctatggagggggcgatgcctctggcacaatgggtggagc

SEQ ID NO: 48171 - DNA, 421 bp, Glycine max
  Clone ID: PAT_MRT3847_14503C.1
ggtgtcaggttctggaatctgcgcaaagcgagtggtggtggacgctcgccaccacatgttgggtctactagcttccatcgtgactaaagatcttctaaatgtgcagaaggttgacatgaaacacttcaaataaattagcatctacggcggtcttatgaagcaaaagataaaatacatgttaagtattaagtgaaagcatatacatatgaatccgtacaatgagcctatacagttacaaacgcaaaacaatatcatttatgacaacatacgtggaataataccacactaaacaaaacataggggaactaaatttactaataaaaatgttaaagaaggaataccgtctccatattacataaacagaaaaaatggtgttactgatactctaagtgtattgaaattaaatagatgatacaaatac

SEQ ID NO: 48172 - DNA, 328 bp, Glycine max
  Clone ID: PAT_MRT3847_14504C.1
tggtggagccatctatgttgcccctggttacaccaagggtgatggtcttggtgctgagattgttggcactttcatccttgtttacactgttttatcaggcaccgatgccaaacgtagctccagatacttacacgtccccattttggcacccttgccaattgggttcggtgtgttcttggttcactaggcaacctatgctatcgccggaactggtatcaaccctgctcttattcttgatgatgctatcatgttcaacaacgaccttggttgggatgaacactggattttatgagtgggaccattcatctgtgcagctcgtgcagctctt

SEQ ID NO: 48173 - DNA, 1579 bp, Glycine max
  Clone ID: PAT_MRT3847_14505C.1
ggccggaaatcccgggtcgaccccgcgtgtctcaataataatcagatctgacctcattcatagaacacaaaccacattcgcccccaaaatcaaccaaccggatcggttacatgtttcgcgagcgcgtgccgttcctcctcgtgggcgtggccatcgccaccgtcttcttccagctcctcccatctccatccactgtggcggctcctcacgagtcgttccttgagaccgactcggctctgccgactcggcgggtgctgttggaagggtcgacggcgattcaggagaagaggggaagggtccctctcgggattaaaggcaagaagcagaagagggtcctggtgaccggtggagccggtttcgttggaagccacctggtggaccgtctgattgaaagaggcgacagcgtgatcgtggttgataatttcttcacgggaaggaaagagaacgttcttcaccacatggggaacccaaacttcgaactcatccgccacgacgtcgttgaacccatccttctggaggttgaccagatctaccacttggcttgccccgcttcccctgtccattacaagttcaatcccgtcaagaccatcaagacaaatgtggtgggcacgctcaacatgttgggtttggcaaagagggtaggtgcccgttttctgattagtagcaccagtgaagtttacggtgatccacttcagcaccctcaggctgagacctactggggaaacgttaatcccatcggtgtaaggagctgttatgacgagggaaagcgcactgcggagactttggcagtggactatcacagaggtgctggcattgatgtgaaggattgctcgaatcttcaacacttatggaccgagaatgtgccttgatgatggccgtgtggtcagtaacttcgttgctcaggcgttgaggaaggagccattgactgtttatggcgatggaaaacagacaagaagctttcaatatgtatcagacctggtagaaggcttaatgcggctgatggaaggtgagcatgtcggtcctttcaatcttggtaaccccggtgaattccccatgcttgaactggctcaggtggtacaagagactattgacccaaatgcgaagatagagtttagacctaacacagaagatgacccacataagaggaagccggacatctccaaagcgaaggagcttcttggttggcaaccctctgtgtccctccgtgagggacttcctctaatggtctctgatttccggcaaagattgttcggtgactcaaaattcactggcggcaaaggtgcatctgcatcagcatagataattaaaagttaattatgtgaggtagaaaagagaattaaaagttagcaaaaaataaacatatacataacaaaatttggcttgagtagctcattttgaattacattagatatctatgcattagtcattcaatgagaatatatatgtggcttggagttcaaagccctgtaagagaatatatatgctttagtttagtgtgtattcgtataactttaatacaaggagttgactctcgtaaactcttataaatatatatgagcttaatcttaagatattccct

SEQ ID NO: 48174 - DNA, 910 bp, Glycine max
  Clone ID: PAT_MRT3847_14506C.1
ttaagcgaggctttcggctgcgtgacggcgccagaacgcgtccgtacggctgcgaggaggagacgagacactgaggtcagaagaagaagcaggcgagttgagagagaatgggaaggaagaaggggtatgttgagttcgaggagtcgccgccggacgatttcgatccggcgcatccgtacaaggacccggtggcgatgctggagatgagggagcacatcgtgagggagaagtggatccaaatcgagaaggccaagatcattagggagaagctccgctggtgctaccgcatcgaaggcgtcaaccacctccagaagtgccgccacctcgtcaaccagtatctcgagtccacccgcggcatcggttggggcaaggacggtcgccacccttctctccacgctcccaaggttgaccctgttgaatctgattgactgtcctgtggataaaaaaataaaaaaaaagggaagaccgtttatccaactgatcatattgctaaatcggaaactgggttggaggagtgcttattttgcagttattgtgttcatgttctttttatttagttgaactttctgcaaactacaactgtattttgacttagcctcggctatttttccttggcttattagtcttatttttgcttgttaccatttaaatgtaaacaagtatggaaatgctatgagtacatcacaatcagattatgaaataagttttttaaaggaaaggctatgaacaaagtacatcacaatcagattatgaaataagtttattcgttccctgttgattgtaatgttatccattccgaatattcaaagtaagactctttgaaactcaaataccatacatcgatatgtaatcatgaaatttcaccagcatgttggatttgagggtgccaagcattttcttcacccgagcc

SEQ ID NO: 48175 - DNA, 171 bp, Glycine max
  Clone ID: PAT_MRT3847_14507C.1
aacgaatgattttattgaatgagaaatacgggaaaaaatgccaccatgggtacatgataagaacagaataaaaccatatacaatattaatcaaggacaataacatagcacatcgtcaaacggtttagtcaaaggaactcggactgaaggatcttagactataaccacgttc

SEQ ID NO: 48176 - DNA, 1014 bp, Glycine max
  Clone ID: PAT_MRT3847_14508C.1
ttgccccacgcgtccggttgttacattctgaagggaaagcttgcaaacttatttctttatttactctcctttctcgtcacattagccccttcttggttttaaaaatagctaaaaagcaaagggctttctctgaaaatgtttctgagggtacctgccatgaacaggagtttgaacagagagaatccagatattttgattatgatgattgcagggaaacagaaaagagatcagatcagagagagagagggggaagatgggcccagtaaagcctgcaactcaaatgagtgccattgcaccaaacactcctcccctctcctttcttgtttgttttcactcttttacctttccctcttaatttttggctttttttttcattttccattcaacttcaacactggcgcatcccccactccctttttgacttggactttaaacaaacactttctcccttttcatggttttcttcttcaacttcttgtcttaaatgtgcaaagactagataacattatttgacaaaggagggaatcttgatggggtctaagaaaatgaaactcgtgttttggggttgggatgcttgaagaagatgtttctgttcatgcaaaagtagtcaacacaactttggtgttgctcttttatttggcatggtgtaagcaaggttggaatgccttggcttcttttccttgttggtttttcttataacaaatagccttgttgttcttttacattcctgtaggttcacaatggagaagatatcttggtaaggagttgttaaatattaagaagatatctggtttgacatgaaaagtctcgtgtgatggactactcttttgcagatttagtcaaggtctattttctactactgtgggatcataccgttcctgaagtaaagtttttctggaagaccactgcaaaatcaagagcctcttgttacatttactaattactgcttatgttgatggagagtgatatgtacaccgctgcactgggcatttctggccgagatgctagagtaat

SEQ ID NO: 48177 - DNA, 433 bp, Glycine max
  Clone ID: PAT_MRT3847_14509C.1
tcaaccggctaaaaagccatctgtaggaggcaaatgaggagtccaagatcttcaacaccgtccgaataatttttcagcggaacctggttaaggcctccgaaagcaacgaggccttgggccgggaggtgaccgcactcaaaaccaagctcagagggccccccccacaggaagcttcccagggttgctccacgcaaggaagcgagacctctttctatccttctagaaggtctggaggacgtaaagttattgataatgctaatggatctgaggacgaaacggacactcgagacgcggacttgagtggaacctttgccagcgaataaacaactttctacagttttgcaccacggtaagaaaaccacctgccgaaacgtacgaactatgaaaacccgacatctacccataacaaagcaaaacccagcagactgtactt

SEQ ID NO: 48178 - DNA, 440 bp, Glycine max
  Clone ID: PAT_MRT3847_1450C.1
agtcggcggccgccctttttttttttttttttttttcttttttttttttttttttttttttatacgaaacgccgacaattgaaaattggaggaaaataatcaaattttttttttgaccaatgataacattatccacttaacaaattattgtatttcccaggaccttctaaacactattttacacgtttttaatgggccctccattttttggtctaactaaaaacataaacaaacagctgttttaccaaagggggtggattaaaagccgcccttctatggttgctgggttcacagaagtttaaactttacaagcatgctttaagaccttaaaaaacaaatcatctgcatattattgtaacgggccagtttattgccccaaagtgcgagtgtcctcctgattgccaaaatctgggagctcaaaactatgggaaaactttgtc

SEQ ID NO: 48179 - DNA, 465 bp, Glycine max
  Clone ID: PAT_MRT3847_14510C.1
ttctgagatgacagctgctactggggagcggagcaagcattatttatggacaaagagtgccagtccagagtgtgtaaacctgcaaggaagcagggaatgtctatatcgcgctgatgcaagcataactgtctaggagcacaatgcaaaaataccaatgactctctgatgctaaggagtatcgactaggaatattgaaggaaggatggagaggaacaaacatggaaggcttgtctgttgctaaacggctattgattgccacaacatgctacccatctgacttagagagaatgcatgcgcatacaattgagaggttttggtcctagcacaaaccaggatcttgtgtgcctttccaattcattctgctggctgttacatttcccgtgatacatgtaaaatggtcaaagaaatactctcataggagttacattgaagagcgttcacacgtatgatcttcggagacatgag

SEQ ID NO: 48180 - DNA, 1567 bp, Glycine max
  Clone ID: PAT_MRT3847_14511C.1
gtctcgtagtactgctgaaatgcctcttatagaaatgggtttcagcagagcatacattgaagtactggtagcaaacaataaagataaaaaggttttgcatgtacagagtatttcctcttgggcacctagatgcattgggccatacagccaggcaaccttgcatgagggtatacttcacatggctggtcaattggggcttgatcctcctacaatgaatctttgcaagggaggccctggtgttgaactggaacaagcactaaaaaacagtgaagcggtggcaaaatgctttaattgttcaataacgacatctgcaattgcttttgttatttactgttctaaacatatttcattattggagagacttgatattcaggagaagcaagaaacaatccttagacagatgaagatctcccatttacaggaaagaaccacttacaaagcattagatcccttgttcctttatgttcttgttcctgatctacctaaaagagcatatgtagaagtaaagcctattctttatgtcgaggatgacacggatgtagcatttgaggtcgtaacagaaagattttgtttggagacaccaccaagttattggggtttcaagccggaaaattggcatgattcttgcactcagaaatgtgtgatttctggaaagatatgtgccattatactgtctattactagtgagctggctgcgaagatatgttttgattctctgcctgctgaatatgtgaataatggtcagcattctcttccaaaggcacatatggagaagatatcaaagttctgcatttaccttcttgacaaagttatgacagacgatgactttgcttgggaagatataatgagtttgaggttctacatccctgtaagccttcaaatgtcagtgcagctattacaacctatgttctgcaatgctctttttgaactttcggaaatgagtcagaagaaattaaaaactggtgaggagccaatcttcaacatagttcctgtcataggttctgggaggtctgcttcatccatggacgatgtagtaacctgtgaattaatggctcagaaatcctgagtaaatatatgctttctgaaaacactctttaattggctggggttcaaggggtggttcagttgctgtgcactttaccagttgatctacaatttttatttttaaatacaaaatggattcccttttttggaagccaaaacaacgacggtttcactgacagcttggtgaagacgacggaatgggggatttcactcatttaagttgttaatggcttggtgtataaaaaacaaagagttgggaaattatgttgatcattcgctagatttcataaattttggagcctcccttttaattctaagaattacatattgtactctgcatttagctgtatggaaggtggttttatgatggaaattttatcaaactttagggatgtcaatataacttaaacaaagtgtaatcttggtggttgctttaacccgagttgttagcaattgctttcttatttcactgtttatttgttaatcttataatgggtaatgatacttaatatttatccaaaaa

SEQ ID NO: 48181 - DNA, 616 bp, Glycine max
  unsure (1)..(616): unsure at all n locations
  Clone ID: PAT_MRT3847_14512C.1
actgagcatgcgtctagctatctcgatcgaactgtccaaggtcctgtcaccgaatctacggctaggccatgcgaactgtccaaggtcctgtcagttaaggttaagtttaattcaataaatgacaaaggacccggtagagtttagggttgtacagggtagtgtacagggtctaggccgggctcggctcgccggccggggctccgagtcaacaacaacagccccaaataccggcgcttcgcaaagtacgcagtgatcttgggttttgggttactaaaccaggagtttccggtgtgccaaccatggctttatcaacaggtattataaccgtgttcacaagcccagtancgttatgtgggcgtgtccgttttgtcgtcgtattgatgtcgagcggtaaaatgattgccaaaaccacaacgtgcctgtataccgatgcacgtgtgcgtaacactgcaggccagaattggtgacgggcggcttggcagtggcgggacttatttaagaagcgcatatgcggcaaatggctgtgattcgggccggggcagagcgtgcacgggcacgtgggggtaatgggcatacgcgggaggcagccgagatggtaggaagttagaggatggga

SEQ ID NO: 48182 - DNA, 193 bp, Glycine max
  Clone ID: PAT_MRT3847_14513C.1
gacctttatctcgtgatcgtatcgctcaactttcaacgccagttcacactctctgctacgcgtgtaccaacaagtgcatgttcgaatcaaaggacagcgctgagctcacagcagtagcgtgatcaatctatacggcgtcctttgaagggctttgacctttcgctggtcaggttgctaccacgggcatgaatag

SEQ ID NO: 48183 - DNA, 435 bp, Glycine max
  Clone ID: PAT_MRT3847_14514C.1
gaaaaacaggcgcgacgccacacgcgtctaccgacgcgaaaaaacgacttaaaggaatttattcaagaagactaccaaaggggacaccggtgggcataaacaaagaaaaaaaaaacccttatccaacacaaccatcattgccacctctgctattaatcaaacaacattcactggtcaaactgctctgaagcaaatcaatgagttcgtccacaagacccgtggcgcccgcaaaagtcgcactaacatgcgccgcaccgtcaagaatgctcctcaaagcattttgtatggccctgaccgtcccaagtacttgggtccattcttggagcacattccatcatacctgaccggagaattccctggtgactacggatgggacactgcttgaatataaaatgacccggaaacctttgtcaagaaccgggaactggaagtgat

SEQ ID NO: 48184 - DNA, 139 bp, Glycine max
  unsure (1)..(139): unsure at all n locations
  Clone ID: PAT_MRT3847_14515C.1
aaaaganggaaaggccgagcacccccagcaggccaccaggnaccgagaatccgccgccaccgcacccacgtttgcagttcatacgaacgctaccacggaacggcaacgggaaccaccatgcgacaaaaacccaagagac

SEQ ID NO: 48185 - DNA, 552 bp, Glycine max
  Clone ID: PAT_MRT3847_14516C.1
tcgatctgtcgcgatctatcggtaggaatgtaccagggtcctgtcacctccgcgcggtcaaggtgcagtctggggatctcacaaacccccattatttgtgaacttgaacgaggttgtaagcattcagactcgataacgattcgcacccaaaccgcaaaacaatttgagggacccacgctaagacacaattgcacagttcagctcaataagtacgtcaaccactggacacttgggatggcagagggacgaaactctatgtatgtgaatcctcgattggggctagcagcccgtactcacaaaagcccaatactcctggaacttaggaccgcgacctcttgggtacaccgccaagtggtgacggtggttgagggcatttcaaattcagtcagtgacttagcactaccggcaacacactgtgaataccttggccaacattcatgtatcgagcgcctaaaagatccgcagcatggcgcctgaacccggcaaaccttaattgacagtccagagactggcgggggatctcaaagtgagggtacgacactcgagcagcgt

SEQ ID NO: 48186 - DNA, 304 bp, Glycine max
  Clone ID: PAT_MRT3847_14517C.1
caatataaacccctggttgggatgtgtctgtgaacccaaaacatgctaacaggcaagtgagaattacatatatatggcgcaaacggcggtgaaatttattgtagctgaaggtatgatgaatcatgggacatcagagtgtcggatatcatactaaactcagggtggcttgcgaaggcaaaaaaattccataaggctgattgatcataagcacatgaggaaaagcaacagtcagtggggaaacatcgcacaccagattctagtgggtgggcataaatcgctagaattgtgtaccaacttaccacct

SEQ ID NO: 48187 - DNA, 150 bp, Glycine max
  Clone ID: PAT_MRT3847_14518C.1
tttttacaaatctaacaagttagcctctaattaaatcactagttcgctagaaggtttgagaattacaggcacgagaatggccgatcataactacatacttgacaacaaagagaatgacctattatacttagattgttaacaccatttcta

SEQ ID NO: 48188 - DNA, 368 bp, Glycine max
  Clone ID: PAT_MRT3847_14519C.1
gcaaaagctgaaggaaacaaggcatctggaactctggcttcagtaaatgtaaaaccagctaaagctgcaaagcccccacagaaagttgataatgcttcggttgcagcctctgagaagaaagggggtgatcgtccaccagaaaaagatagaaagaaagatgttcctcaaccacgtctgcaatacgatgataagagcagagtggagaaagccaaacggcgtgctgtggtaaaacaaactgaagctaagaacagagttgaactgttcagacatttgccccagtatgaacatgggagtcaactcccagatcttgaggcaaagtttttccagctgggtcctgtgcatcctgctgtttataaggttggtttgca

SEQ ID NO: 48189 - DNA, 685 bp, Glycine max
  Clone ID: PAT_MRT3847_1451C.1
caagcgtccgttcaaagcctgcattcaattactactgttcatctgggtcttcattcacgtgaaatagaatggccaaaaaccagggatttgccgtaggaatcgaccttggtacaacctactcgtgtgttgcagtgtggcaggggcaacaaaatagagtataaataattcacaacgaccaagggaacagaactacaccttcttttgtcgctttcactgacgatcaaaggttgattggtgatgctgctaataatcaggctgcagccaacccagaaaacactgtctttgatgccaagaggttaattggtaggaaatacagcgatcccactattcaaaatgataaaatgttatggccattcaaggtcatagctgataataatgacaaacccatgatcaccgttaaatacaagggccacgagaagctcctttcagcagaggaagtgtcatctatgatcctcatgaaaatgcgggagattgctgaggcatatttggaaacaccggtaaagagtgcttgttgttacagtgcctgcttatttcaatgattctcagcgtaaagccaccatagatgctggaaccatagctggccttaatgttatgcggataatcaatgaacccactgcagcagctattgcatatggccttgacaagagaataaactgtgttggagagcgtgacatttttatcttta

SEQ ID NO: 48190 - DNA, 241 bp, Glycine max
  Clone ID: PAT_MRT3847_14520C.1
cgttgatgtaatggatggccgttttgttccaaatattacaattgaacctcttgtgattgatacattgcaccctctaacaaatcttcctttacatatacacctaataattataaatcctaaacaaataataccatattttattaaagctaaatctaatatagtcaatattcattatgaacaatcttccaccatccatttacatcatactattaatcaactaaaaactctaataactaaagct

SEQ ID NO: 48191 - DNA, 246 bp, Glycine max
  Clone ID: PAT_MRT3847_14521C.1
ataaaaataacataactatcaattaattatacaaaagaagcatttaatcatttaagatcataaatacaacttaaacacatgctggatgaattctctcccatcataaggaaaattcgatcagagtccttcctggtagaaagtgaagtatatttgtacatgttccacaaacactaagcaacccagggctcaatggtcttccaccagcttacatagcatacacaatttctccactgctatctaagtcaa

SEQ ID NO: 48192 - DNA, 303 bp, Glycine max
  Clone ID: PAT_MRT3847_14522C.1
aagaacactgataattggttcgtttgacatgaatgagtatttgaaaaagttacagaaaaagtagactaaattttaagcaatgatcaaaaggaaatattctggcaccagttagacaaatagaaatattagtagatacattagtgcttacacagttcctgcaactcgagtactaacatgggtgacattatcaggaaaaagttttgccagaccaaaatccccaattttcggattgaagttcccatccaacaatatggtgctggccttgatatccctgtgaacaatgtttgggtgggcctcatcatg

SEQ ID NO: 48193 - DNA, 277 bp, Glycine max
  Clone ID: PAT_MRT3847_14523C.1
ccgggcctgccagctcccctgagtgatgagcacttccaagcacccctctgccctttctctgtccttatgctgtcccggcctcgccagccctctggggcattgtgggcgctgcctgccaggaatgagcaagctctgttgctcgggagcctcttgtcaccttcttggacttattccccacctgataccttatagagaaaagtgtgaattcaggtggagagtaggcccaggccccatgaggcaccagtggaagcacagctccaagttcagacaggtgccc

SEQ ID NO: 48194 - DNA, 490 bp, Glycine max
  Clone ID: PAT_MRT3847_14524C.1
ggctcgagtcaagtggcgagcaccgcacacgggctctccacgcgacagaacacgacgacctctgagcgaccgccgttgatgtggacaccctaaccgcaagtcactacgatcatgtagctcgcagaggtcgccttcatcatctgagcagcaggaccaggatgccatgcttgatctgaaggcgaagctggatcggctcgacaaggacgagaaccacgtgcttgccccgcggatgcggcgacgtcaaggtggtgaccgtcgagatgacggggctgctgctcctgacaccggtccctcacagggagaacgtagctgtgcagatgctgtcgacacggcagtgcacggagactgtggcgctgtacatacggaacccgatggcgacgtccagcgtgctatactgccacggcagcacagctgatctaggccagatgtacgagctcttcatccagctcaacatgcacctccgtgatgacctcatggcgtatgactattc

SEQ ID NO: 48195 - DNA, 1065 bp, Glycine max
  Clone ID: PAT_MRT3847_14525C.1
gttgctgtgaagcaacttgagggcattgagcaaggtgagaagcagtttaggatggaagttgccaccataagtagcacacatcatctgaatttggtgaggcttattggcttttgctcagaagggcgccaccggcttctggtttatgagttcatgaaaaatgggtctcttgatgattttctattcctgacagaactgcattccggaaattttttgaactgggagtatcgattcaacattgccctgggcactgcaagaggcatcacatacctacatgaggagtgccgtgactgcatagtccattgtgacataaaacctgaaaacatactcctggatgagaattatgttgctaaagtctcagattttggtcttgcaaagctcattaatcctaaggaccaccggcatcggaccttgacaagtgtgagaggaacccgaggatatttagctcccgagtggcttgcaaatcttcccataacttccaaatctgatgtttacggctatggcatggttttgttggagattgtgagtgggaggaggaattttgatgtgtctgaggaaccaaataggaagaagttctccatttgggcttatgaagagtttgagaaaggtaacataagtggaattttggacaaaaggctagctaaccaacaagttgatatggagcaagtaagaagagcaattcaggcaagcttttggtgcatccaagagcagccatctcacagaccaacaatgagcagagtgctacaaatgcttgaaggggtaacagagcctgaaaagccacctgccccaaaatcagtgatggagggagctgttagtggaaccagcacatacctgagtagcaatgccagtgcattctcagtcggagtttcaccccctggtccctcttcttcatcatcatttcagactagtgctgtttcaaccttcacctcaggaaggaaccttgagaagacaacctcatcccttttacaatcagacacatgacagaaattgcttccttttttcctttttcatactttcaattagaatcggttcaaagtcacattcacttgggacttggtgctggaacag

SEQ ID NO: 48196 - DNA, 1221 bp, Glycine max
  unsure (1)..(1221): unsure at all n locations
  Clone ID: PAT_MRT3847_14526C.1
acaaagagtttttccgaataatgtcttatatgcaaccgaatcaacaagttcaagaatacaacgactctacacgataagattcttactttatgataacaggttaagaaaccacatgttctaaaaaaggaatcaaatcgtatgttgctcaccattttatttctgtttcttattaaataataatatctggataaaagaaaatcctgagaaatataaaagcatcatgtgtatggagaagcacggccatgatgaggaggagcaacccaaacctgtggttctaatcacaggatgttccacgggagggataggccacgcgcttgcacgatccttcgcagcgaacaggtgcagggtggtggccaccagcaggtcgcggtggagcatggcggatctggaacacgaccacaggttcttcttgcaagaattggatgttcagtccgatgagagcgtgcgtaaggtggtcgatgctgttgtcaacaagttcggtcgcatcgacgtgcttgttaacaacgctggtgttcagtgtgtgggcccccttgccgaggttcctctctctgccattcaaaacactttcgataccaatgtcttcggttcgttgagaatgattcaggccgttgttcctcatatggctgttaggaaacaggggaagatagtcaacgttggtagcgttgctgccttggcctctggaccttggtcaggcacttacaatgcttccaaagctgctcttcatgctttcactgatacattaagattggaacttggacactttggaatcgacgttgtgaatgtagttcctggagccatcacttccaatattgcaaataatgcccttgccaattacaatcgaatgcctgaatggaagttattcaagccttttgaagcagcaatccgagacagagcttctttgtctcaggggtccaagtcgaccccttcggaggagtttgctaaaaacacagtagcagctgttcttaagaagaatccacctgcatggttctcctatggccattactctaccttcatggctatcatgtatcatttaccactctttcttagagacttttttttgaagaaattgatgaaatgctgagctacggtttcgtgtatccatcttttcccatgtataatgtatgttgatggacactgattaatctactttaagcacgagatttcattggagggtgtattgttaagacttcaaatgttatatattcagttccattntaccat

SEQ ID NO: 48197 - DNA, 160 bp, Glycine max
  Clone ID: PAT_MRT3847_14527C.1
tgtggaggttactttgatatcggcgggatatttatacagaagaatttggatataattattcaatttcaaactgctatttgatataattgtcaagaaggagctgctaccaattctacttaacatggggtgttatatagagctataagcataaaagaactat

SEQ ID NO: 48198 - DNA, 131 bp, Glycine max
  Clone ID: PAT_MRT3847_14528C.1
aatgtttacaaatcgtctctgctgcagcggttaaggatgccatcacatctggaatgtctatacttgcaccatgacatgacgtcaactaacataagttgctttaaattatccacaataactgatcttacatt

SEQ ID NO: 48199 - DNA, 806 bp, Glycine max
  unsure (1)..(806): unsure at all n locations
  Clone ID: PAT_MRT3847_14529C.1
tcgtacggctgcgagaagacgacagaagggggaggagctgttgccgttgttggacattctggcgaacaaggtgaaggcggtacggcggctccgggagcttctcacgacgaagttcccgccggggagttttccagtgaaggtggcgatcccggtggtccccacggtaagggtggtggtcacgtttaccaagttcgtggagctgcaacctgtggagaagttctacacgccgttatcgagtccaacgcatttgctcaatgcagagatgatgatgatcctcagaaactaagaaggcagggttcatcatcttttgggagatccacgtggctgagaagaagtactagtagtagtagtaaccaccaccaacaacgttgttcttctttggggctttggattctgatccttttgctattcctgttggatatacgtggaccaatagtgggaatgattcgtcacggaaaatgaagaagtccaggtccgtgagaaaatccaagtgaaaacgaacgacacaacaagtatgcatcagtgggaaagattttaagctgaaggaattccactagatatgaacgattgtagcaaatagcaatgtgccaaaagctgcatccattattgtgtatatatccccgtatttttttttttaatcaactgggggctttgagacaacggtgttcatagagaggtttcgcagtaagtagtttttagaatatagaactgcattacttgttgtggtttaatcacagttttgttttgtcttttttcagttatatagaaatttgttgtggtttaatttttcttcccaaaaaaannan

SEQ ID NO: 48200 - DNA, 491 bp, Glycine max
  Clone ID: PAT_MRT3847_1452C.1
ggctcgagcatgcaggtaccagtatgggaaacgtggatgccccagtagatgagactatatccgatgttgagaaagaaatagacgacctgcttcctgttgaggtaaaggaacagcgtctcagtaactcgcttcaatcaacaatggtgtgaggatgccttgcggccatgcctatgactactaagatcctaaccttatctctctggggccactatgcctctatggccattgtaagcttgccacgataccagcttcgggaaacaatcctattactcttcactgtgccacagcatgagatacatggtgctcgatgattaccatgctactttcgtagaaacagttacttataagacaatagcttcattcaccattgtccaaagcatttatcttcatatacgagatggctcacatgggttcctaatgacagggtcatgtctcctatgacgatcatgctcttagtttcggatagacacaactctcgtcccaagtttttc

SEQ ID NO: 48201 - DNA, 267 bp, Glycine max
  Clone ID: PAT_MRT3847_14530C.1
ataaaaaactcaataaatggaatgggaacacatggcaacgaatgcccctaaatgttcgcagccttaaacaaacatgatagcatgtttaaagccgtgtgatcaaatgcatttgcggctctcgggcccgctcttattatcaagaagaggcaaactttccatatgctacttacttagatgttacctaagccctccctggctataacataacatattcttttcaaggctattaaacgacgttactttaaatacaagatgtggatgaatcag

SEQ ID NO: 48202 - DNA, 500 bp, Glycine max
  Clone ID: PAT_MRT3847_14531C.1
tacggctgcgagaagacgacagaagggggaggagctgttgccgttgttggacattctggcgaacaaggtgaaggcggtacggcggctccgggagcttctcacgacgaagttcccgccggggagttttccagtgaaggtggcgatcccggtggtccccacggtaagggtggtggtcacgtttaccaagttcgtggaactgcaacctgtggagaagttctacacgccgttatcgagtcctacgcatttgctcaatgcagatgatgatgatccttctgggagatccacgtgtctgagaagaactagtactagccattcgtggggtgggggagtaagcaccaacaacgatcttcttcttcttctggggctttggattcggacccttttgctattcctgttggatatacgtggaccaataatggggatgattcgtcacggaaattgaacaagtccaagtccgtcagaaaatccaagtgaaaacgaaccacacagcaacatcaagt

SEQ ID NO: 48203 - DNA, 495 bp, Glycine max
  unsure (1)..(495): unsure at all n locations
  Clone ID: PAT_MRT3847_14532C.1
cgacccagcgttcgtgttttggtgtgttgataaattccgtgcttgatatcgaggatgatcctgcgtggcacggtgcagaggatgaggaagaggacgcgggcgagacgagtaactatggctttgggcaggagtgcttggataggctctcgatttcactcggctttttcaccattgtgccggttgcctctgagctggtgcccacctacttgtctgctcctgagtgggagaagcaccatgctgccctcattgcgcttgcccccccgcagagggttgttcgaaggttatgataaagaatctggagcaggtgttgtcaatgattttaaattcatttgacgatcctcaccctcgagtgcaatgggcagctttgaatgcaattgggcagttgtccacggttttggggccngacttgctggtgtaatttcaccacttagtgctgccggctttggctggngctttgggtgattttcagaatcccagagtgcaggcttatgctgc

SEQ ID NO: 48204 - DNA, 205 bp, Glycine max
  Clone ID: PAT_MRT3847_14533C.1
cgttcactttcgaacaccagcttaaacatccaggggctcgtttcaatgcatatagtttgcacttatagattctgaagcaatatcttcaaaaggcctcttcttaaagaccgctaatttgtaggttctaatctgatcaacgtgataatggctaaaaattcctcctacttccctacaagtggatcctcagcgatgagtctgttctgat

SEQ ID NO: 48205 - DNA, 262 bp, Glycine max
  Clone ID: PAT_MRT3847_14534C.1
gttcaatatcctagtataccttaattaataatttaagatactatgatgggagcacgggtcccattactgttgctaggacatgttttcctggcttcagtttctggctcatttggcattagcttactgggaaaaagatgaccccatacacgacaagtgtctccagagttgcaatagcgagagatatcgtacaggaaccacgcatgccacgctcgttgtcacctccttaaggtggcgaaagaagaatgtgaaaaaggtgaaattc

SEQ ID NO: 48206 - DNA, 277 bp, Glycine max
  unsure (1)..(277): unsure at all n locations
  Clone ID: PAT_MRT3847_14535C.1
agggtggtgtttgnctttttctgttgtcttttcttttctctctttccttcttttttttcctttcagacagacgggaaccccatcctcttgcccgggcccgccgcccctcacaatgccttatgctccgttcccggggggaaacttccccgctaaggcaaccgcaaattccctccacaacggcctccaaggnccccaaactacccccccccccccggggagaccccttttccctccttttaaaaacaaaccccccttttccctacggccggggccatct

SEQ ID NO: 48207 - DNA, 268 bp, Glycine max
  Clone ID: PAT_MRT3847_14536C.1
gttcggccgaaacccgcaacaatggccgcagcaacgttaacgtatcagaacgtcgtcgtttacaacgccgatcaagatgccaactccaactcctccgccaccgccaccaaaaaatcccgggagagcgaccgaagacggtgacgaagcgaaggagaataccgatccgcagcaggttgttgagcaagttgaaattgaatatgtaccagagagtgcagagctagatgaagaattcagaaaaatctttgagaaatttagttttggctaggtt

SEQ ID NO: 48208 - DNA, 425 bp, Glycine max
  Clone ID: PAT_MRT3847_14537C.1
ggaagtcataagaatatgcgaccaaaatacggacgcatataacagagccttatactaataattaagttccaaacatccagactctagaaaaagcgaaatgtaaccctaaacctgagccttctggtaaacatagggaaaaccacacttgccgcagtattggcgatcgaagcggttggccatgaaagtccaggggccgtactagaagttggggcattatttggggagcctcaggaccttgccggaatcgggaaacttgataaactggaggagggccagcttgactatcttgagcttgtgctggaacatattgggctgggagtacggcttctgcttgctcttttaagagaccatcggataggcggatgacaatgtgacactgcctctccttctaaaaggggcctcttgggagggcgcaggggtactgc

SEQ ID NO: 48209 - DNA, 459 bp, Glycine max
  Clone ID: PAT_MRT3847_14538C.1
gagaaatgaaacacatgagggaaatgccacaagagcatttcagtttcaagatgtgttctcactggaaaatgaagattctgatgatgtgacaactttgattgacaaaaaggacaatgtctttgtgatgtcaaacaagaaatccaaatatcctgtgcttcaagtggatttgaggctaatatcggatttggtggttgtcatagtttctgcagccattggtggaattgtcttttcctgtttggggcaaccggttattgtgggctatcttcttgcaggctcccttattggaccaggcggtttgaagttcataagtgaaatggtgcaggttgaaactgttgcacaatttggtgtagtgtttcttctctttgctttggggctggaattttcccttgcaaagttaaaaactgggggaccttgtgcttgtcttggagggctacttcaaattatcatttctatggtcat

SEQ ID NO: 48210 - DNA, 478 bp, Glycine max
  Clone ID: PAT_MRT3847_14539C.1
acggctgcgagaagacgacagaagggaatcaggcacatgtcgaccacactccacacaagctaaggtaggattttgtgctacgtgtcagtgtcgtgtgtcagttgataatggcagtgaccgagccattaaccactagattcaattcaagtatccactacggagagctacctagtgtggtcatcacaaatgaataatactttctcaacattagatgctcactctacagctatagccagccacaaattgataatatgcattgatgccaacatataagtatatgtaaaaaccaccccttattagtattattattaccttcccttcctctatgactctatgtacaattagaatttgtgcacgatgtgatgtctggaatatttcaaacctaactagtgcccatattcaacggtcctaatgatgcaagttaacaccatcatcatcattttcagatggtatgctgaaaattttaccatatatattt

SEQ ID NO: 48211 - DNA, 500 bp, Glycine max
  Clone ID: PAT_MRT3847_1453C.1
tgacgagagcggagcacactaagattcattcattcattcatttgatcaaagcaaacgagacgagctttcttcttgcgatcaaaaacacagatgggcaaccacacagttaacacaaactagatagttccacacaaaactaacgatgataacgatcggatgatgatgatggtagctcgattagatagatagataacttggccatgagggccccaccgctcagttcctccagttcccgtcggagttgccgccgccgcggctgccgtagccgccgccgtagccgccgccgtagccgccgccaccacggccgccaccgtagccaccgccaccgccgtagccgccttcacggcgctggccgtagccaccgccgccgccaccaccaccgtagccgccgccaccgtagcctccgcctccgccgcgctggccgtagccaccgccgcctccgccttcggagcggcgcgactgggcctcgttgacggtgatgttgcggccgtcgagctcct

SEQ ID NO: 48212 - DNA, 1721 bp, Glycine max
  Clone ID: PAT_MRT3847_14540C.1
gtaaaaccaatcacaaagtttccatgggaatcacgaaccactcccccagcactaacctttaaggagttgcaattcacagccggatcatagttcaacttaaacaaaccttcaggaggcggactccacctaattccatttggataagacgtgatctcttccatgagacgaagaataaccatcaaggctccatcgctctatccaaactattcattaagaaatgaacctgctatactacaccattggctgctaaccaatttttattaaaaacaaaattgttacattgcacccctaacttatcaagcataaccgtaaaatgtcttgaccaactatccacatcctcatgttgactcttcttcagattctcttctaaccaaatcagaggacaatctggcaagaaaaaaacaggatctacatgatctataatgttatgccaacctccttttgcttaatttgggcaattggctttgttcttactcattgttgtttatattttgcgttagattattctcagagttttgtgttttgttaatttgaaagggagttggtcaatatgcacatatcctatcagttgtatgcattcttatcctgcattagaatatccatatcctaaattcttctaaaatttgcgtatggctctgtttgtttaaagctttgtttagcaatggagcataagcttcaagtctttatttatgcttttaaccaacttttgtgttctatttctttgcctttaagaaaaatttgggtgtcatttcctataatccttacgtggggaatacaaccaattgactgtcattaattggaagtaaaaaaaaactgtggattactgaatttgctttggttgttttcatattttaacaagtagctcatgtcaatgcttgcaattttttctttcgccagggctttgttaaaattgacacggatgagcttagcctacttctgcagggatgatttatcactaatgcggggcagatctgctaacggacatgccaccctggaaactataaagttactgcctttggaagcccctaatgtgtatagggagtgaattccattatgttgctctgttttctcacgtcttgtcactagttttaaaaactaggatgaactggaagaaagggaatcaccaattcataaagtttttgatgcatgaagatgtgattggagggggtggtttgatctctgaagagttttgccaagtttagtgagaaacagatgtcaaacttccacaacagaaatttgagcacctttgcagttcagccttcatttctggcaagtcattttggatctagatgggataggaatgctctatcagatctaaatggcggtcaagtacattcttggggtgaaactccatgacaaagagccagactcagtttcagttgccccatagctggaagcttaaggaatctatggcaaatgtgacattcctctgcttctagttcaaatgaatcttatatgcacctttggtagaatgcataaggacgtgctagtgattggtgagtgctttctgctggggagctgaaagatttacatagttgtatgctaaggatgaacgactctcaaaaaagaatcctttttttttctttttgatagctaaagttcttctatttctctcccaattaataacccttcggctgtatttgggtaggaaatttgaagtattgggatatttaattgcatcaacacaagaaaaattcagctattttgttttactataaaaa

SEQ ID NO: 48213 - DNA, 476 bp, Glycine max
  Clone ID: PAT_MRT3847_14541C.1
ctcgagccgggcatcataaacataggatagagcaacaggggtaatgttgggactattatacttcatacatgagtcgatgatattttcactagacctgcgggttattcatgcggcatggtcaatccaaagtcacattggctgttctcattccaggactaatacccatgaccttgtgtgttactcaatacacccaacaccccagttgaaaagagctatacgaacttcacccattttatatatgacttaccaatggcttatccgtacaaatcacttgttcactcctttcacaccactactttggcttgtcctttgttctctccttcgcacttcatcttctacttttacattctctgttccgcgtaggttggacttatctcctctgttctgacctccggcttctgcttaatgttggaggctggttcctttcccgatgcaactttttcttgttgggttgatcttctttcaaatttacgggg

SEQ ID NO: 48214 - DNA, 568 bp, Glycine max
  Clone ID: PAT_MRT3847_14542C.1
tacctttgatattgacttgagaacgaccacctcctccctctggtgttgaatactaatctatattcctggccccgggattgtgttatccaccttattctctccgacattgacatctcagtggacgatttttatattaaccaccgctgcacccactgtaggagctagaacggaaattgatagacaatctcgtgtgcatgctctgctaatattgatactcggtgtgaaacgacatgatcgtggcctgtacatcatggatgctagtgacccagactgctccgatggctggtgttatcagatagtgaaggaagtacgtgactatgagaagatagtaggatacaaccgtgagcagattccttatgttcctatatctagttttgatggagacaacatgatagagaggtcctcaaaccttgactggtacaacggtcctactctgctaaatgacttgaccagatctctgaagccaagaggtcatctgaacaagcccttaagcttacctcttcagatgggtacgaagactgaaggaatttgaactgtgcctgtgggacgggttgacaatggtgcgttg

SEQ ID NO: 48215 - DNA, 2021 bp, Glycine max
  Clone ID: PAT_MRT3847_14543C.1
acggcatggctcgagattccataaaattcctttaccttaacttccgtagtagttcatcctcaaaaagaagtttctccgctacaaaacctttcataacttcttttcttcctccttcttcttcgggttgtgagtgtatacgcatcacgcatggcagctttccttcgacgctggattccacgatggaagattttatcttctccaccctgacgggatagcaaatctttcatgaaattgagaattgctgctgctaataaacaagcttccattgagatgggggagttcaccgggagtggtgagtatgtgactatcggcgaatttccttcctccaggacaaatcactcaaggaaagtttcagttcttcctcttgtgtttctcatcttctatgaggtttcaggggggccttttttgtttgacgatactgtgcacgcagctggtccttttttagcggagtgttgcttaatctttgatcactgctgagatgggtaccatgttccctgaaaacagtggttatgtggtttgggtttcatctgctttgggtcccttttgggggtttcagcaaggttggatgaaatggcttagtggggtgatagacaacgcattataccccgttttatttcttgactatctgaagtcaggaatcccggctttaggtggtgggtttcctagagttgttgcaacatggggtctgactatagttctcacttacttgaactataggggtatgaccattgtgggatgggttgctgtttgtttgggggttttctcactccttccttttgtggttatgggatttttggcgattccagacctaaagccttcaagatggacagtgacaaacccgaatgatattaactggaatttgtatctgaatactctattttggaatctcaactattgggattccataagtactcttgctggagaagtggaaaatccgaagaaaactcttccgaaggctttgttttatgctgtgatcctagtagttctagggtacttctttcctcttctaattggtactggtgctgttcctgtcaaccgtgagttgtggacggatggatacttctcggatattgctttgattataggaggagcatggttgagatggtggctgcaggctgctgctgcaatgtcaaacatgggaatgtttgttgctgaaatgagcagtgacgctttccagcttctagggatggctgagaggggaatgttgcctgagttcttcagcaagaggtctcgctacggaacacctctcataggaatactcttctcagcctccggcgtgattttattgtcatggctgagctttcaagaaattgtagctgcagaaaatttcttgtactgctttggaatgattttggagttcattgcgttcattctgttgcggatcaaacaccccgacgcatcccgaccttacaagataccggggggaactgctggagcaattatcatgtgtatccctccgacaatattgattggtgtggtgttgtttttctccacccttaaagtaatggttgtaagccttattgctatggcaattggccttctgatgcagccttgtctcaaatttgttgagaagaagagatggatgaagttttcccatagttctgagctccctgattttggcaatcaggaggacactcgcactttggtgcattaatctgtcctgtttcaataatatggagatgatttgttcttctaggtcttcaagcatgcttgttaagtttatacttctctgaacccaacaaccatagaagggcagctttttatcctacacctttggtaattcaactgtttgtctatgtttttagtttgatcaatagatgggatgccaattagaaacgtggaagatagtgtttagaatgtcttgggaaatacaattatttgttaagtggattatgttatcatttgtcaagaaaaaaatttgattattttccttccatttaaaaaaaaaagcaaaaaaaaaaaaaaaaaaaaaaaaaacaaaaaaaaaaaaaaaaaaaaaaaaaaaagggcggccgccgact

SEQ ID NO: 48216 - DNA, 273 bp, Glycine max
  Clone ID: PAT_MRT3847_14544C.1
aggccaggagtgggctggagctgctgaggcccagaaggcccgcatagttcctcaccaggagggtctccctccagcacaggtcccgcctgctcagtccctgtgcttcccaagtggagggggtgtcagctcggtcaccaagagaagtgacttcccaggagcaccagtctcctcacagaggtgctgtcagcgaggcctccttcggtccaggcagaacctcaggcagtctctcctggtcctgcatgtgtgcaactccagctaataataggtatttta

SEQ ID NO: 48217 - DNA, 345 bp, Glycine max
  Clone ID: PAT_MRT3847_14545C.1
ggtaaaaaaaaacttaaaaataagtataaaataaaaatttgagcgttatatgtcaataatcatactgattattataaatagatgtatccttaatgatgaattaatatttaaatataaatagaatgaatgggtgttgtttacttttgaaactaatattttatctgttcacaccacaggggagcaaagcttatctggcaaaggtaggtccctttcttgcacgtgctgttaatcttacatgctacactctctcttcagtctttacatttcatttttaggtcagaaatttaataaaacagggagtcagccttacatgaattatatgtataacttttcattctaaccagg

SEQ ID NO: 48218 - DNA, 607 bp, Glycine max
  Clone ID: PAT_MRT3847_14546C.1
ttttttttttttttttgcattagaacttgaaaaatcttttgaatagataaacacgtttatatacaatgatctgttttcacctagaatggacagcagttaagccacgagaaagccacggaacataactacataagtgccaataggcagagattaagaagaaaaaaaacattattccatttccaattacttatcaaaagttcctatgggataaaaaaatttcagtagtaaaaagaaaaatccaaaataacttaaccaaatatgcaaaaatgaagaatgcagtattgcagttcttcctcttagctccaatactattctagctcatcctactccccatcatcactcctcatcatcgtcgtcctctactagtatcctcttgcatgcttcatagcacatgaaagaaattcctgcagctggcaccaacttcatgcagctaggtcccaaccctttatacaatccttggattccttcttgttcaagaatgcttgcaagggcatgaatcacatttttggatacttgtcttccactaagggctcccacttgcatgtgtttgcgagccacttcgagcggaaaggagcactacttgaaatagcaccagctgctgatccta

SEQ ID NO: 48219 - DNA, 390 bp, Glycine max
  Clone ID: PAT_MRT3847_14547C.1
cctgatacacatatctcagcattgcctaggaaaaaggctaaagacaatgaggcctgaattcaagcaaaagttaagtgccttcaagagcaatcatgaccatgactctgacaaagctcaaagatcatgacatgaagagtcctgataatacatagccaactgacaagtacaaaagtcaacaatctcaagccattcataggatctactacaaagctgaaaactaactgtcttggaggactggctacgtgctcaacactcgaaagtgaaagtgctgctgaagatctaattggctgcggaattaacgattggcggcttatggctaagaaattttatgaacgctctgctaagtcctatgactctgtatcgatgaaacatgtgatatgatatcatgaa

SEQ ID NO: 48220 - DNA, 413 bp, Glycine max
  Clone ID: PAT_MRT3847_14548C.1
gcgagaatggcagtgaagaagtgttattgcgagaagcaattccaagacacagcagcggatcggaaacggcacgttctgggtattcaacagcagcaggccaaagctcgctgggattttgccgttacggcgactcttgcaaatatctccatcccattcccaacaacaatctacagcagcccccagtcctaaccacaccgtcaccgtcaccgccaccagggaatgtggtaggagtttcattggacaatcttccccccttgcttcagcctccacctgaaggtgtatatccccaccttcccttctcgactggggataaatttgtaattctacgcacctctcattactgcatctatgagtctgtgtggaatcattttattagccttttatttcttccaatgtccctccctgtgttccca

SEQ ID NO: 48221 - DNA, 395 bp, Glycine max
  unsure (1)..(395): unsure at all n locations
  Clone ID: PAT_MRT3847_14549C.1
catgagccaagaccagtgcgtaagggcactggcagaacatgcagggattaagccacttgttactgttacagtgtggaaagagttgcaaaaggagaacaaggagttctttagagcatatttgcaagttaccactcccaggccattattcatgagtaagatctaaacttccatgtcctttcgaggataaagctgcgttaaacttttaaactaagatgttttaaatttataaactaattataattaaagatttgtatgcaactcaacattagtttatgaccataaatatttgtataattaagcttttatatgttgtgcatgcaataccataaataagttatctgcagcatactgatatcagntattgtttgtttcctttttaaggtagatgttttcaa

SEQ ID NO: 48222 - DNA, 286 bp, Glycine max
  Clone ID: PAT_MRT3847_1454C.1
aaaaggaaccccgggggaaaccgcttacaattttattggtttggcctaaacatgtttatttgtttaaacaatatgggctgaataccctccccaaagggcaacaagccttaccccttattttaaaaaacctttggcttttacaattaagttttttccttcccaaatttgggcctggtgacttccaactcccctcccatgggccccttgtttttttgaccggtgccccggacccaatttcctgtggataaccaaaaacctccctgggtttaaaacccttttcgggggc

SEQ ID NO: 48223 - DNA, 362 bp, Glycine max
  Clone ID: PAT_MRT3847_14550C.1
ctcgagccgagagcggtctgagtattctcctacctttcaagatttaatagtataaagatggcggagacattcctattgacctcacagtcggagaactagggacaccctgacaagctctgcgaccaaatctgcgatgctggcctcgacgcttgcctcgagcatgacccatacatcaaatttgccttctaaacatgcaccaaaacccacttggtcatggtcttcggagaaatcacgaccaaggccaacgttgactacgcgacgatagcgcgtgacacctgcatgaacatcggctttctcttaaatgaagtgggactggatgccgacaactgctaagtcctcgtaacattgagcagcaaaccctg

SEQ ID NO: 48224 - DNA, 287 bp, Glycine max
  Clone ID: PAT_MRT3847_14551C.1
tcgaccacgcattcaaacaggactacccttgtattaatccaatgggcctatgggagatacctggggggatccaataataatacgatctgggaaacttatatcagccactgtggtttactacgctttttgtacttttaatacttatcactctagggcatgctattatctacaaataagggaagtgacattgaccccagtgatagctactagcgagatctgattgtatcttgaagaataaaacctatgggcattcgatatgatgatgattatatgaatgtagaacctat

SEQ ID NO: 48225 - DNA, 301 bp, Glycine max
  Clone ID: PAT_MRT3847_14552C.1
ggctcgagcaatgctgcactaacggtgctattcactgctgccaacaagaggcagcgggatgaggatagatagaccgctaaaacggcacggcctaggctcgcacgtggacttcatcatctaaggcaacaaatagctattcaacaactgggtaagatcaagcgcattgcatgtagaccccaccgaggattgccaccccaaaacggctcctgatatatacggtcagctcttttaacactccctacacccttatttccaggacctggacagacacatgcggagccaaacaacacgggtgtcacca

SEQ ID NO: 48226 - DNA, 427 bp, Glycine max
  Clone ID: PAT_MRT3847_14553C.1
acgtaagctcgagatagacgacagaagggaaacaaccaaaccaaacacttgcacgtagggatagcatgttatactttggatgcatcagcagaagaaagatatatataaactgagaaacgatttgattgggtctctttgttcacaaaatttgcagttaggacctttctaaaaattgacaaatgcagatttcattgaagttatagactttgagagaggcactgaatgcaaatattacggagacaagtcaaattacatacattatgttctaacctcggatggctatggaatgatattcactaactcttgtgttgaggctatcatccaaccgaatgttcttaatcgttatattgtttgaatttctgctactataaaaaatcatagctccttggaatattttttattctggagcaatctaaaaagcaaaaac

SEQ ID NO: 48227 - DNA, 132 bp, Glycine max
  Clone ID: PAT_MRT3847_14554C.1
ctcgagccgattcggctcgagctttaagcctttaaggactgaataagatgttcattgtttcccatacagcagcaaaatatacatatatttcgttcaaaagaagcgaaacaaagttaaaccaacactgaaagt

SEQ ID NO: 48228 - DNA, 443 bp, Glycine max
  unsure (1)..(443): unsure at all n locations
  Clone ID: PAT_MRT3847_14555C.1
ggggaaggaatcaaagttccttttaaaaaaattataaccttgccaaaataagtttttctttaccttttacaaggaacatagtttgaagcctttccctgacttcacataccaggtgggggaaaaaaatttttttgaatcgaatccccaattttaacttttcttttgatcaaaacccccccccttttttttccccccccctttttttatatatatatatatatntcggggccttgggccctagggaagttcccatgcttaaaacccttcccccggggaccctttaggcatttcattttgatttttcaatccccttggttgggggggaattcaggttaactccggggtcaaccccccgcggtttttataaagttttcataggggcttgctgctggaattttaaaagggggaggctttttttgattttcagttcccaacccccttgg

SEQ ID NO: 48229 - DNA, 2014 bp, Glycine max
  Clone ID: PAT_MRT3847_14556C.1
ccacgcgtccgcattgttatactatcgacgacattatggctgcttcattctcaagcatgctcattattccctcttccaaaataagctacgaagctagcttgggaggattaagcttccacaacttcctaacagcaaaatcaccacctctgaagcgaaaccaaaagtcaataaaagttgttacacgcgataaccactcacccctggtcgacgacctcatgatagaagtacaagaacatgaacatgaacatgcaacgctgcatcagaaagatctctcagaaatgtggcgccaaatccacggtgagaagaactgggaagggcttctagagcccatggaccctcttttgaggtcggaggtgatccgctacggcgagctggcgcaggcctgccacgacgccttcgactacgagccattctctaggtactgcggcacatgcaggttcgaggaggagaagttcttctcctccctgggcatgacccatcacggatacaaggtgacgcgctacatccacctcacggccaacaccgacttcctcctaaagtggttgattcactcaaagtggccaacggcgatggggagcaaggtgaactggggcggatatgtggcagtttcgaacgacgacacgagtcgctgcctcgggagaagagacatcgtgattgcatggcgggggacgaccacacacctggaaggggagaaggacctcaggtctagcctcacacctgtatcatccaagggcatcccgtgccacgatgatggggttaaggtcgacaatgggttcttagatatgtacacgggtaaagatgagacatcagaatactgccagcactcggcgagagatcacgttctaagggaggtgaagcggttgatggacatgtatagtgaggaggaagtgagcattacggtgacggggcatagtctggggagtgctttggcgattttgagcgcttatgatattgtcgaaaaggggttggacaggggtgtgccggttttcggtgatgtcgttttctggtcccgcggttgggaacaagtcttttcataaaaggttgaagaagcttgggataaaggtgttgagggtgatcaacgcgaatgattgggtgccctggttttctctttggttgcctccttttcaatactaccatgttggagtggaactcaagttggacaacaacaaatcaccgtttttgaaacacgatgtagactgtgcccataacttggaggttcttctgcatttgctcgacggataccatggagagcggggggaattcatgctagcgagtgatagggatcatgctctggtgaacaagggaggtgatttcctgaaagaaagttacttggttccaccaaactggtggcaagatgaaaacaagggcttgaagaggagctcagatggacgctgggtacagcctgagcgaacaattgaggtcgacggttacccttaagatatgcatgcagcatcaccttctcacccaactgggtctccatctttttcatttgatatatatatatatatatatgaattaattaatatatattattggaggaggagaatgcatgtgtgttgcagttattatagtactatatattgatatacaagtgtgtaaggattattattatgcatgtttatggtaagggttgccgcctttatgttctgttttttgcgtatacatgcacgctagctgcttatgccttgttggtaatggatgttaacgtttatttatatcaccttattaattaggcatatgccttatatgtgcttaattaggtgatgatactgtgatagtacgtataagttttcaattcaataaaattttcacttatccaaaaaataataaaagtataaggattctgtaattagctagctagatctacaaggttttaaaatacgtatttctcggcccaagattgcgtattcagttttatcgctcttaattggtttagagttattggagtttaactgaatatattcttagaaaaatgtgtggttgtatcttgaaagcttaaaaatgagatttcact

SEQ ID NO: 48230 - DNA, 378 bp, Glycine max
  Clone ID: PAT_MRT3847_14557C.1
gtatttcttcttttatatagattttatcttagataaaatatttactttagggatatttatatttattaatataacgcatctaattaaggttgatcgaagatttttcttatatttgagttataaatattattaagttatctttttttggggaagaattatcaagttatcttgtgttatgtacttttgtataacaataactgtgtccaagaatgtgttcttagctaccgttttacatcacagggattgcaaggtggtggtgtggtgcaattaataatgttggagaactagtgttagttgaaaacacacggactatgttatgcttggagtagtaataattatatatagattgatcgtactggttggtttagagtgtgagga

SEQ ID NO: 48231 - DNA, 533 bp, Glycine max
  unsure (1)..(533): unsure at all n locations
  Clone ID: PAT_MRT3847_14558C.1
gaattcggcacgaggataagttgatttttgaagcagatcaggagggaaagttgaaactaatcctcctccccattaaagatgagatatagatattgatgtatgagaatgaagctgggaacccctaaaaaaataattagaaagatcccaagccctctgaagttgggatccagaagctcaagttcagaaggagagaagccattattggatagtagcagtagcaagcatgagcttcttggccatgcgcgcctgacttgagggttttgatggaatcggtggcctgcgatcaccatggtgatggtgctattcaaattccctgacttggattaattcaaattcagcctcatttaactatctctggatcctagaggccagcgcaaatgttggatcatgcaggaggctaatttccacatatttttttcttttctcatttgggaatcatatccatctatataaccaccttctcatattagcgagtggatcaagatcagataatatgtannncgtgcacnnnncataattaaccnnnagnnnnt

SEQ ID NO: 48232 - DNA, 513 bp, Glycine max
  Clone ID: PAT_MRT3847_14559C.1
gcgacgcacggcgcaagagaagagagagggagtaatggacagagacgaagcagaaaccatggagaatgtggaattcgatgcttctgagattgagtacgttagttacggtggcgagcatcacctccctctcgtaatgaacctggtggaccaagaactcagcgaaccttattccatcttcacgtaccgttacttcgtctatctctggcctcagctttcattcctggcgttccacaagggtaaatgcgtgggcaccgtggtatgtaagatgggggaacaccgtaacactttcagaggctacattgccatgctggttgtcatcaagccctacagaggaagaggcattgctacggagcttgttactaggtctatcaaggtgatgatggaatcaggttgcgaagaggttacattagaagcggaagtgacaaataaaggagcactggcactgtatggtcgccttggctttattagggccaagcggctctttcactactatttgaaatggagtgatgcctt

SEQ ID NO: 48233 - DNA, 236 bp, Glycine max
  Clone ID: PAT_MRT3847_1455C.1
tgattgttgtgactcgttcttcttcgtcgttatcttcttcttatgctgtatgtgtgtatgtaactactctcacttgacaattgtacgagacttcggcagttacggttgtctcgagagcgcctttaagcacgtctcaattgtttatgcgtcgctactgacgccaaggcgagtttatgggcataacttcattatgtttcgtgggataatctggaagtgccagaagcttatcttgtcaa

SEQ ID NO: 48234 - DNA, 434 bp, Glycine max
  Clone ID: PAT_MRT3847_14560C.1
atatttgtctatgtttttttttgattttttttttcttttttttttttttttgcaaacaaaagaacttgtattgccttctgagcctgtggtagggacctggaacccatccaaacacttgggttgtatctcattaggaagaacgtgcagaaccctaattaagcgatcctgtgacaggtgaaatttgaaaagatgcggaaagtgcataaaaatggaccctaaccccttggccggctcgccaacagggaaaaaaagatgcccccttgaaaaccacactgctttaaagcctgcacgctccaaggggataggggcctaaaaaaacgctgcccattcttttttaaatgttcttaaagaggagggggccttacaggggcacacattacacccccccctagctggcccttttcgtttgttccactggacaacacaccacctag

SEQ ID NO: 48235 - DNA, 111 bp, Glycine max
  unsure (1)..(111): unsure at all n locations
  Clone ID: PAT_MRT3847_14561C.1
ggtgggaatttgcctttgttgggatgcaatgttggaacgtgtactcncccagagtngttgtgtttgagaacttggtttaaatgttagcctgtgatggctaatgagaacaga

SEQ ID NO: 48236 - DNA, 769 bp, Glycine max
  Clone ID: PAT_MRT3847_14562C.1
ccgggatatcagaagctcagacctagggatttcggccgtttgctccccaaaaaggaaagaagcagattctgtcctttgaaatcaacaagaaaagatgtcaggtgaagaggtagctgttgcagttgaggtacctgctacttcaattccaggtgagccaatggacatcatgactgctctacagcttgtgctgagaaaatctctggcctatggtggtcttgcacgaggtcttcatgaaggtgccaaggtgatcgagaagcatgctgcacagctctgtgttctagcagaagattgtgaccaacctgattatgtgaaactggtgaaggctctttgtgcagagcacaatgttagccttttgacagttccaagtgcaaagacccttggagaatgggctggtttgtgtaagattgattcagagggaaaggctcggaaggtaactagttgctcatgtgtggttgtcaaggtatgacttgattgacttggtattttaaatggaaatattggagtgttttggcatgctaagtatttgcattttgcaggatttcggggaggaacatgaagcatataatgttgttctgcagcatgtgaaagccaactgaggagttgctgcagcatgcctagatttgtgggttttagtttgaagttattgtatgagtctatttttgcctctatcatagggatattgatggtttagtacaattatacccgttctcattgttgctgagtgaatgcttttttaattactaattggttttctgtgtttttaagactg

SEQ ID NO: 48237 - DNA, 1501 bp, Glycine max
  Clone ID: PAT_MRT3847_14563C.1
gtttgattagtaactctggttagaaggagcataataaacctgcaattgttacagcaatataaaacggaaagacgaatagcccggaccgctcggccgacgactgggttattgcgtcaactgtactccatatcatatcaactggagctggggaacctcgtctctactcgctctcgtccccgccggagatccaccatggccggcaaccccgccaccactacctcctccgcattatctcccgagaatttgaaattcaatttctcccccgataacccctcccgaatcatcctcacttcggatcaggtcaaccactgcacccaagccctcaaccttctgaaggagaagctccacgatcctcacgtgatcactcaggagttcgcacacttgcaggcgaacaggataactccgagcgagatgagaagaagatgcaccgtcgcgtatgacgccgtcaatttgaggaaaaaccgatacaccgacgttctgccatttgacaagaacagggttgttctcaaatcaagtactgattatagacctgaagcacaggggtatatcaatgcaagccttgtctcgacctcctcagctggaaacgtgtcccactttatagccacgcaaggtccacttcaacatacttacgaggatttctgggaaatgatcatccaatatcactgccctgcaattatcatgcttactagcttggtggataattacccaaagacaagtgggggatattgggaaatgattacccaatatcacgagaagttggtaatatttctattattggtaaatgggagaacccaactgaaacttcactcgtgctgcgccatttggaggtgaaccatagagaggtagaagatgcgccattatctgttttgcatattcagtatcctgaatggcctgaccatggagttcccaaagatacatttgctgtgcgtgaaattttgaaaagattataccatttaccaccaaactttggtccaatagtggtgcactgcagtgcaggtattggtagaactggaacatactgcacaattcacaacacaattcagagaatagttgctggtgatatgtctgctgtagatattgctaagacaatagctatgttcaggtcccagcgtattggaatggttcagacccaggatcagtacattttctgctataacgctatcatagatgaactggaagaccttgtatctcagcagcagtcggagtagaaggtgctggaacttggaaggatgttgaagctgcttgcctcattttgaagctaactatcaattcttcgaacgtttttatgttcctgcaatgctcatgttttccagcagctgaagtctgaaacattagcatctgggagattttatgaatttcaccgaattctgttattctcatgcttttttgtataattgcaggcagggaaagctgacaaatattaacatccttttgattatattgttagaattctattggggaacagaatggcataatgactacaataatgcattgtccctcc

SEQ ID NO: 48238 - DNA, 485 bp, Glycine max
  Clone ID: PAT_MRT3847_14564C.1
tccaagaaggtttcccgtcatcactgtatgacgtcctccttctttgggggggggggggggctatctagataaacgcagggaggaaaagttaggtcagcggtaaagccgaagacgacaataagaaaaccgttaaatctttgaataagccgtgaatagaaaacccaaaaaatattaaacaaaaataagtatgcgtgccaaaattccatggaggggtctaaccatagaagaaacatatggaacaaaatgatgtggtggtagtggttgtgggttaatatggtacacggcagtgacccgaattatacgtataacgtggcctaaagggggccgccataacacaattatttaggttaagtttggccccatgttgtgtggcgtcatacgagtttggaatagttacaaaatatcgcgcagtaaataatggctggctattagttatagcaatgcgtaatacacaatgtacggcccacaaaatagcttaagatttg

SEQ ID NO: 48239 - DNA, 330 bp, Glycine max
  unsure (1)..(330): unsure at all n locations
  Clone ID: PAT_MRT3847_14565C.1
gtgacttaataacataatattgggattcatgacttaaaaaagtgaaattacaannntttacgtacataattaagcagtattggactagggaatgtcgtacgtctagttttcttatttatccataatttttggcacactacacaccacatcatagcatagttggatgagaattattaaaattgaaagtgaatgaccataatcattcgatactggtgtttaaggcttaagaccttgagtgaatgggatttgtttgtttctgatggtcaattgaagcatatttattcaaccctaacccattcatgaagcattttgttgttctaaattttatgg

SEQ ID NO: 48240 - DNA, 257 bp, Glycine max
  Clone ID: PAT_MRT3847_14566C.1
tttatagaatttttttcgattacacgcccatataaaaggcggattaactgttccatcgtttccacatcttatatcaaaaaaaaaacccatcttcccaaattaaccaggaggggtggctgcgtctactttctttctcaaacgctttccatggctcgtaccaagcatgccgatcccacaaccaccgaaggaagggctcctaggatttcttctcgccaccaagggacccaaatttgggtaacactgttttttttttttca

SEQ ID NO: 48241 - DNA, 299 bp, Glycine max
  unsure (1)..(299): unsure at all n locations
  Clone ID: PAT_MRT3847_14567C.1
gttgcgncncacgtncgtngagctcggnattcggctcgaggtgntggcantttnctatctggtntaggnntgcgtgggtnnantnnncntatttnnctantttcnatanatgcgtatncnntcgangntantaccgcnngnncngngnagantggncttnnngnnganttananggngnnttngtncgnangtgagnttcgnnangananggncnggnttaagnngnganagngcganagatttntgtgttgtgangangntgaatgggctcgnatgnngcatgtnagcnaagggcang

SEQ ID NO: 48242 - DNA, 252 bp, Glycine max
  Clone ID: PAT_MRT3847_14568C.1
atccacttggccttcctgtggatttattaatgattgaaatattcttacctttagatggtggaacttgcaatcagatccatatttactggtcccagtgctcataaactatctacattctggttgctagttccaccaccctaaggattgtatatctcaatcgtcaatacatccacgtggccttcctgtgagacctgtaagtacagcttctgcttgagtgatgccaatgagtttactagacatgtggtaagttta

SEQ ID NO: 48243 - DNA, 163 bp, Glycine max
  Clone ID: PAT_MRT3847_14569C.1
agcggcactgctccgtgccacgttcactgcataaactggcgagagaactctgcaaacaggatcggttatcatgacctccttacaggcgatgagctgctctcggactgcttccggcacaatgaaaattgagaatggaatgccgtgaaaagttgaggggaagtgg

SEQ ID NO: 48244 - DNA, 272 bp, Glycine max
  Clone ID: PAT_MRT3847_1456C.1
gctcgagcaacaacaacacacgaggttcacagttgtgcttcgctgctgactcctgcgtagcaccgctacttcgcaggagataatatcataccctcatttccagcaactcaatgtcagacaaatcctcacaggaaccagactcaacccaacaagtacctacagagacctccaacaccataaactcaacatttccagcgaagcatcttcagcggcagaatatagactgaagctagttcacagagacaaagtccccacggttaacacgtcccagc

SEQ ID NO: 48245 - DNA, 280 bp, Glycine max
  unsure (1)..(280): unsure at all n locations
  Clone ID: PAT_MRT3847_14570C.1
ggtcactttatgagggagaagataatgtctagagaagtcaccactgctttgtcaactctaatgatcaactatcagatatttttaccaagtctcttagagggccagggatatcctacatttgttccaagctggatgcatgtgacctatatgctccaacatgagggggagtgtngaagattngatttccatataactgcatntattaataattgatctgtatttgatatattattgattaacatttattctctgattatgtaatccctgaaatcatgggatt

SEQ ID NO: 48246 - DNA, 178 bp, Glycine max
  Clone ID: PAT_MRT3847_14571C.1
ggcaaaaacagaaaaaccccaccgagttgaccttgggtttctaccaattggggccctcccttcaccaccccacaccggatggtctacggggatcataaatcctcctcttactacaggacgcttacctatacaacatttagatccggatctacctaaatttatggtggtaactgcaaca

SEQ ID NO: 48247 - DNA, 2435 bp, Glycine max
  Clone ID: PAT_MRT3847_14572C.1
cttcaacatctaagttttcaccagaaaaagccaatttctcttatggggcagaaagattcgattaagtttagggaaaggaaagcaaacaaagaaagccaatcggaaatgattttatcactacgcgaatcaaaaatcaaagtaggagcgagaatcaccttagggctaggccacctgcctgactatctattgtctcagcaggccttagcccggcgacgacagaggcataaaggaaggttgctgcagaataagcgatgttcttgctcttctttctcttggaagaagaatggtgttgaatcagtttcaagtggtgggatcatattcatatataatagtagaatcccgtctccttaaaggagcgatctctccctcaaagtagaacgagcataatcgaagacagatggtagcgtattctaagtagttgatctcacgtgctatccgaaagtattattagtcttcgtctgctctcaatgcccggaacaggctctgaatgaaatagaaatcccgtaagtgaagtcactctcggagttgaaaacgactaagctttttgccttgcgacttgcctctctcactcaagataaggtcaggtgatccctttatgtctccttctcagttaggtccaagaagtcccttccctttctccgatcaataagccccctgatccctttctttgtctttcatcctccctgaacagaataagtaaggccccgtttttttctaataaaaaaaaagaaagggcgaagcgcccgtttgaagtggcgaaggcctatgattgatatagtaagaaagaaagtacgttaaggttacgaagtaaggtcagctggttaaggaaagctcaggttatgaaatcgcttagccattaattaaattcagtagtagtgaggcgtcggtacggagccttccactgtggaccgagactacgcaaaggtagaacaccatagaaacttcgctgactttctaataaaccttgatttcgctacgctcaataagaacccggaatagcggaaatcggttcgtgttccgcttccaaactcagtcgtctttgcccaagtgtgaactgcggacgactctccagtggttccattccttcttactttacttctgggtcaacccaacccgaatgggaagaagagggtcagccaaacagcggtccactttgtacatttgctgaggcagaccaatcgggcattttagaaaagggaagggaacttttatcaccgaaggaggcagtagaaatgaaggaggcgggaagctaccgcttctagaatgcaagcttatcctttactttttttagagcgtaccgctattgaaaaaaaggttgatggatgaagtaatcggaatgacaaatgattacggttgcggaaaccggataaagtcgggaaccttttgaatcaaagtagcgccgagtacttcgactacagggggagggaagcttcgtagacagcctcgcttccccgcatagcatggagggtctaaggtaagatcggaggactgaaaggaaggcataatatgagtactcgctcgctgaagaggtaatcatataaaaggcaaaggaagaagatcatgttctcgcttcccttatctgtttggcctggaggcgtatctcccgatggtcgactgaaggcttattaccgattagcctttttgctactaaagagacttctggaactccggctgacttgtttgctttgctctacgctgggaagacgacggtgcgatttcatctgttggaggcgtaaccgcagcagttaggtctactctaaaggtagttccgttctcctcggatgagaataggtagctattatattataatagtagtagcggtgttactttcttcttgaaaagacagctttcaaacaaagcctttctaggctaacgaagttagggcaacaactcctgactcgaggttgagaataggattcgatggaaaacgggatcaagcttaattactttccgttgtgatcaattgttgtaccgatgggtgtttatgaaagtggagcttcgggaaagatgggcactcgtcatgtgctgcaactcgatttgtcgcaacaagaggagaagaagatacctcgatgaaacccaatcaggatgtgaacaaaggccactgctcaaactcttcgatatgcgctagctaggcaatccctttacttaatctgataattgatctcttgctaccagatctgcccttacggatctgttgaagggaggattgaaaaaaaaaaaacaaggcatatttcatatatggtggtagggaggggatggcctctcatcagcggtaggaagatccaagttaggagtttgtacaggggagaatcggtcttgaagcttagttgaaggttacggaaaagggaaaggaagtgtttggctagggggtctccaccttttttggataggggataggaaacgagccaaccggcgaacagttagttaccgaacac

SEQ ID NO: 48248 - DNA, 452 bp, Glycine max
  Clone ID: PAT_MRT3847_14573C.1
ctgcgagaagacgacagaagggtctgagtttagttgtaccattccaaattccaattccacaaatcactattaaacggtaaaagcagggctgagaagcaccccactttgataggatgcttatttctcactgctttgatcaaatttcttttttccccctcatggatacactgtataaaactataacattaaacataacctatcctatttattttaaagagagaaaaaacacaaaccccataattatttttttttcaataaaagaaattaagaaaggatcatctaactctgacctggggttgtatgagcaagggaggtggtggctcatatggtccaggtccaggtggagttaactgaaccaaaagatctgtgaatccattggtattgccataaagcgcttcaagtggcagaaatttgatgtcttgttcgtactcatcctttttaactcctgaagt

SEQ ID NO: 48249 - DNA, 432 bp, Glycine max
  Clone ID: PAT_MRT3847_14574C.1
gcgttatttcctaggctgctgctattaatcaagtccaatgcccatgagtgataaatgccttttattgtgtgatgcatgaatatggtgtttactagagtgataaataatttctactgtatcaccatgagataatgaactagatgcctgatcaaatctttaataatgattgaacatatgaagttatatggttgcttttggttcaaatttttatagttttgttctctgtatgtattccagtggcagatgcacacacatttgttctggaaactatcgaagttttttttctcttagaaaataatacttttgaagtatgcacagcatatggatcatttaacagaagttgcagtactgtataagagtatggggttgtgggctcaataagtaagttgtgtactggtgtataagtatgtggagataacatgtttttttttc

SEQ ID NO: 48250 - DNA, 239 bp, Glycine max
  unsure (1)..(239): unsure at all n locations
  Clone ID: PAT_MRT3847_14575C.1
aattgtaatgtgcaaaattatattatacataattttttttaatactttctcatgtatgatctccgcactaaatatttttttattttaatttctttgtcaatgccacaataatacttgttaacgacactcagaagaatacgacactcgtatgtggtntagacatgcgatattctgagtgaggaaactatgtggtctataatcggtgcatgctaatttaggaaacagtaggtgatcagcta

SEQ ID NO: 48251 - DNA, 356 bp, Glycine max
  Clone ID: PAT_MRT3847_14576C.1
gtgttataaaatccaagagggaagtaagctgctccacaaccgtgttgggttaagcccaataactctcaacatatgtattggcgcaacatcaacgcctctgtgatgctttatattttagccatgtatatgagaacccttacataacaggcttacatttgttatttctgtatataatatactataaccatgtgctatattctgcaagtccatatgcagcaaatttatacaaagacaacaatattatatatatactatatgcatgcatgcacgatgcatttactggggactgggtcctccaggaagctactccttaatgttgtgcagggtgcctttcttatcgggctgaccaccatgag

SEQ ID NO: 48252 - DNA, 912 bp, Glycine max
  Clone ID: PAT_MRT3847_14577C.1
gtttgagcgtccgggactttgagagaggaccaaggtaccacgcatacgctgcgttgagggaaacaaagcttcgcatgaggcaacaagaagaagaagagggtgttgttgaagcaaaggtttcaaccccaccaagaaaaaaacaagtcaagtttcaaggtgctgtggtttcagggagaaaagggtcatcatctcttgtggctcagtctgtgccggatttttctaatgtgttgaggaaggagaataggaagccggtgaatggtaacatgatgttacctcctttgatggagttgacgccacctccttcttcttccaagagtggctgtggtgttttttcgagtgcgagagggagtaagtcagcgaatgcgggtgagaagagaaggggtggtgttctcatgcccaggaagagctatgccagcattgatgaactcaagggtggtttgtcttctgctacttctaatgccatcaatgctgacaacagaggaggaaggagtagcaggctcatcacaagaaagactgttttagggtataggcatatttgaggagtgtgtactgtggaggcactcctatggtgttttcttaaacccttttgatttgatttgtttattttgtatttgtagctttgctcatacatgtcttcgctgcccatttacttttacttttcattctttctagtttcgatttgttttttgttttattgggagcaacttacagtattgtgcaagtgtaaagctagtatgatttgagcgagtgagtattcatcaccccgacaatgctatagagagaataattttcatattcctctgtgtgttgggggaaggactttgcttgttgtgttttggaataaaggagtacataataggctacatcttccaaatatgtttaatcaataggactttgcttgttgtgttttgg

SEQ ID NO: 48253 - DNA, 726 bp, Glycine max
  Clone ID: PAT_MRT3847_14578C.1
aacctcctttcttgcgtgtttcttaacaagggtttcaattggaaaatggccatggccgcaggtaataacaacccaattgtgtttgacccatccacttctatgtatttggtgtcctgtgatggactaaccattgaaacaacaatcactgacaaatcaggcatagtagataaatggattcaagtcgtttcatcaacatatgcaggaaaacaaaggatagttggattagacactgaatggacgactgccaaaaagcccaagatgaaagttgcaattttgcaactgtgtattgagaacaagtgcctgatcattcaactgttccacatggacaatattccccagtccctaaggagctttttgatggactctaactttgaatttgttggtgttggagtgatcaatgatcttaggatgcttaagaatgattatgggttggagtgcaataagggcatagatgtttccctcttggcaaaggaaaaatggcctcatcggatttcttctggggcactgaaatatctggcaaaggagttggtaggtcttgagatggagaagtcaaaggctgtatgcaccagtgaatggcaatcaaaagagctgacccaaacacagattgaatatgcgtgcattgatgcctacgcttcttttaagattggtaaaatgatcctaaatcaagattagtagttaattttatcccatctctttgaaaattttctttatgctttatttattact

SEQ ID NO: 48254 - DNA, 299 bp, Glycine max
  Clone ID: PAT_MRT3847_14579C.1
ggggaaaggggttaaaaaaatccctcattttacaaaggtttgggcccctcaattttattttaattctaaaaaaggacccctgcgaaaaaaattttggtttttttttttttcccaaaatttaatcaaaggtttttccctaatcctggcaacccctagggcccctttttttcttaaattaaaaagcccaaaattgacccttgcccaaaagctcccggaatttcccccccgaaaaccccttaaaaaataaacccctggctttttccccgggactgaaattgtcaaagaaaaaaaatttttaa

SEQ ID NO: 48255 - DNA, 265 bp, Glycine max
  unsure (1)..(265): unsure at all n locations
  Clone ID: PAT_MRT3847_1457C.1
gtctccgacaacgggaaggaatttgttttgttatgacaatggcaggggccaagaagagggatggaatggttatagatacaagaacaacgggacacaggataaggaatgggaggctcatgngattagnggacaaaagggtcatggaaaggagtacccaaaggggggcggggaaacagangaaaccaaggaaaaagcaggaataaggaagaccatagaaaaaantggaagngnnggaagggncgaaagnaaaacgggaagatggaat

SEQ ID NO: 48256 - DNA, 608 bp, Glycine max
  Clone ID: PAT_MRT3847_14580C.1
ccacgcgtccgattaattcgaaactcattgggaagagcttcaaacttacagacttctggaggctcaaaattcatgaaccttgcatactaattatggattgaatacagcttgtggttggaagataacacacccgagttgctgggatgcataccctacaggggtgaaataagttcgcatttaaggcaaccccaacgaggccggatctaaggcagaccacagatgactgcaattaatgcagtttttgaacacttctcctcatgttcagggctaccgctctgtagtgtggcatatgccactggcccaacagtagatctagaatatgctctggcccaacatcatttttatttatctgatgtttgaataatacagctactgatatatacactaagatgaattgaactctgctgtcttgaggaaacatatcaagatgcaatgaatattctatcatcttatcatacttcagattttattcagatctgactctaaacacatttattacaaaatattttttatctcgtacaatgagatattttcctactctctttctttgtttttgaatcattgtctcggtccattattaacatgtcttagcagtgctttggactttg

SEQ ID NO: 48257 - DNA, 379 bp, Glycine max
  unsure (1)..(379): unsure at all n locations
  Clone ID: PAT_MRT3847_14581C.1
acacccaaaaatagatacattgaaccctgctcagaaatgcgntaatgctctagagacaatnatcagataaacccattctcaaggatgaatacttgctccgcccagaattccctatattaatccactttccctttcctgctcacacaatggccccctccaacgaatatccagaccgcgaatccgccgaacccgcctcgggaaaacaaacctgcaggaaaacgaaagagaagggtcagatctaagggaacatggcctctctcaaatgaggcgggtcatttatcacaatcaaaacgggaacgaagaacagtaaaacttatagatcttgaattgggggggtcaattgagggcaccagcccactaaaaaccattattggccaca

SEQ ID NO: 48258 - DNA, 546 bp, Glycine max
  Clone ID: PAT_MRT3847_14582C.1
accacgcgttcgttttttcttaaaagcaacctgctgacagactagccttcgttggctccttgattgaagaagagagtacgggtgaccaaattcaaagccttatccgtgatttaccaaatttgtgtttctcccttagcgagcagagcactactctaaatgctgatagcttccaccacaccgatggcatcacggatcctatcacaaaacttggaggatatcccttcggaccatcagaatcacctcatgcacgtgaatgcaactctaggactgccgcgcggttgctgactacatcatggataacgtatcataccctctagaacattctgcggtttcttactacatgcacatgcttggtaagaccctcaccgttacgactataaccttattatgaagagactgaaacacagactcagctgataggctcatatctgtgacaaggagcctatattgcaacactaatagatgctgatcttcaaatggaagcaagtcttagactgacgcgcatttgcgtgatcatacttggacaatgaatgctctttacaatca

SEQ ID NO: 48259 - DNA, 272 bp, Glycine max
  Clone ID: PAT_MRT3847_14583C.1
ggaaaaggatacaagcactcattattgcgagacgagcaaaaaaatacgaattcaattatattaccaaatatatcgaagtttaaggggctttcaccaagccaccaaaattaatgatgcaccatgtcatcatcgggctttatgcgtcttacaaacataaaagggtatatcttgatgaagccatcaaaacatcttaaagcatttgtcgcatcaaagggactttgtgttttggacactcaaaatggttgtgaacacttttcttacaacattttatt

SEQ ID NO: 48260 - DNA, 335 bp, Glycine max
  Clone ID: PAT_MRT3847_14584C.1
actctcacgtactgttgggacagctggtgcgcctgcaggctgccgtgcccggaattgaccggactcgacccactgtcgtgcggtggtactgaacctttgatcggaggaggtgctggatcacactcttcaatggagccccctgatgaggaaaatctttataaggccgcacagaacgtggccgaagagtgacatgaaagagatgctgaggacgatgaggttgaggctcatatggtaacagctgcgcttaaaggggctgtggatgatgacgatactgctagaggttccatggcggcacttgaaaggtctcactctagagctgcacttcccaaaaacac

SEQ ID NO: 48261 - DNA, 492 bp, Glycine max
  unsure (1)..(492): unsure at all n locations
  Clone ID: PAT_MRT3847_14585C.1
tacggctgcgagaagacgacagaaggggacgaaaacaaagtaagtagctacccttctttaaaagtcattcaaaatttcgaagttaaaaaacaatgcattatttggtagtttagttaggtagtcgagagggtccacccattggctaaataaaggtacgttgttctaaacaagtagtactagttaccaagtaacagaaattaaggtcaattttatgatgtttaagttctactcattaatattatattttcttagaactaggaaatcacatgtacaaggatcgtgattagcatctatttaggtcctcttttgatttaaatagttgctaaacatgccaaacttgctatgtttagctctttattttgtatatgggttgataccccttgtaccatcatcaatatacctttgcaaatttaaaaaacatgtacaaagatcgcaggttctcatgagattcaaagcttgatttgctttgcacganactaatagtctatatat

SEQ ID NO: 48262 - DNA, 457 bp, Glycine max
  unsure (1)..(457): unsure at all n locations
  Clone ID: PAT_MRT3847_14586C.1
tccagaatgcttagagtaatccggatagcctattttggattgcttgttccagaagctttaattttaaaaaatttcggtctgtgggtttttttgttgtggcgtttcatgtgggtcattgtcccgactttcttcactttctcctgcgacgtaccctaagatcatcagtgaaaatatcgatcctgcaaatcaagcagcattgcttcagtttttgcaacacttgtaatctttcaatagtttgagtaactttttctttttatgtttgttattatttcatatattcatccaagttctttggactaaatatcaatatagcttatgcattttttaccctttttagagtggaantttgcctcctttggtactctggtatttttcatccgatttcacatttagcaaatataggaggatagtatgcagttttgcacaattttctttataccaacatatttgttgattg

SEQ ID NO: 48263 - DNA, 311 bp, Glycine max
  unsure (1)..(311): unsure at all n locations
  Clone ID: PAT_MRT3847_14587C.1
tgggaagaagattgnngnttttgtnnntaatgatggttgtttgaantanattgaagagaatgangaagtnttgattggtggatttggangaaaaggtnatggtgtgggagatattnatggtgtnaggtttaaggtngtgaaggtntatggtgtntntnttttggntntnttnaaggagaagaaggagaagnnaaggttttaaatttgtggagtanttgtgtttgtttttaatagtttntgttaagtattatgaattttgtttttaggtgaaagggttttatgaagaattttttatgttatttaggtatttt

SEQ ID NO: 48264 - DNA, 182 bp, Glycine max
  Clone ID: PAT_MRT3847_14588C.1
ctgttccgggaaattatcaagtacaaaatgcccactgtaaacctacagaaatattaaaatcaacagttaccaatattatgccaacctaccattcagcgactgatacatcctgtacagctcatcatcataaagggaacccttattgaagaaatatccaatggcgtaagccacaaggaatgatt

SEQ ID NO: 48265 - DNA, 1418 bp, Glycine max
  Clone ID: PAT_MRT3847_14589C.1
ggcacgaggaagattgttgatgatgtcttcgacaagattaataaagctgaagcaagtatatatgttgcggatcacccggttggattacacttagaagtggaaaaaataaggaaacttttggaggctggatctagtgatgctatctccatgatagggatccacggaatgggcggggtaggaaaatcaacacttgctcgagcagtttataatttgcatactgatcattttgatgattcgtgtttcctacaaaacgtgagagaagaatcaaacagacacgggttaaaacgcctacaaagcatccttctttcacaaatacttaagaaggaaatcaacttagcaagtgagcaacaaggcacttcgatgataaaaaataagctcaagggaaagaaggttctcttagttctagatgatgttgatgagcacaagcaattacaggcaattgttggaaaatctgtttggtctgagtctgagtttggcaccagattggttctgatcatcaccactcgggacaaacaactcctaacatcttatgtagctttgatgctttggaggaggagaaaaagtgtttttcagacattacttgttgcttgaaaggctataaatgcagagagattgaagatatacttcaccgtctttatgataactgcatgaaataccatattggggtgcttgttgacaagtctctcatacagattagtgacgatagagttacattgcatgacttgattgagaacatgggtaaagaaattgacagacagaaatcacctaaagagacagggaagcggaggagattatggttactaaaagatataattcaagtcttaaaagacaactcggggaccagtgaagttaaaatcatttgtcttgatttccccatatctgacaaacaagaaacaatagaatggaatggaaatgccttcaaggagatgaaaaaccttaaagcacttattatcagaaacggtattttatcccaaggtcccaattatctaccagaaagtttgagaatattggaatggcacagacatccttcccattgtttaccgtctgattttgatacaacgaatcttgccatacgcgacttggaatagttccatcccgtcattggggtgtggtggcatatccaagaagttgatgtatctaactatctaagggttttggatagctgatgcatctggtctctcaaatttgaaggaattttcatttgaatattgtgagaatttaattatagttcagagtcaattggttttctgaataaactttaaatattgagtgctggttgtttccgcaaacttaggagttttctacccatcaagggatggattgaatgaatgaaacaactgtgactcaactcaacatctttttatacaaatacaatgctgcatgcaaatgaaattttgggaagaatttgtactgggaaa

SEQ ID NO: 48266 - DNA, 853 bp, Glycine max
  Clone ID: PAT_MRT3847_1458C.1
gtcaacatccttaatcaggtgcagaacgcccaatccaggaaattaggcaagtctgagaataagaaacgggtgggggtgaattctttaacctgaagtggtcagaataataatgatctggttgcgaagtttacaagtaatgctcctgcagtagagtccaagcccagagagatggggccaaggaacatgtttaaacatccacatactaatggagttgttagtggagagtttcctaatggaaaagtcacgaatacaagtttgattagacaggtgactggttcatcacctgaaagtacatcacatcaatctagcagagctgctcctgctgttgtccatgggcaggagcagggtcttagtgacccagttcagttgatgagaatgtttgcagaaagggctcaaaagcaacacacttcttccaatcattctcttgttgatactccgccagtgacactatcaggtccatctggacagagaaatgactcgggcaatgcttcagcagcagctgcccatgcatggatgtctgtcggggcaggagggtttaaacaaggacccaacaattctagttcacccaaaaatcatatatctgcagattctttgtacaactcaacaagagaattgcatcagcatatttcaagaattcggggggagtttccctctggtggaatgcctttccaaccatttcaagcaggcgctgtttcacagtttcccaaccggcctatggttttccctcagttagcatctgctgaccaatctagatttcaaatgcagcccccttggggaggtcttagtcctcatagccagtcaaggcagaaacaggaaacgcttccacctgacttgaatattgattttgaatcac

SEQ ID NO: 48267 - DNA, 1761 bp, Glycine max
  Clone ID: PAT_MRT3847_14590C.1
tcgcccacgcgtccggtttgaaacagagctggatatgaattcaagtttattaggaagattgttgatgatgtcttcgacaagattaataaagctgaagcaagtatatatgttgcggatcacccggttggattacacttagaagtggaaaaaataaggaaacttttggaggctggatctagtgatgctatctccatgatagggatccacggaatgggcggggtaggaaaatcaacacttgctcgagcagtttataatttgcatactgatcattttgatgattcgtgtttcctacaaaacgtgagagaagaatcaaacagacacgggttaaaacgcctacaaagcatccttctttcacaaatacttaagaaggaaatcaacttagcaagtgagcaacaaggcacttcgatgataaaaaataagctcaagggaaagaaggttctcttagttctagatgatgttgatgagcacaagcaattacaggcaattgttggaaaatctgtttggtctgagtctgagtttggcaccagattggttctgatcatcaccactcgggacaaacaactcctaacatcttatggggtcaaaagaacacatgaggtgaaagaattgagtaagaaagatgctattcaattgcttaaacggaaagcttttaaaacatatgatgaagttgatcaaagttacaatcaggtcttgaatgatgtagtaacttggacttctggccttccattggctttggaagtgataggttcgaacctgtttggaaaaagtattaaagaatgggaatcagctatcaaacaatatcaaagaattcccaataaggaaatcttgaagatacttaaagtaagctttgatgctttggaggaagaagaaaaaagtgtttttcttgacattacttgttgcttgaaaggctataaatgcagagagattgaagatatacttcacagtctttatgataactgcatgaaataccatattggggtgcttgttgacaagtctctcatacagattagtgacgatagagttacattgcatgacttgattgagaacatgggtaaagaaattgacagacagaaatcacctaaagagacagggaagcggaggagattatggttactaaaagatataattcaagtcttaaaagacaactcggggaccagtgaagttaaaatcatttgtcttgatttccccatatctgacaaacaagaaacaatagaatggaatggaaatgccttcaaggagatgaaaaaccttaaagcacttattatcagaaacggtattttatcccaaggtcccaattatctaccagaaagtttgagaatattggaatggcacagacatccttcccattgtttaccgtctgattttgatacaacgaatcttgccatacgcgacttggaatagttccatcccgtcattggggtgtggtggcatatccaaggcaagtttaaagaatacattttccttgtaaattaataaattcacagcagtattattcattcagttctgtttaaatttttccatcattttctttttgcagaagttgatgtatctaactatctaagggttttggatagctgatgcatctggtctctcaaatttgaaggaattttcatttgaatattgtgagaatttaattatagttcagagtcaaatggttttctgaataaactttaatattgagtgctgggttggttccgcaaacttaagaagttttctacccatcaagggatggaattgatgaatgaaacaactgtgactcaa

SEQ ID NO: 48268 - DNA, 1024 bp, Glycine max
  Clone ID: PAT_MRT3847_14591C.1
gatctcgagccgctcgagccgctcgagcccctctgtttccgtataacgctctccaatacaaaataaccactcactgaatattcggtcgaagatgtccgccgccgaagaagctaaagttcccgccgtcgaaaagccggtggaggaggtgaaggcgccgaagcttgccaaggagaagaaacctaaggctccgaaggaaaagaagccgaaacaggccaaaactgcttctcatcctccatatctccagatgattaaggacgctttgattgctctgaacgagaaaggaggatcgagtccatatgcgatagcgaagtacatggaggagaagcacaaggcggtgcttcctgcgaatttcaagaagatactaggtctgcaactgaagaaccaagctgcgagagggaaactcgtcaagatcaaggcttcgtacaagttagccgaagccgcgaagaaggtgaaggagagcaccgccaaagcgacgaaggaatcgcgtccgaaacgaaacaaaatcgcaaccgccgttgctccgaagaaaaccgaggcggttaaaaagcccgcgaagaaggtcgggccgaagaaaacgaagaaagtgtcgacgcctgcgaagcccaagcagcccaggtccattaggtctccgaccaagagggcccgtaaagctgccgtcgctgcggcttgatgtttgatgtttttcttgtttagttaaaactctggcatataatatatgtagatatgaaaaggtgtgtgttaaccttgttgcacaatcttgaatatagttgtgtggtttaggatcgtagatagtttagtgttctgcaatgttcgctctaagaagtgatcaattggagatgaattttactgttatcaatctccttctttcaagttgattgtttttttttcactgttggttttatcgtcgaattttctggaacgccgaaagggtttgtgatgccatgcgggtgcggttgaatgtttttaattggccggttgttcttttttatttttggtggtttgtgattgggcttggagcaagaaa

SEQ ID NO: 48269 - DNA, 394 bp, Glycine max
  Clone ID: PAT_MRT3847_14592C.1
gatcatcagaatccacagtttccgttagcgctctccaatacaaaataaccactcactgaatattcggtcgaagatgtccgccgccgaagaagctaaagttcccgccgtcgaaaagccggtggaggaggtgaaggcgccgaagcttgccaaggagaagaaacctaaggctccgaaggaaaagaagccgaaacaggccaaaactgcttctcatcctccatatctccaggtaatttcgcgtaaatttctttcatgaatccacaattattacgtgattgttatttttttgtttgttgatttttttttggttgtcttaatgtttgtagatgattaatgacgctttgattgctctgaacgagaaaggaggatcgagtccatatgcgatagcgaagtacat

SEQ ID NO: 48270 - DNA, 603 bp, Glycine max
  Clone ID: PAT_MRT3847_14593C.1
tcagaatacaaatatataatacaagattagcacgatgaaaattaaggttttactaactttccaaaaagaatgtatcatgtgaatcacgggctgggtgttgttggggctggaacaaggcatcaaagttccagaagctgccaattaaatagcacatacaagcaagaaaatatatgatatgagatttaaaaaatatatattttttaaatgtcacttcatttgtgatgttgcaatgcattgttcagaatttagaacaacagtttcttttcaaggcctcaagcaactacagaaagaacctttccaagaggatttatctatcataacaagaacatagttccattagttacttcaatatcattcaaaggcccaatgaaacaacttatagaagacaatgaatactcacaaaaaaattcaaagctataactttttcttagaaagaaaatatattccacacatcatttaacatctttgagaggacaggaaagcaacatgacctatctaaatctcaatcagagacactaggaagccattgatataaaaacgacaagacaaaaataagatcaagttacttacatcattgccatcaacatcttcaattaaaagatg

SEQ ID NO: 48271 - DNA, 726 bp, Glycine max
  Clone ID: PAT_MRT3847_14594C.1
agagcaccgtcaaagcgacgaaggaatcgcgtccgaaacgaaacaaaatcgcaaccgccgttgctccgaagaaaaccgaggcggttaaaaagcccgcgaagaaggtcgggccgaagaaaacgaagaaagtgtcgacgcctgcgaagcccaagcagcccaggtccattaggtctccgaccaagagggcccgtaaagctgccgtcgctgcggcttgatgtttgatgtttttcttgtttagttaaaactctggcatataatatatgtagatatgaaaaggtgtgtgttaaccttgttgcacaatcttgaatatagttgtgtggtttaggatcgtagatagtttagtgttctgcaatgttcgctctaagaagtgatcaattggagatgaattttactgttatcaaaaaaaaaaaaaaaaaaaaaaaaaaaaaaaaaaaaaaaaaaaaaaaaaaaaaaaaaaaaaaaaaaaaaaaaaaaaaaaaaaaaaaaaaaaaaaaaaaaaaaggggggggcccttttaaaggaacccaagttggcgccccctttaagggaaccaatttttttttctttgggggccccaaatttaatttctttggcgggggttttcaaccattggactggggaaacccttgccgttccccaatttaaaacccttgggggacaccccctttttcccgtttggggaaatacccaattggcccgcccggtttgcctttcaaaagggtggcc

SEQ ID NO: 48272 - DNA, 417 bp, Glycine max
  Clone ID: PAT_MRT3847_14595C.1
tttcaacttggctttcctcgagtcgctccctcgacgccttccttcgaaggctatcatgaatttgtttaagtcccctaatccgattaggaatcttgaaggtagattttttcttctttttttggtgttatttgtctatattcagctctaactggtttgtatttttcaagaattatggtacaagtcggggttaatatgccttccttcttcctcgctcgcaagaattgagcatttgtgacagttagtttgacaatccctacgcattcactgatctgaaaccctcccctgaatgaccttccagcttatgccatttcccttcttactagggaagccaagcaaaaagaccaggggaagcactatgaccaaaggcaaggttcggttcagcctttcggccacgagggctcaaagaaaatgaaacaa

SEQ ID NO: 48273 - DNA, 288 bp, Glycine max
  Clone ID: PAT_MRT3847_14596C.1
gagagcgagagagagagttacttcccgcagaaggttctgtgtggaatctataaaacaaagatggggaaaggagaaaaaaaatactatagaaagagagagaggaagaaagagaaacggtttaattttaaattattagtgattagtgattgatttctaagaaatcatcaaagggggtttcgtgacatccttgttcttctgcttagccgagattctggaaaatcaaaatctccacgtaatctacttgtaaccatcttcttctccaagattttcgccttacccttttcccac

SEQ ID NO: 48274 - DNA, 263 bp, Glycine max
  unsure (1)..(263): unsure at all n locations
  Clone ID: PAT_MRT3847_14597C.1
cttctacgtattgaccacaagcacggtaccttcacccnngattatctagagagtttttgattgtgtctttaattatnnctatgcggatttatttactaagatcttttcaaatctaatctgctttggagatgtgaaatgcaccnncaggatgatagcgcactcaggacttgctactgggatcgggattacccaatgattntacagcagaggctacttataaaccgtatccagcttgagtatcttatnnngatttatccttgcag

SEQ ID NO: 48275 - DNA, 257 bp, Glycine max
  unsure (1)..(257): unsure at all n locations
  Clone ID: PAT_MRT3847_14598C.1
attgggtggccttcttttttcagttttccctacctttatactnattctttcttttcccaaccattaaaaaagggccccaaatgcttccttccccccccataaactgtggttttccaaaacgctttaacaaccaggttggcttacttccccccctaaaacaaacaatctttgttccccccccaagggtgtaacctcaaaacccgtgacagacataaccctcccctttttggcttctcttcccccctttatctttcccc

SEQ ID NO: 48276 - DNA, 319 bp, Glycine max
  Clone ID: PAT_MRT3847_14599C.1
tccacgcgtccgaccacgcattctatgtcggggggaattttacgggagcaaccgcgtacacccagaacaccattcaagtgagaatctagtaagcaaaactgttgacaataccctattggaccaacctggcggaggaatctaaggggacaaaaatggaaattggatcacactaaaacaaaactctacaaccagaaacttgaagagagtcgatgctcggaagaacggctggtaaatggtaaatatagtaaaagcaatgggatatgcatcacacaaaagaagagactgaaacctcactgatacaagtgtcttataaacaaac

SEQ ID NO: 48277 - DNA, 646 bp, Glycine max
  Clone ID: PAT_MRT3847_1459C.1
tgagatggtgccaaggaacatgttcaaacagccagatactaatggaattgttagtggagagttgcctaatggaaaagtcacaaatacaagcttgaatatacaggtgactggttcatcacctgaaagtacatcacatcaatcaagcagagctgctcctgctgttgtccatgggcaggagcagggccttagcgacccagttcagttgatgagaatgttcgcagaaagggctcaaaagcaacacacttcttccaatcatttgcttggtgatactccaccagtgacactatcaggtccatctggacagagaaatgaattgggaaatgcttcagcagcagctgcccatgcatggatgtctgttggggcaggagggtttaaacaaggacccaacaattctagttcacccaaaaatcagatatctgcagattctttgtacaactcaacaagagagttgcatcagcatatttcaagaattcggggggagtttccctctggtggaatgcctttccaaccatttcaagcagttgctcctcaacctattcacacaggcgctgtttctcagtttcccaaccggcctatggttttccctcagttagcatctgctgaccaatctagatttcaaatgcagtccccttggcgaggtcttagt

SEQ ID NO: 48278 - DNA, 429 bp, Glycine max
  Clone ID: PAT_MRT3847_145C.1
cggacgcgtgggttgcgatcgaagagagatgggggacggaagtgggaaccggtggagcagggcggagtgggtgcagcagtacgatctcttaggcaaaatcggagaaggcacttacggcctcgtcttcctggcccgaaccaaaggcactccctccaaatccatcgccatcaaaaagttcaagcaatccaaggacggcgacggcgtctcccccaccgccatccgcgaaatcatgctgctcagggagattacgcacgagaacgtcgtcaagctcgtcaatgtccacatcaaccacgccgacatgtcgctctacctcgcctttgattacgccgagcacgatctctatgcatcacagggataaactcaaccattccattaaccaatacactgttaagtctttgctctggcagttgctcaatggactaagctatc

SEQ ID NO: 48279 - DNA, 152 bp, Glycine max
  Clone ID: PAT_MRT3847_14600C.1
caaaaaaaggaatttcccccttcaacgaagttagagagaccctccctagctcctaaaatggtcaaaaccccctttccatgtttaaaattccccctatacaatcgattttcccttttccatccccaggggatgaacctaatccccggccccgg

SEQ ID NO: 48280 - DNA, 446 bp, Glycine max
  Clone ID: PAT_MRT3847_14601C.1
caattttccattgttccagtgtttgacaaataactatgcatagctttcggaaaacttcgaccggttacactatatcccttgccgaggaaacctgcaagaccttgcatcacatgcgcgcaaagatatcactactacgaggggctgctgcctgactagcatatactgatgttaaccgttttatacgtagagattcgccgaaccctagtggagtacttgacacacatggaaatcgctctaaacctagagctctgcctcatgggtggcaagctcacatctgcaaagacttgaacggggaataagatagtgctgaggtcgaaactaccacaccattactgatgccatggacacgatccagcactatgctggtctaactcctgatgaccacacgttgatatacacttttgaagacaccgaggacggcatatctgttgctgatgaccttatac

SEQ ID NO: 48281 - DNA, 251 bp, Glycine max
  Clone ID: PAT_MRT3847_14602C.1
gttctagatcgcgagccgccgcccttttttttttttttaaaccaaagtttaatctttcaaaggctcaaacctaccatgttataaaaaaatccggggcgaaatcaaaattttttttccttttgggctaaaaacatttcgggttaaaaacctgggggccaaggcttgaataatttcaactgcctaaacccccgaaaaaaatggcttaacctttcaaatcctcgggtttggccccatgaaagcgggctggaatc

SEQ ID NO: 48282 - DNA, 219 bp, Glycine max
  unsure (1)..(219): unsure at all n locations
  Clone ID: PAT_MRT3847_14603C.1
tcgaggacccacttaaccctcttcccattatcatactcacttcacctacttcttcctcttttgagtttctttctctggggagactttctcccactcnattcaggaaccaaccacttcttgtaaaaaaaatagccttaaagccaactaaaattaacttttttgtgagtaaataaatgtgcaagatattaggctgagacttaactttctttaaaacttata

SEQ ID NO: 48283 - DNA, 335 bp, Glycine max
  Clone ID: PAT_MRT3847_14604C.1
gcactctttgtttgtcctcagcttctgaactcaaccaagacaaagccatgcatgaaacaaatatgatgaaggccaattctaacttgcataaaagaaagtctagcttgattagtggtggacatccttctgcattcaagaagaggatatcaagaaggggaagctatgaggattctcttgaagttgaaagaaagcagctagaggataattttactacagaagacaattataatgagaatgaggataagaatgatgttggtgacaacacggatgcagaaaaagcaagagatgatgatgatgtagtggatgaccatcaagaggcagcagagtacttacca

SEQ ID NO: 48284 - DNA, 456 bp, Glycine max
  Clone ID: PAT_MRT3847_14605C.1
cgcgcgcgtaggatacacagaaacatagactctgccatggggcggagacctgcgaggtgttttagtcttattaagaacactccataccccaggccacgtttatgacgtggagttcctgatcccaagatcacgatttatgaagttggtatgaataagaacgccgttgatgagttgcctttctgtgaccatttggatagttgggagacggaaattgttgtacgtgaagccctggaagctgatcatattgctcgttacgagtacatgggcaagtttgatggagaggctgcttaatacttgaaagtgactgcgcacacattttatgatcttaggatcaacactatgctttggggggctggtgctgatgggctaccaactggaattacaggatcttttggaaagccagcatgaacttgcgctagagatggctactaggacacgtccttctttctgtgcgat

SEQ ID NO: 48285 - DNA, 276 bp, Glycine max
  Clone ID: PAT_MRT3847_14606C.1
ggctaccatttccttctataaattataaaaacccaagaacataattaaaaagaaatttaaagaagaataagaccaagaagaaatcattcccattttacgtcaaggaaaagtttttaaattctgggtctaatcctgcaaagcccatactttcacaccaaaaaaaggggctaagtttatttcctatgttacaatataggagcaaactctagataccgggcaaaatctgggcaattagttagcaagttttaattgaagccacacaaaaacaatttttag

SEQ ID NO: 48286 - DNA, 221 bp, Glycine max
  Clone ID: PAT_MRT3847_14607C.1
attcggctcgaggatcctcttgcaagtcacagttctctctgagatatgatagtaacactaatgggggagtgagatgtgatgtgatgtggaggtgtgtaaggtgtatacaaaagatggagtgttgtaattcagtggacggggtggtggatgagctaatgaggattcgcagatctcttgtagcacagactgggattcctgagttgaagctgcgaaaagtttga

SEQ ID NO: 48287 - DNA, 510 bp, Glycine max
  Clone ID: PAT_MRT3847_14608C.1
gcgacccgtgtccgtgcgagtcaattccggaattaattcccggactagccggcggccgcccttttttttttttttttttttttttttttttttttttttttttttttttttttttttttttttttttttttttttttttttaaaactaacaaaaacaaacgggattttttggaaaagggcaacggggtgcattcatggggttttggggcccccccacattattttgcaagaaaagggtttgttctttcagggaatccaaaatcccattcttaatggcccctttgcccgtttgcaactttaacaattattttggggggggcaacaaccttaaatatttggccccgggctgaaaaaaaaagcttttttttggcccaaaaaacgggcagcctgaaacccgtttgatatcccaaccctggggatctcaggggggaccccgggggcaaaaaaagcctcaacccatgggggagcaaaattattttgcctggaaggggcccaaaaccgggatttttt

SEQ ID NO: 48288 - DNA, 688 bp, Glycine max
  Clone ID: PAT_MRT3847_14609C.1
catgtttaaatggagccattggaaaggaacagaatgaaatggttggatgatgttctcctggaggcaacaaaaattgaaacagaaaagtggttatttgttgccatctgcctctagatcctggcgcggcaagtgagaagggactgttgtggaattatgatgaggtaatgaatttgatacacacaatataattgtgttaaggtatgtcttgctggacattatcatagaggtggatactccattgattctcatgggatacaccatagagttcttgaagctgctttggaatgtcctcctggtacggatgcatttggatacattgatgtctatgatgacaggatatcacttgttggaactgacagaatgaaaagtacagagatgcattttactcccccaagttaatttgtatgactggatgtgttgatgtttggaagaagaatatttctaaatccttatccaatatcctcatactcgtcttcctacttttttatatggtaagtatcgaatgtatttaatattttcaagacgtcaaatgcatttattttagtagtatgatttgtaggaaaataaacattactattagaagaatacctaatagtaatattttttaattaatcattgatagagtacctataaccaaggggtaccaactagtgctattttttaattaatcgttgattgagtacctatg

SEQ ID NO: 48289 - DNA, 1612 bp, Glycine max
  Clone ID: PAT_MRT3847_1460C.1
tacggctgcgagaagacgacagaagggggcacaggtccagatcttgctgctagtttttaaaaagttaacaaaacctgctgctagtttttaaaaagtgaacaaaagacagcgtagaattattaaattcaaccgccattacataacactacattttttttattcactcactccgttctctgctctttttcttcttctacccccacaccggaggagagaaaaccaatatcactcttcaccgttagggttagggtttcggtttccccctaatccaatcgcgcagcagcagcagcgagatgggcgccaattcgttgtcatcggcggaatcaaccctcgatctcgacgagcagatatcgcagctcatgcaatgcaagccactctccgaacaccaggttagagttttatgtgagaaggctaaggagattttgatggatgaaagtaatgtccagcctgtgaaaagccccgtgacaatttgtggtgatatccatgggcagtttcatgatcttgctgaactatttcgaattggagggaagtgtccagatactaattacttgtttatgggtgattatgtggaccggggttattattcagttgaaactgtaacacttcttgtgtcactgaaagtgcgatatcctcagcgaattactattcttagaggaaaccatgaaagccgtcagatcactcaagtatatggattttacgatgaatgcctcagaaaatatggtagtgctagtgtttggaagatctttactgacctttttgatatctttccgattcggggggagtttccctctggtggaatgcctttcaaaccattccaagcagttgctcctcaacctattcacacaggtgctgtttcacagtttcccaaccggcctatggttttcccccagttagcatctgctgatcaatctagatttcaaatgcagtccccttggcgaggtattattcctcatagccagtcaaggcagaaacaggaaacccttccacctgacttgaatattgattttgaatcaccagggtcacctgtaaaacagtcttctggtgtccttgttgactcacagcaaccagacctagctttgcaactatgatgaggcattgctgtcatggcagggatgtttccacttgaattggactggtcatggaatttgcagcacctgtaatcgaatgttgaattttgatccttgaaggcttgcataataaatgtgaaaatgccaaagtctactcggattggaatttagcacaaggttggtcctgagttggtgctggagatttcggtggatttatcagaaataacttcatggcttaccataatttcctgatgaggattcccgaatccatgcaccatgtctctgttaacctagggttgaagttgtagaaaaagtctgcaagttgattgattatataggtagccggcaaattgcaaaatatattgttgatgccttttatgtatattgtttacaaattgattaaatttggttgcctagatatttcgttccattgatgactaatgtatctgaattagcggtagggcatcacttcttaattgtgctattattttgtacatgagatttacatgttactaatggaaagcgattgcttgtctttttcctta

SEQ ID NO: 48290 - DNA, 366 bp, Glycine max
  Clone ID: PAT_MRT3847_14610C.1
attcaaagggaagcgggaaatttttaagtttttttatgctcacgggcaatcaaaatttagggatagactttaactccaaaacccaagatgggcggggggaccttttttccaaacctggggaagtcaagtgggttcccaaaaggccactttccggggggtgttgcaaacaaaattcccccaccccctttgttgggatcagcaaatgaaactttacaaactcttcaataaaacacctttggccttttctggggggaggggggcacacggaataaaacaggggccttgtcggggtggcattgcaaacaaccttacattttaaattttgcaaaaaacaattgacgccggctccctaataactttttggga

SEQ ID NO: 48291 - DNA, 492 bp, Glycine max
  unsure (1)..(492): unsure at all n locations
  Clone ID: PAT_MRT3847_14611C.1
ttttctcctaactttgagagcatgggtaacttctattttttatctctgnccccntttccttcatcttttcttcaacctttattcgttcctttttcaactgttaaaaggcctgactatgttgaggaaattaagaaaatgggtttgttgccgatgcgaccaacaagcggtttttacatgttctcaccgttagcagaaaacgggtgttatctggataagaccgccaggaaccattcccaagtttgccagcaccaccatcacttcttcactctagtatccggtatggtgagattaattaatatataaatgatagatttataccttctcggatttttttttcttttgctgagttcttggcataaattttggagggattctgatgtgacaaaatataaggggtgtttggttgaattgtttttttatttttattttcaatagaaatagaaaatagtgataaaaatgtgtttggttgaatttttgttttcattttcagtg

SEQ ID NO: 48292 - DNA, 461 bp, Glycine max
  Clone ID: PAT_MRT3847_14612C.1
ggtaattttttttttttttttttttttttttttttttttttcaaaaataacacgatccccttaagcttttcctttgcacaccacctaataaacaaaatccaatcccattttcacatatgatggaccatttgacagccacactcacttgtctttggaaccagggggcatagcttatataacaaattaacaatgcctttatagttgaaggcaaaggttggaattataaaccttacaaaatcttaaaaacaagcttcaagaccctggaattcattaaaattaaaattaaaaaccggttttcaaatagcttaaaaacatttttatgtggaaaaaacacatgatcatggagcggtccatatccagatgtgttcctcacctgaggccaatccaaaggcaaatcagcaaacaccgggatacaaatttgctccttaacaacgactgaaagcgggctcctccttgggaat

SEQ ID NO: 48293 - DNA, 513 bp, Glycine max
  Clone ID: PAT_MRT3847_14613C.1
acaaaagaatgtgatatcatgtaaaagaattaaccatgacattttatttacatctcttaacattaacttaaggattaaaacatgagcctaagatgagaaatgaatattctgctaacaatattctattctcaatttggcagcataaggctgaaaacagacactgaagaagtacaagattaaccgtggaagagactacaacatgaaaaatgataaacagcttcaaatagaaaagccagcaagaagcattcagaatgaaaatacaatacagaaccaccgaccattaaaagtatttacaaccaatcatgatcacctaccatctgctgatgtgaaagactccacaaatccattcggacgcgtaggtatgcttgtatgagtgttatccaagctaggaggtaggagtgatgaagaagaagattccatttggcttctaccttcataagcctgccacttcttcaatgcttgtggtaaagacatgcctaggtcaatgccatatacatcttcagaactttgatc

SEQ ID NO: 48294 - DNA, 346 bp, Glycine max
  Clone ID: PAT_MRT3847_14614C.1
gggcggccttttttttttttttttaaacaggaaaaaaacgggggttaataaagagacctgatttaacggcggagccggtaaaaaggggtaccagcgactgcccgtattccaaccccacttgaaggccctgaaaccagcgggcttaggttggaataaaccgggttttttttgcggggcgaaaaccacaaaccagccccttggccttgggttctgcagaaataagacccggcccgggggaatttggaaaattcatttaatacgggtggcaaataaaaggagaagaacctggcctcctccaaaaaatccggggttagaaccgcaaaaaacccccccaagctgaaaaagg

SEQ ID NO: 48295 - DNA, 240 bp, Glycine max
  Clone ID: PAT_MRT3847_14615C.1
atttgtcttcctcagtagtgtcatttacgcttctcttctcttcagcaactatgcctaaccctaaggtcttctgcgacataaccatcggcggtcaatctgctggccgcatcgtgatggagatctacgcctactacactcatcgcaccgacgagaacttcagcgcgcttagcatctgcgattatggcgtagtcgtagcagtaagagctctactataagggttcgttcttctactcgagatcc

SEQ ID NO: 48296 - DNA, 474 bp, Glycine max
  Clone ID: PAT_MRT3847_14616C.1
tgcagactcacgctttcttggcttcatttgcgtttggctttgtttgcgaattcgctgtctcactgtgacagaaaaagtgaaaggaactgatctactcaactggggaatgtttatgctcagatctttatactaaagttgatgcattggtggaggaggaggttggtggaaactctgtagctgatatattcaagcaacatggtgagactttctttcataataaggagaacagtgaagccatgatttcaattgacatgccggccggtccatctgaagttttggtcattgcagacaagcatgcaattccttctcatgtagctgctgatttgctttcccagagtcaaacaatcttaccatggcaacaacacgataacgtagaagctgcgactctttgccatccatcttagtctcatgatgagcatggtggtgaccatggaaatgccctaagttaacagcacccatctctaaaatttcctc

SEQ ID NO: 48297 - DNA, 306 bp, Glycine max
  Clone ID: PAT_MRT3847_14617C.1
acccacacccacctttccaccaacatccccttcctcacctccccatgctaccatctaaacctgcggcacgtccctcccatccttccaccccaattcccctctccacttctaaaactcctccctccaccactccaccatactcccctacattcactaattcttcataacatccattctatactccctcacccaattatcctaccaaaccctaaacccatactccaaaccctctatatttcctacttccatctaactcctacaatcatcacccatctccaacaaccaccactaccacttccacaccca

SEQ ID NO: 48298 - DNA, 355 bp, Glycine max
  Clone ID: PAT_MRT3847_14618C.1
cctcataccaagggggagaagatgtacacctataccactccaagaaacactgctttattacactaactctgctttgaacactatcattacaccaccacgattctttacccctagggccagaacctttaaattcacccaacggctatctcaccactgtaataatatattgggacgtattgttccacatatcatctgcactacctggtgattggacacgccatccctcccatatctcccgctggaagataccttggtcatgaccctccaagtgccaccattagatgcttggtgctaccataggacttaaactctaagccctatctttaatagttacatgcataaccaagacagcatg

SEQ ID NO: 48299 - DNA, 328 bp, Glycine max
  Clone ID: PAT_MRT3847_14619C.1
attttggcatcctatgagtttttgtgtagtaaatgcttaaactatttgagttatactcttttggtggtatttgttttgaagaaacacagataagggattggaagagaagttgagacctgaagaatttcgcttagcacccaaggtgttgaatctacttagcgggaagatcccgcttagcatgaggaagttgcttggagaacttgaagtcacgtgaagacgtgcttagcacgaaatcacgaaaactcatagcaaagtgatgtttaagtgagaaacaaggggggaaaacgagataccgagctgaaaaaacctaagcttataaatttgaacc

SEQ ID NO: 48300 - DNA, 1365 bp, Glycine max
  Clone ID: PAT_MRT3847_1461C.1
ggctcgagggataaattacgtgtatacttgatttcggggattgacagtatcagagacgaggttcggcttctgcaatcaatctacgagggattgcaggaagatccaagggaagtgaagggatacagaaaagaggacttcaggattctgtgggtcccagttgtggatgagtggaatcttctgcacagggccgagtatgataacctgaagcttgaaatgccgtggtatgtggcggaatacttctaccccttggccggaataaggctcataagggaggacttgaattacaagaacaaacccatcatccctgtgctcaaccctcaaggaagagtggtcaactacaatgccatgcacatgattttcgtctggggcatcgatgcattccctttcagaccctctgatgatgatgtcctcacccagaaatggaattggttctgggcagaaatgaagaaagtcaatcccaagctacaagacctcatcaaagcggacagtttcatcttcatctatggaggcagtgacaagaagtggctgcaagatttcactcagacagtggaaaaaatcaaaaggcatgagataatcaagagggcagacgcggtgatagagcactatccattcggaagggaagatcacaggatcgttcctcgcttctggattggcatagagagcttgttcgcgaacatgattcagaagacacaaaaggaccctaccattgaagaaataaagagcttgctctgcctcaaacagcaacaacccgggtgggttcttctcagcaaaggatcgaacgtgaagctgttggggggtggggacccaatgctggccactgcagctgatttcgagatatggaaggaaaaggtgctggagaaagcagggtttgacgtggctttcaaggaatactatgagcagaagcgtcgcaactaccctcaggaatgctcgcacatgcagttggctaactaccctgctgatattcttcacccaattaactgccctgatgctgcttgtggcagatccatggagatagcttctgtcagttacaagtgctgccacggtcaaacagctcatcacaaggctgaagttccagagagtggcgatgtcatgattgagaagaagctctacgcttcttaattgatggatccatccacgagtttgttggtgatttttctggaggagcctctattttcccagtttggaattcaattgtgtgcactactttatcatttttacgtttcggctgttgtgatgaagcctcttctgtgctgcccttgtatgggttgaaaataatggcttcaaacagcgtctgtttgtcttactgcaattgactttgattcaattaaagagaaacctgttgggcttccccaaaaaacaaaaaaa

SEQ ID NO: 48301 - DNA, 275 bp, Glycine max
  Clone ID: PAT_MRT3847_14620C.1
gaactacctccccaccatcaacacccaaagctgatattctacttaaactacttcttgtcagtacataaaatgatataggacattaaaacatttatgtatatcgtacattaaattattttccccaagcatataagcatgtaatatatatctaatgatttaggacatacatttaaactcaactataaattcacaacaacatgtctattctcaaatacattaagataatgcttattagacatatctgtgttattagacatgcaccattaagtcataaa

SEQ ID NO: 48302 - DNA, 1183 bp, Glycine max
  Clone ID: PAT_MRT3847_14621C.1
ggtttactgtgcaggtatttgatggacacggagggaagagcgctgcacaatttgttcgtgatcatctgccacgggtgattgttgaggatgctgacttccctttggaattagagaaggtagtcacaaggtcatttttggagattgatgcagagtttgcaagatcatgttctaccgagtcttccctgtcttctggtacaactgcactgactgcaattatatttggaaggtctttactggttgccaatgctggagactgccgcgctgtattgtcccgtggtggaggggctatagaaatgtccaaagatcacaggccattgtgtattaaagaaaggaagaggattgagtctctaggtggatacatagatgacggttacctgaacggccagttaggagtgactcgtgcactaggtgactggcatcttgaaggaatgaaagaaatgaatggaaagggtggaccattgagtgctgagccagaacttaaattgatgacattaacaaaagaagatgaatttttgataattgggagtgatggaatctgggatgtttttcgcagccaaaatgctgtagactttgctcgaaggaggcttcaagagcacaatgatgtgaagcagtgttgcaaggagataataggggaagcaataaagagaggagcaacagacaacttgacagtggtgatgatatgtttccactcagaaccaccacctcctatggttgtagaaaggcctagagtcagaagaagtatatctgctgaggggcttcaaaatctcaagtgcttgctagaaggataaaacattcttctctgcaacacaaatgattctttttttgaggtgagattatgtacataaattcatccgtcacactaaaaatgtcattctacttcctgttgttgctgatccctgaggggatggagtaaggaacacaccaagatggcaaattcaaataaatttcataccatcttataattattttcccccttgctaatgtgttaatgggaaagtgataaacttgaattatgtatatcttgtaaaaatgttatttatgcacccaacaacctcgccccgtcctcatttatttttttgttgggcaagctcctcattgtggatggattttgtgtgtttgtgaaaagccaacaaaatgatttgtgagtgaggtactcaaaatgagaatttccaccttaatcttg

SEQ ID NO: 48303 - DNA, 1644 bp, Glycine max
  Clone ID: PAT_MRT3847_14622C.1
ccgcggcccgaagaccgcagcaggttctcgcaatcttctctctctctctctttctatctctctgtggtgtaagcaacaaaattccatcaagtgtgatctctaaataatatgtggagttgtgtgtgtgtggagtactcttacttgataattttcatgtctgcaattgcaagtgcaagtgccagttgctgagttgaacgtgccactagaccaaaaagtgtttttgttgttgccaccatgtgtgtgcaagatggtgaacaagctggtgaagatcatatagagaagaacgttgataacagcataagagtttcatggcctttgcattgtgatctcttgaatgcccacatggataacaaggaaaaagactcttcttttagaactccctctgaccagatcagtgttgcaaattcatctcctctggaaagcatatgtgaggatgcagaaattgtggacaaaaaacaaaacttaatgaactttgtccctactcttcggtctggagagtggtctgatattggagatcgcacttccatggaggatacacatatatgcatcggagacttggcagaaaaatttggcaataacgaactttgcaaggaagctatttccttttatggtgtatttgatggacacggagggaagagcgctgcacaatttgttcgtgatcatctgccacgggtgattgttgaggatgctgacttccctttggaattagagaaggtagtcacaaggtcatttttggagattgatgcagagtttgcaagatcatgttctaccgagtcttccctgtcttctggtacaactgcactgactgcaattatatttggaaggtctttactggttgccaatgctggagactgccgcgctgtattgtcccgtggtggaggggctatagaaatgtccaaagatcacaggccattgtgtattaaagaaaggaagaggattgagtctctaggtggatacatagatgacggttacctgaacggccagttaggagtgactcgtgcactaggcgactggcatcttcaaggaatgaaggaaattaatggaaagggtggaccattgagtgctgagcctgaacttaaattaatcacattgacaaaagaagatgaattcttgataattgggagtgatgggatctgggatgtttttcgcagccaaaatgccgtagactttgctcgaaggaggcttcaagagcacaatgatgtgaagcagtgttgcaaggaggtgataggagaagcaataaagagaggagcaacagacaacttgacagtggtgatgatatgttttcactcagaaccaccagctcctatggttgtagaaaggcctagagtcagaagaagcatatctgctgaggggcttcaaaatcttaagtgcttgctagaaggataaaattttctacttctcggcaacacaaatgattctttttgagcttagattattatgtacataaattcatccgtcacagtgttgctgatccctgaggggatgttgtaaggaaaacaccaagatggcaaattcaaataaatttcatgtcatcgtataattattttccccattgctattgccttaatgggaaagtgataaacttgaattacgtatatcttgtgaaatgtaatttatgcatacaattaacatcgcactgtgctc

SEQ ID NO: 48304 - DNA, 202 bp, Glycine max
  Clone ID: PAT_MRT3847_14623C.1
acgatttttgcgcaccctaaaattgaaaaatggaattccttggaacatcaagtccttggtgctgcaatttgggtcgaaagatgaagaattggcgaaggagggttggaggtggctatctaagattgattttcagggaaatgttgcttcaaagggatcgtgactcgcgatttggaagcggcgtaaaggtggaaaggaaatgaat

SEQ ID NO: 48305 - DNA, 332 bp, Glycine max
  unsure (1)..(332): unsure at all n locations
  Clone ID: PAT_MRT3847_14624C.1
gngggggttaactctttttttttttttttttttttttncccggccccaaaatttttatttaaggaaggagcaaactgttttacaacctcgcaaagaaagggacccttgaaaagctttgtataacccaaaactgatgccttcataaaaactcatggtttatactcggggcccaaaaataatgcccgaaaaagggtgtaaaaaaaacaaaattttttttattttccctcaccaaaaattaccaaaaaaagcaattggggaccctacatacccgcttttgggacaggcaccaaattttacaaaaattttttccttgaaaaaaaaaatacgtgggc

SEQ ID NO: 48306 - DNA, 354 bp, Glycine max
  Clone ID: PAT_MRT3847_14625C.1
acgcccacgcgtccgaccacgagtatgtccactacgtaccaccacgcgaactagttttccaggtctacttgttcattaagaatgttccaaatgctccaatgcaccctattgcagcgtcggatgcagatgagaaccttttggggtactgacacgctccacgtgtgcaagaagcacagtgctctaatgtagttggctcttgcatacaaaatttctatgaatatattgggcgccctgagagatacggttattagatacgaccctgcatactagaaggctccagtgattgctcacagggagcatgcaatagcgaactcactgcggagggctgaatacatccatgagacatggaataac

SEQ ID NO: 48307 - DNA, 333 bp, Glycine max
  Clone ID: PAT_MRT3847_14626C.1
agaaccacacgggtatacccgtatttctgggatatattttttacatcaaatgaacccaaaatgaagcatgcatttagtacatacttgaacttatttaaatttgggggggacaaaacgacttttgaaagaaaacaaattaacaattgccaaccataactgggaaaatgaaacactaatctttgtaatttttatcacaaatctggaattattgaacggacgtccctaattaactcaattgatttttcaagggttgttgggttcaacatgcttgaaaccacccatgtcacctccaacaccaccaatagggccttcaccacctttaacccctccaaa

SEQ ID NO: 48308 - DNA, 499 bp, Glycine max
  unsure (1)..(499): unsure at all n locations
  Clone ID: PAT_MRT3847_14627C.1
ccggaaatatcgaggttgtatttgttgcatgggggagaatataactcaacatttcgatccgggaaagatagattacatacacacacttaaatgtttctggttagatctcctgaaccttaagaacaatccataccaaaacgttaacatgttcgctttttttccttacacttctattgtcaaggcctgcaagtattaatgttaatatttaaagcctttttaagttttttttttgaataaattttaaccatggagttcctctatctccataatgcatgcaagttgcccaaggcatctgcactaccggcccagttgccagcaatataccaagtagctctccccacccttgtgtgagtaggccgggagaacagttaacaagtctcctggtaggcagcagaagatcttgaacagaagaggtcccacgatncgaatgtctcatgttctcattcnncgggcaataaccaagtgaatcaganngcactatttttaaacggcaannacc

SEQ ID NO: 48309 - DNA, 501 bp, Glycine max
  Clone ID: PAT_MRT3847_14628C.1
ctaggctggagcggctcgagcttttttttttttgtttttttttttctttttttgtttattgctttctttcttgggttttgtttttggggccccaaccgggggtgctgggattaaaaaaaaaaaccctaccccgggggggaaaaaaaaagaaaggggcctttgcgaccgcgacataccctaacgggtttcagtgcccccaaaaaaaaaactagggggataaaaaaaatcgggacctttttggtggcccgggggcttataccgtccccgccccttgtgtaactgatcccacgcagaacgaaattgatgcctttctttttccacaaaaaggggggctgcaaattcctgtttggggggattcattccccatggagccccgagctttatggtcctgcgcgcggtgtcccccccgggggtgttgcattgaacccatggacagccggatggggggggaatccttcgggcctttcggaaaaagattctttgaagttaggggccgggaaa

SEQ ID NO: 48310 - DNA, 393 bp, Glycine max
  Clone ID: PAT_MRT3847_14629C.1
gccaaacgtacgctcatgctagagttttaaaaatggcagcagcctccttcatggctctctcttacccatcctcggatggcaaggccgtgaagctgggcccataaaccctcgaagtcaggagggtcagcatgaggaagaccggcaccaagcatgcctactacggaagcccatggtacggtccagaccgcgatgagtacttgggcccattctctggcgagcccccgaactacactactggctagatcccaagtgactacggttgaaacactgctcggctttctgccgacccataaacctttgtcagaaaccgttagcttgaagtgatccactccaagtaagccattgctggggccttgggctgacgcttacccgaactattgtcccgcaaccggg

SEQ ID NO: 48311 - DNA, 475 bp, Glycine max
  Clone ID: PAT_MRT3847_1462C.1
gttcgggctccacaggttccgtgagtgctaactcatccatggaaggtgggccatgctcgtcactctcggagctctcactgctgagtgcctcactgctgttacatggtatgacgcctgaaaggtcgagctagcataaaggtcatgatacctcgtgcaaccacttccattctcaatcaccacactgatctggatcgaggttctcgtaatgtgctacatatagttccagaggaatgcagagctcgacccagagaagaggttgtacccatgtggcagatacttcgacccatagggcctgtcctcagacccatagaagaaagccactccttaattggcggagatcaagcactcccgtcttgccatgatgggcttatagagcgtaggaaactgagcctgctgctccgtcgatgggcaggtacacaactgcgcgcaccacgtacatgaacaactccacacggccattgttgaaagcttttca

SEQ ID NO: 48312 - DNA, 649 bp, Glycine max
  unsure (1)..(649): unsure at all n locations
  Clone ID: PAT_MRT3847_14630C.1
aacagtgtctacgcgtgctcgtgaatttcacatcacaaaccccactttattttctaaactcagatatcacatgcgctatttagcgcaaacgctttacgcgcgcatatatagaaaaaaagaggggctctcatctctctggggtgcaaaaaaaatatttctttttgggagtgaccccacacacaaaaaacccctagcgcttatttaacactttactcttatcatataggcccagttctcgtggacactctctctttatatacaccactctcgcaagaccccgtgccccctccacatcagggcacccccttataaaaagagaaggggctatctgtggcccccacatacacatacacagcccctcaacacccagagcgccatctcgtgcatctcccccaagacagtggtggtgtgggctcttttnntatcggnnatgggaaaaccctctgtgctgtgtatatcgcgcgcgcacatcccatcagaggcgctggtgagnncaagagactcaagagagctgtggggagatatgagactcgtgnnngggacacaaaggggggggcacannntgtgcccagacacagtgataatatcccgtgnnnagnnaagagcgctctatatgccnnnncannnncccagtctgagacccatgaga

SEQ ID NO: 48313 - DNA, 1135 bp, Glycine max
  Clone ID: PAT_MRT3847_14631C.1
acgacccacgcgtccggttgcctctgctgcaacagctttctgtcgcaaattgatgatatttgggtgttgatgcgcttctgtcatttggtttagattcaggatgaaaatgtcactggtttggcctctcttaacgaggcgaggattcagcacaagctctgagaatcttgttgcttctgtgctctttgagagattgccagtggtcattcccaaaattgatcctgtggtttatgcatttcaagaattctcgtttcgatggcgacaacaatatcaacgcagataccctgatgaatttcttgacaaatctgatgcaagggggaaaggtgattatcagattgactatgtgccagcaccacgaatcactgaagccgaccaaagtaatgaccgaaggtcattacaaagagctcttgacagaagactctaccttcttctctatggtaatgcatatggggctccaagtgggaagcctgtgtggcattttccagagaaagtttatgaatcagaggacaccatgcgcaagtgtgcagagtctgccttaaaatcagtcataggagatctttctaatacatattttgttggaaatgctccaatggcccatatggttgttcagccaacagaaaaccagtccggatccacatcttttaagcgattcttcttcaagtcacaagtaattgctaaaaacaagttcgacatcggaaaatgtgaggattttgtctgggtgacaaaggatgaattgacggagtattttcccgagcaagccgagtttttaaataagatgatcattagctgatgaaagtggagaacagttgtttaattgaaatttttgccagttagttcctagaatgacagtggagggccttgcaagaagatcaatgtaagataaagtttctgggcacattggaagatttcgatttaaagttaaacgtgacatctctagttttggagacttgtccgagttaatggatgctggaaggcttttttgtttaaaaacgtattttgttgtttcttttaatttgccatagctcttcttgtagttgtactgtaataaataagttgcaatggtgattatgacgatttgaatatgtttcccaattttgttgatatagtttctgtttggataaaaaaaaaaaaaaaaaaa

SEQ ID NO: 48314 - DNA, 407 bp, Glycine max
  Clone ID: PAT_MRT3847_14632C.1
cccacgcgtccggcaagcactagagcacaggtacttctcatctgcacctctgctcacagatcctgttaaacttccaagacccgctcctaagaaggaatctaaggtttcagatgtaatttcaaacgaaggtcctactgtcttgtcacctccaagaaagtctaagagagtaatgccagggcgtgatgggtctgaaagcaattctttgcaaggagaatagttcgatgacaggtgtggtagggtcagacaagccacttgtggatatacgggcaagaatgaacccagtccacatggcactagaattttctctttttggattaaaaccctccaattgaactattattaccaatgcttaccgaatacatttaaaaaggaaattagatccaaaattcttaccgcccaaaccaatg

SEQ ID NO: 48315 - DNA, 340 bp, Glycine max
  Clone ID: PAT_MRT3847_14633C.1
attgacttcaacttgtgtgttcatcaatcatcacaatagtaatattaatatttggcatttgatttgaatcgattaacatcgaataaaaataataaggatggtgctgccactgctgaaactgggaactctggccgtgacaaccctaagcatcacccgtggcgagcatactgaatcagcaagccactcttcatcctatattccgcgaactcatcgttagaatggctcattctaatcatcacatcactactaagatgcaaatgcgcatttacagtgactccacagacgttgagattcaccccttgaacgaggaatatgccgttcacaccaccgttgaccttat

SEQ ID NO: 48316 - DNA, 379 bp, Glycine max
  Clone ID: PAT_MRT3847_14634C.1
cccacgcgtccgcgctctgataacatcaggactagtatttccgctcagatgaccaaacagtaggctgggtgattctaccaagagaggcagacatacttataatgatcatgccaatgacattgctcagaataccaaagactactccagtgacacatcttcatagaaccaacgaaaaacttcaatacattacatctgaagctgatcaatacagtacagataaagctcgagaaataaaggatgcaccatcacataatgcaagtcacatacctaatgctatacatcaaaaatcacattacttgataaagacattattaaaacatcaccttaattccgatctttgaaaatctatatgtttgaatcacttactaccttttaatta

SEQ ID NO: 48317 - DNA, 484 bp, Glycine max
  Clone ID: PAT_MRT3847_14635C.1
caatggttttaacttttaagtgttttaactatataaagtgcgcaagtaagccttacttgttccttttatgctaacatactgacaaggagtgttctagttttcgtttccagcacaattttgaaaatgcatgtatagtacctgatgtagcatgcggatacggtattggatcaagtcgctgtgtattaagaactgagcgggatggattgtaaaaaatatatgatagtttagttcgctggcgtatatgttatgatgatactgcttgcgtgtatatgcatggacattgctattggtttaagtgtttggattttagggttcgggaagtacgtctttttcctcttcacagagggaagtcagtgacaatgcaagaaccaacatcagcaacagtttggtgcacgctcggcagaaatcaatgaaacatcagagttcgaatgcatcttataatggtggccacgctcaacactctgtgccccaggtctcgatagct

SEQ ID NO: 48318 - DNA, 261 bp, Glycine max
  Clone ID: PAT_MRT3847_14636C.1
tgtgacatctacgtcacaaggtaatgatcttggaaatggtcatggtatgatggcaaatcttggaaatggtctctttgcttgcgaggataagattatgtacatctaccctcccagactcaaccacattagagccttgcctcttggccatccagcccatcgttttcttatcatgactcatgacaactttacttgcttgcatacttcattatgttacttcctaaaccctggcaattgaatctttattattggctcttctacttc

SEQ ID NO: 48319 - DNA, 192 bp, Glycine max
  unsure (1)..(192): unsure at all n locations
  Clone ID: PAT_MRT3847_14637C.1
tctaaaggagtatcttttcgggtatattgagaagctgtgctgaaacattttgggagttcaattagctctgatccgagggtgctcaaaactcctttnaactattaaagggtcccagtttctggctattgtggatggttccttcttagattatcactccatgatccttttctttcccttaacatttaagcacct

SEQ ID NO: 48320 - DNA, 336 bp, Glycine max
  Clone ID: PAT_MRT3847_14638C.1
tattctttttttcaagtcccttcttggggcgggtcgaaactttctaaataagcgtggatatgactctcatgctaactctgattgtgaaacaaaaaacacacatacattgccttcctgccaacaataggggggcctacatcccttcaaaaccaaatgattaacaccgtcaatgagcccatccacccaccactaacctacttgtaaaatactctattgacataaaaaatacaaaaactttctatcgtacaaaaatgacatgagacgatcaaaacaccctccggagtaatccccgcatccccaaaaacctggcttggattcgatcggtgtattggaccc

SEQ ID NO: 48321 - DNA, 422 bp, Glycine max
  Clone ID: PAT_MRT3847_14639C.1
gctatttttggatcctctaactgtacatgttaatgattaaatgttatgttcaaatgatgcaggataaggtcctacaggaacaaaataacactctcgcaaagaaggtaattaatgtattttgtatttaatcaacaactttagttgactctagttagtttggactttggatactaaatgtatgtttggattcatgttttaacacctttttagataaatgtttatataagcatttatagaagaagaaataaaaaaaatattaaaatttaaaataaacttatagaagctaatatgaaaagatttctataaaataacttaaaataaattaatttaaacttataaagaaatttaatttttttcatttgtctttttcttataagctcttatgaaaaaatgtatccaaacagaccttaatctttcagtgt

SEQ ID NO: 48322 - DNA, 298 bp, Glycine max
  unsure (1)..(298): unsure at all n locations
  Clone ID: PAT_MRT3847_1463C.1
cctcctgagcagcggccgctttttttncttttttttattttcccctgcggcacaaacactattgttgttatttataataatatcctccgagggaactcatgccacggaagccttataattagtttttaaggattaacgagtgattcccctaacttgaattattccaagaggccccacttggaggatataccaagaacacccaagcaaccaccctgggtggggacatgatgcacaatcatgactgaaaaggccaggaatataattattaacacatttctcaaacgtctggattcatacc

SEQ ID NO: 48323 - DNA, 538 bp, Glycine max
  Clone ID: PAT_MRT3847_14640C.1
cacactttctcttcatgcactattatatatagctgtgaattttgttctgttccacacagccatattaatttgttctttcttaaatagtaagttgcagattataagacaaaattatttctattcctctgaatatttatatgatattacaattaaataaaattgataacactttgctgatgggttttcgtgaaaaaaagacaagctgataatttattcaaagttttgacttttgcagttttgccaaatttggtagggagactgcagtctgtcattgaattcaaagattttatggcactatgtgaagtttgaacttctagtgtttttcacttttcagcacctttcttttctccttatgtttcatttcatccagcttaattaggattttgatcgagtaatttcatcatataatagtattttttctataattcattgttactgccaccatataatttcaatgttgtgatgtgaatttattcaaaataatgagacctcaaaagctttaatttcattgaataatcctagtacatttgtaactagg

SEQ ID NO: 48324 - DNA, 246 bp, Glycine max
  Clone ID: PAT_MRT3847_14641C.1
gactgagtcttacttcaccactgcaatactgcaagcgtactattggctgcaaccttcccacaactacacaactttacaggactttaacatgctagagccaaatctaattggatagacatatattaaaaactaacgacaggcttgatttttttttaaagcgaatgcataaggcaattcatattgcataaacattttaacatgtaatgtctgcttacataattctaaataaagtggatgcgaaatgaa

SEQ ID NO: 48325 - DNA, 149 bp, Glycine max
  Clone ID: PAT_MRT3847_14642C.1
acagccttcctaaactgtcgccaggatgttattcatgaaatcacatgcctgatcacagtgtcgcacataccagggatattctacctcacgtactgttgcttccaataatacaactaaggggaatgagaacaggccgattatgttttttc

SEQ ID NO: 48326 - DNA, 152 bp, Glycine max
  unsure (1)..(152): unsure at all n locations
  Clone ID: PAT_MRT3847_14643C.1
aatatatctcatnctaggtgatgtatcatgtatgtaacacaatanatnggtacgtangtctannananagttgcatctcctcatggttatccntagttctgnaagtatctcctaagaagacaatcatatgtactgtacgnagtgtgaagata

SEQ ID NO: 48327 - DNA, 423 bp, Glycine max
  Clone ID: PAT_MRT3847_14644C.1
cttcaatccatgctgttgtgatggctaatagtaataattctaatggcaatggtgcgaggaaggagagtgaagacgaggaaaaacagatgcagagtaggatgcagcatcccttgggtgataggtctacaaatcagatgcatagagtggtcacaagtaccatggcaatgcatgctgccaacaagaagcagcaacaggttaatggtggtaatgggaagcaaagctattcgtattccgggattaacatgaaggggagggaaattgaggaccctgataataaggcttacatgaaagcaatggcggctagggcgctccggcagctggcaaaggggaacgcggccatttgtcggatcataacagattcgagggcgctgttgtgcttggccatactgcttgaaaaaagaactgaggatgtgatgtacaact

SEQ ID NO: 48328 - DNA, 263 bp, Glycine max
  Clone ID: PAT_MRT3847_14645C.1
aagcttagagaaaagagatatgttggtagcaatttcttggaaaacaaaacaaaacaccaagatttgttagtgtgtgtctttaatttgtacctttcttcagtggttgaaggtgaccagaaaataccatagctcattgaatgcttctcactgcaacagctagctgtgtgcataggttcttttgcatcttctcatgctttggactcccgttgttagccatttctagtagctttgaaatgtcatatatcaaaagtgcataggactgt

SEQ ID NO: 48329 - DNA, 2114 bp, Glycine max
  Clone ID: PAT_MRT3847_14646C.1
cccccctttaaatgtaaaacccattcaaccccccaatataaaagatttttttagggggggtcaaagggtcccccttaaaaaccctttaaaattgggaacccctaaaaaggaagccccccctttttaaaaacttttcaggggaaaaaccggcaacatgttgctaaaaaagaaggggaaaaaaccaaaaaaacgcggggataagggccttgcaaatgaaaaaggtcccctttgggggtaacccccaccccccccgcgctttaagggccgataaaagggggggtccatttgccatttagggttgggaaatttttggaaaggccaacggggagggcctttttgcttttaagccaacttgggaaaaggggattttcttccaagggaattaatttgggtaacccagggtttttcccattccagagtttttaaaccccgggcaataaaattaaatttgggggccccaaaaaaaaaataaaaacttgcaaacacggggaaataaaatttgatcccttaaaacggcccccccttttttttttttttttttttttttttttttttttttttatttttttttttttttttttttttttttttttttttttttttttttttttttttttttttttttttttttttttttttgattaaaactaaaatactaaaaaggacctcatcatggtaaatgtttcctcactgtcttgtacaaccatattttactttagcaccaatactagtaacactcaagatgaacattttgatggagatcaaaaggacataaggaatttaatcaatttatacacaactttagtacacaagttgtggttcaaactctgccaaatctacagaccctgactcaattggaggcattagatatgtagccaagagttcagacaccaaggcagcaaccagtgggatcctctttaagttcttcaccaccgctatgtcatcactctcaccaacagcaacaagcttctcatttatctccaccatccggtccaacttccgcttgaactctgggttttcaacatcaagaacggctgggaaaatccgagcagttgtgcggtttgtctcgataatgacatgcatgtcaaattcttttgtgttaagtccaatgccttcgtagaaagctgtacgttggcaatcattgagatacattgtgacataaaccgatagacagaagaatcgagaccacaactttgccttccagtcatttagaaattgtggctgtgccttcatcagggcagagaagaaatctccatgtctgttctcatcctggcaccagttctcaaagtacttaaaaatgggataacattgaaactcagggttggccttgagatgtctgtatatggttatgtatctccagtacccaattttctcagacaagtatgtagcatagaagataaactttggcttgaaaaatgtgtattttctagctttggtcaagaaacccaagtccagagccaaattgaaatcagataaacccttgttcaaaaacccagcatgcctggcttcatccctagacatcagtgagaaaatctcagccaccacagggttggttttctttagcctccttccaagctctttgtagagaaggaagccagagaattcagcagtgcaggacctctcaaggaactccacaaagatctgtctgaggggaccctcaagtttgtcagcggcttccttgaactccttgttcctgacaaagtgtgtctggttgtagtcagtcttgaactcctggagcagtgcctcaaactcatcctggttgaggtttttgttgatctcagtgttgaagagtgtctccatctcatcaaagtcagtggtgtagaatcttggagtcaagagggtctccttgatattgcccttcttgttgcttgcagctggctttgtggaggtggagggtggtggtggtggggtggcagtggcagacattcttattatggtgctgaatttggaggagtgtgatcccattctggggctgctgccaaatttgggagtgacattggaaattggtttcacaagagctgccatgtgaggggaattaagaaaagttgaggttggggcgggggggcgaaggaggagcatgaaggacaagaaaaagtgagtgagggagttttagc

SEQ ID NO: 48330 - DNA, 157 bp, Glycine max
  Clone ID: PAT_MRT3847_14647C.1
ctatcaaagccatgtgtgtgtgtgtatgcgcgcccacgtgtgtgtttaaacctcttttgtaataaactgagggtgcctgttttttttaaactcaagaatatttagtggtattgtaccttgcattgtaagtactctgtgatgggaactgataataatt

SEQ ID NO: 48331 - DNA, 166 bp, Glycine max
  unsure (1)..(166): unsure at all n locations
  Clone ID: PAT_MRT3847_14648C.1
anaacgagancgnaaactgagcatgcaatcgatccgaccantgattccttcatttgttcantttcccatactccgaaccgacacctcatttcactgattttgcgggtgattatgattctggtctagatcttagaagcagcaataggnanggataatnangcnaagt

SEQ ID NO: 48332 - DNA, 190 bp, Glycine max
  Clone ID: PAT_MRT3847_14649C.1
gattagttagctacgtgtcagggagtagttgtgtgcatcgaatgttcctatgaatggaacgcgtgctttaagtaaacgctgtagcagtcaaagtgggaatggatatcgattgggatggatttgcgaagttactgatctccgattaagatcataggtgtgctcaaatgctacgtcgcactattcgacgatg

SEQ ID NO: 48333 - DNA, 2066 bp, Glycine max
  Clone ID: PAT_MRT3847_1464C.1
gattacataaaacaatcaattttttttttcactaactccgctctctgctcttcttcttcccccacaccggaggagagaaaaccaaaatcactcttcactgttagggttagggtttcgattttccccttatccaatctcgcagcagcgagatgggcgccaattcgttgccatcggcggaatcaaacttcgatctcgacgagcagatctcgcagctcatgcaatgcaagccactttccgagcaccaggttagagttttatgtgagaaggctaaggagattttgatggaagaaagtaatgtccagcctgtgaaaagccctgtgacaatttgtggtgatattcatgggcagtttcatgaccttgctgaactatttcgaattggagggaagtgtccagatactaattacttgtttatgggtgattatgtggaccggggttattattcagttgaaactgtaacacttcttgtgtcactgaaagtgcgatatcctcagcgaattactattcttagaggaaaccatgaaagccgtcagatcactcaagtatacggattttacgatgaatgcctcagaaaatatggtaatgctagtgtttggaagatctttacagaccttttcgatttctttccattgactgcattggttgagtctgaaatattttgtttgcatggtgggctttcaccttcaattgagactcttgataacataaggaacttcgatcgtgttcaagaggttcctcatgaagggcccatgtgcgatctgttgtggtctgatccagatgataggtgcggctggggaatttctcctcgtggtgctggatatacatttggccaggatatatccgaacaatttaatcactcaaacaagctcaagttaattgctagagctcatcagctggttatggatggatttaactgggctcatgaacaaaaggtggttaccatttttagtgcacctaactactgttatcgatgtgggaacatggcttccattttggaggttgatgattccaagggccatacgtttatacagtttgatcctgctcccaggagaggagaacctgatgtcacccgtagaacgcctgattacttcctatgatgttgctgccgcatatcatactcctggcacagttacatctcattctgcacaaatttctagtactttgtgcatcctcatcctcgttgatgagattgctgtaagcacttaaaatctttgggtatgcactccaaacttttttggtcattgcccaaataccgcattaatgtaaattaggtaggtaacattccagttttttgtgacgctcaagaacttgctggaggtccaattggagaagtctcctagatgatggccaggtccgaatatgtattgttccagcgcaatgtggatatttttttgtttgtgtttccccatctctagaagtaatgactgggattttatatttctgttgatgatttgctttgctatgttctatcaattttcagtaaaagttgcatgataatagtgattcagttttgttcttttccacttgaattggactggtcatggaatttgcagctcctgtaattgaatgttgaattttgatccttgaagacttgcataataaatgtgaaaatgccaaaatttaccgagattggaattttgcacaaggtagtcctgagtcgaaatcagtgctggagacttctgtggatttaacagaaataacttcatgattcaccataatttcctgatgaggattaccgagtccatgcaccatgtctctgttaacctagggttggagttgtagaaaaagtctgcaagttgattgattatattggttgcaggaaaattgcaaaatatattgttgatgccttgtatgtatattgttcacaaattgattaaatttggttgcctaaatatttcgttccattgatgactacttatgtatctgaattggtggtagggcatcacttattattttgtacatgagattaacatgttactaatggaaagtgattgcttgcgtctttttctttatttaactctgttttgtacaaaagttccaggcctataaagcaaagattttttctcctt

SEQ ID NO: 48334 - DNA, 325 bp, Glycine max
  unsure (1)..(325): unsure at all n locations
  Clone ID: PAT_MRT3847_14650C.1
caattcttctttctttcttcttttttccagtggttcaggaactcttcttcgtcactgtggttgaaaaaatcggagcctctctatctctatctctgcattnaagtgaaacgcatcagagaaaattcaattcaattcaatggatgcgaatcgcgagcaaattgttgttgacgttggatcaatggtggaagccgtttctgctgacgatggtcacgcttctttctacagcatcgaaagtctctgcatgcgttgccatgaaaacgggattacaagatttttattgacttcaattcccaacttcagaaagatttttgtgtcagcttttgaa

SEQ ID NO: 48335 - DNA, 479 bp, Glycine max
  Clone ID: PAT_MRT3847_14651C.1
cttcccctttttttttttttttttttttttttttttttttttttttttttttttttttttttttttttttttaaaaaaaaaccccaggggggttcccttttttgggggttttttaaaactgaacccaaatattttcacttccccccccaaaaaaaaaaccccccctccgttggtagcggggggctccccaaaaagaagttcaacatttgccccccttaaccttttggtggggttccccccaaaaaacttttttggaatttttcgggcccaaaaggggaaacccctcgaaacccccaccattaaaagttcacacccaagggttccaaaggttgggcctccccccgcccccgggaaacttccgggggggggctcccatgttggacaaaaaaagatagtttaacctcacttggcccaaacccttgaattatttccggcggggccaatttgttggtgtgggcaccaagtgatgggccaaaatt

SEQ ID NO: 48336 - DNA, 258 bp, Glycine max
  Clone ID: PAT_MRT3847_14652C.1
aaaaaccccttggaatattgacaatttttatgaaaaaatatccacaaaatcatactttttcgggaaaaagcatgctcctcccctctcaaaaagaaaagagaaagccccactggggggggccatggagcacattttactcactttggacatgtgggggggaaggaagctaaagaaacaacccgtttcccccttcaaaaagaatgaaaattagaccacctggttggtgaagagacaaccgcttaccaaaacaaaaacaaa

SEQ ID NO: 48337 - DNA, 1580 bp, Glycine max
  Clone ID: PAT_MRT3847_14653C.1
gttcattctcccaggatggaacatcccagttacttaacttgagtggatccaattccgttatgtcttctgcagccatgctacccaagcaaataaccactgaacctcctcagcttccatctgctgctcctcagtgtgtattgcctcaggtggaaaacttgggaacatcacaatcaaatgtgtctgaacttgctgctttgcctccatttgctggaagagaacattctgcataccatgctgctgctgatcctcagagcaatcttttatttgggattaacattgacccctcttctcttatgctgcaaaatggcatgtcaaacctgagaaatataggcaatgtgaacaattcattatcgttgccattttctgcttcaaattgtggtggtgcttcaggcactgatttccccttaagttcaaacatgacaacttcgagttgtgtggatgaatcaggtttcttgcagtcttctgaaaatgtagaccaagcaaatacaccaactggaacctttgttaaggttcacaagtcagggtcctttggcaggtcactggacatttccaagttcagcagctatgatgagctcattagtgagcttgctcgcatgtttggccttgaaggccaactagaggaccctaagactcagagatcaggctggcagcttgtatttgttgaccgggagaatgatgttcttcttcttggtgatgatccttggcaggagtttgtgaacaatgtgtggtacataaaaatactatctccactagaagtgcaacaaatgggcaaaggtcttagtccttctacttctgccccaggtaacaaactttctactcctgccaactcttgtgataattatgtgagtcaacaagagttgagaagttcgagaaatggcatggcatcaatgggatcttttcactactaggacactctcccagtcccatgtaaggtatattagttgaaaaattatggtggcagaattttatgttacaagttttcttatgtatggattggcccagcattcttgtacacattaatggttgacatgtagtgattttgcaaggtctaaatagatcaacagcaaatgactgtaaattataataggtggccttttttctgtaatggttagttgcttatagcagttattaattattactgtatctcttaactactgtgataattaagagagtgaacaagagttgagaagttcgagaaacggcatggcatcaatggggtcttttcactactaggacactctcccagtcccatgtaaggtatattagttgaaaaattatggtggcagaattttatgttacaagtttcttatgtatggattggcccagcattcttatacacattaatggttgagatgtagtgatttagcaaggtctaaatagatcaacagcaaatgactgtaaattataataggtgaccctgtttctgtaatggttagttgcttatagcagttattaattattatctcttaggtgggaagtatatgtaaattatattaggagggagactggaagtcgaggccataagtagaaattaaagttactagattaaatgaccatcagtcatatacgtcgttacatag

SEQ ID NO: 48338 - DNA, 308 bp, Glycine max
  Clone ID: PAT_MRT3847_14654C.1
tacggctgcgagaagacgacagaaggggtgtgaccaatggaagacataaaatctgtgacaggggaagttgatgcactaaaattattcggtggaaccggctgagccagcagctgaaaagacaatccctgtgataaaggcattgccgacaatggttgctgacaacaaaataaactgctctatatcaaagaaaatactctctaaaatttggtctagctaacaaaaaagtggtgatctaactacctctgatacttcaaagagcccctgtttttactgttggtagaggaaccaaaatctaccccatcataaaa

SEQ ID NO: 48339 - DNA, 263 bp, Glycine max
  Clone ID: PAT_MRT3847_14655C.1
gcctgtgaagagaaatacctcaacagcaagacagaggagagcacccacacaggaaggtcgcacttgccatagctcgcgatcggcggtgcaccttgatatacctctgacagggccaaaatggctcaaagaggcatgggtggggcgacttagaaacccggccttattcaacagactcgaagaggaacttctgtgggatatcggaactaatatttcggtgaaatatatgggggacgacatggttctgctccttggactcacagatg

SEQ ID NO: 48340 - DNA, 842 bp, Glycine max
  Clone ID: PAT_MRT3847_14656C.1
cacgcatgcagatatatcaatctccaaatcttctgcatcttatttggcaaagctccagttggacgaggtgcaagcaactattcagcaggtccatggtatcattagccgttgcttaaccgcacatgacaagctagaaatgtcattacacgatctttcaaggacaggagacattcaagcctgtaaagcaactcgaaaatcagtcgatagcttactgaaagagctctctaaagagttgaagcaaccattggcaattttgcaatcttctccgcaagctgctcaaatattaccgaaggtggaggaacttgttaccaaggagagagagttgcaggataaacttctagtaaaacactctacagttgtagacggctatgagaagaagtcagcaggaagggaaattgagaatcggattgcttcacaacagctgaaaattactgctttgagacgggagattgatgatcttatggacttgattgatgagatatgatacgtgactatgctgctcgagatgatgataatatggctctcattttgaccttgttttatagttgcaaagagattagcgatacttctgacggttggaattttggtgcagtctattattgtctagactaaggatctcatcttaactatcgctaattttatatccatgcttatctatacctatgtgaaaaaatggattgcatgcactcctaaatggtcgttaatacccttgaaccctttggttcaagttatgactcgaatcttgtgtttcacaaatgtactaaatcactcgagtgcatgtctggaaaaattatttttttcaaaagttcttaggcttgattataatattgctggtttttaat

SEQ ID NO: 48341 - DNA, 318 bp, Glycine max
  Clone ID: PAT_MRT3847_14657C.1
atttcccttctatagagcccctttgaagatcactcaaaccaatctatctatctatctggtataggcatggagctttgttgccaaaaatctatccatggctcttaaaagaaccatggaggattgcgcgagagggctctcacccttcacactccacctcccacagtgagcgcatgccctatctattggcctctctaatcactagccagccagaccatgtgacacctgtaggaacatagctctctctgatgacaggatgaccacgacaagcgttctccatgagcatccacactctggctacagccaagcgtgccgacaaga

SEQ ID NO: 48342 - DNA, 2509 bp, Glycine max
  Clone ID: PAT_MRT3847_14658C.1
atttgttgatttttttttagcccacgcgtccggcggctgcttttttggctgagctcgagcggctcgaggtgcttgctactcgtcggctggcccgtggtcgccttggccgttgcttagccgcacatgacaggctagacatactctagttggaagtggtaaattactcgctaacagggaaggggagttgaacaagaaacagcagtgcctggcgaagaagagaaagaaaacaatcatgagcttcattctgtttccgattctctttgcatttacctttctgtcctcgcccgttctctctgcttcggatctggtcctcgccaaggttgaccgtcgcattgatctgacttcacagattgtgcgcatcactacttcactaaaggtgcagaatacgggatctgatgttgtgtctgagattttgctgtcctttcctgagaaccaggcaagtaacttggcatacttgaaggcaacacttggtgatgggaagggaaaatcaaaaccatcttctggtgttggtttacctgtcgaagttgtccggcctaaagatgtgccaccttccttgacaatttattccgtgtctttacctaaggggcttgggaagggagatagtctgacgttggatgtcttggctgtttttacccactcattgcaaccatttccagagaaaatcaaccaggctgacatccagcttctactgtttcaagaaagtgcacactatctctccccatatgcagtcaaggtccaatcactcactgttaaattgcctgatgcaaggatagagtcctatacaaaactagaaaatgcaaaacttcagggatctgaattaaaatatggtccatatgaaaatcttcctccattttcatacctgccaatagttattcactttgagaataaccaaccctttgctgttgctaaagagttggttcgagagatcgaaatttcccattggggcaatgtacagatcacagagcattacagtattatccatgctggttctcagagcaaaggagaattttctaggcttgactatcagaccaggcaatttttaagaggtgcatcagcctttaggcgtcttgttgccaagctaccaccaagagctcattctgtgtactacagggatgaaattggcaacatttccacttctagtttatggggtgactcaaaaaagacagaactggagattgaacctaggtaccctatgtttggtggctggaaaactgcctttaccattggatatggcttgccacttggggacttcttatttggatcggatggaaagcgcttccttaatatctcttttcctattcctgtgaaacaatcggaggagacaaagctttcccacttggatattgttgctagacctgttgttgtgctggagaagaacaatgttgttcctgagcataatgagcattttcaggtctactataagttcaacagtctttctatgctcagggagcctttgatgttgatttctggctttttatttctgtttgttgcgtgcattgtctacacgcatgcagatatatcaatctccaaatcttctgcatcttatttggcaaagctccagtgggacgaggtgcaagcaactattcagcaggtccatggtatcctcgaccgctgcttaaccgcacatgacaagctagaaatgtcattacacgatctttccaggacaggagacactcaagcctgtaaagcaactcgaaaatcagttgatagctcgttgaaagagctctctaaagagttgaagcaaccattggcaattttgcaatcttctccgcaagctgctcaaatattacccaaggtggaggaacttgttactaaggagagagagttgcaggataaacttctagtaaaacactctacaattgtagacgcctatgagaagaaagcaggaagggaaattgagaatcggattgcttcacaacagcagaaaattactgctttgagacgggagattgatgatcttatggacttgattgatgagatatgataggtgactatgctgctcgagatgataatgtgctcccattttgtccttgttttattttatttaggtcaggagtttgttgcggttttataattgcaaagagattagtgatacttctgacggttggaattttggtgcagttcattgtctttagtattatggtaacatttagcataaagatcgctaatttaatatccatgcttatctatacctatgtgaaaaaatggattgcatgcactcctaaatggtcgttaatacccttgaaccctttggttcaagttatgactcgaatcttgtgtttcacaaatgtactaaatcactcgagtgcatgtctggaaaaattatttttttcaaaagttcttaggcttgattataatattgctggtttttaatatttagatatctttgagagtattatttagaacgaagatgaatacctatacaactacaaactatataattaactagaattcgcaatatcaaccatttcagaaagaagaaagaaataaagaggtcggcacaccagag

SEQ ID NO: 48343 - DNA, 685 bp, Glycine max
  Clone ID: PAT_MRT3847_1465C.1
agaagacacacaaggaccctaccattgaggagattaagagcttgctctgtctgaaacagcaacaacccgggtggttcttctcagcaaagggtcgaacgtgaagttgttggggagtggggacccaatgctggcaactgcagctgatttcgagatatggaaggaaaaggtgctggagaaagcagggtttgacgtggctttcaaggaatactatgagcagaagcgtcgcaactaccctcaggaatgctcgaacatgcagttggctaactaccctgctgatattcttcaccccattaattgccctgatgctgcttgtggcagatccatggagattgcttctgtaagttacaagtgctgccacggtcaagcagctcatcacaaggctgaagttccagagagtggcgatgtcatgattgagaagaagctctacgcttcttaattgcaacgatccattttgctgacggatccaccttttcaattctattccaagtctgtgtgcactacgtacttttatcatactattctcatttttacgtttcggctgtatgttgtcatgaagcctcttctgtgctgcccttctatgggttgaaaataatggcttcaaacaccatctgtttgtttatctgcaattgattttgattcaattcaagagaatccagttgttggcttctattatgatttcatttct

SEQ ID NO: 48344 - DNA, 185 bp, Glycine max
  Clone ID: PAT_MRT3847_14660C.1
tctatactgagactggtatcaccattaaagacaagttaagcatgtgtagcatcctcatggaccacttctgtaaccatggccatgatatcatctatagtacccgttatatcattatcaccagtatgacgtcaaaggaaattcagaccgcggtcaagcttgtaccggccgctcaattggatacacac

SEQ ID NO: 48345 - DNA, 378 bp, Glycine max
  Clone ID: PAT_MRT3847_14661C.1
tgaattcggctcgagaaatcttttaaaaaactaactattttggtctctaattattttttgtgaagatttacgggataatttaaagaactaaatttagaattatttttcattagaaaaactgttgaacgaaagaactcttcttccttaaataatttctttgccaaataaattatgttcaattaatacagtatttatcatttttttttctctcctccactcattttttttcatgtctacctccacttttttttttttttgttacatgtctatctcgtgagtattgaaaacatatgtgttaagagattaggataaaatttaaggaagcttatctaattattggttgattctacaaaatctcacgatcattgaaaacagaac

SEQ ID NO: 48346 - DNA, 1064 bp, Glycine max
  Clone ID: PAT_MRT3847_14662C.1
ggacatctcgctgcgggttccgcgccgcgttacaattcggctcgagtactcaagcattttcttccaatcttgaacccaggtggatcttcaatctctctgacatacattgcttcagaaaggatcattcctggatatggtggtggtatgagttctgccaaagctgcactggagagtgatacacgagttcttgctttcgaagcaggaagaaagcgcaaaattagagtcaatactatatctgctggtccactgagaagtagggctgcaaaggctattggattcattgatatgatgatcgattactcatcagccaatgcacctctacagaaagaactatcagcagaggaggtgggcaacacagctgccttcttagcatcacctttggcatctgctatcactggtactgttctatacgttgacaatggtctgaatgctatgggtgttggagttgacagtccaatatttaaagatcttgacattcccaaggaccagcattaagtggaagctaccccacaaaagctagtgtcaccagaattagcatagcaatggcaatatttttgtttcactgtagctagccatcttcaagttctgcgactcctaccttcttcccaacaagatagtgcaggatccactttgagcatttactttgctttttgtaggctatttttcagagttttccctcagacttttgaacatttcttttttgcaatgtactcagaagtgcaggccacatgattatgaatgtaagaggatctttacattgatcaatgcttatttgagatgtttcgtaataaaactgtattcccgtgtgccctttatcctgtggtaagaaccttgtgagttgtgacatagaaattgctcgtccccccgtccctttctccatttccaatcacccttgcatatgagcttgctactgcaaacttgctaagcatgaatattatcgtagaagtgttgtgtaattaagttatggtggtagattgtttgaactctgcagttcttgtggttggaagtgtcattgtctgctgaaaataaaacattgtaacgtaacaagctcctgaataactttc

SEQ ID NO: 48347 - DNA, 518 bp, Glycine max
  Clone ID: PAT_MRT3847_14663C.1
catcgaacatgtcataataaattaacaaaccacaagtttccaagaggagtaccaaaatctgagcagctgtgtaaactttatcaatctccatcaaagttattgaaagtttcccactaaagagaaaagctactgaacttctactttaagtacaacatttgactttaacacaattgaaatttgatatattgcaaatgatcgtcctatagtttgcttttactgtacattgtgagggaagggtatgcttgtgagtgtaagttggccaaaggccatgcaaagtggcgtgacagtcatggtttagttcctcagaaaaacctgttatggccaagtgatgacataatccacatttttaaacaactggagcttcatcatccaacatctcaactacaggagcgttctcatcattctcctcaaaatacattccatcaacagcactgttctgctgaaactcccaccctagatttctctccaacagctccttaaatttccttgtccattttaaaagatctccatcaacaacc

SEQ ID NO: 48348 - DNA, 380 bp, Glycine max
  Clone ID: PAT_MRT3847_14664C.1
aaagaaggaaccccagcaggaaccggaacggaaaacccggaacgacccacgcttacgattacacgaccgaggaggaggaactgaacagagggcaaatgccataaaagagacagatgcagccaaggaaacaaaagaaacagatggagaggacccaaatgacaaggaaatgaacctaaggggaagaaaaaaataccataatgaacacagaaacaagggcaaaggataactcagaagaactgagcaaagaaaaaagaggataaggatgagacaggaaacccctgcatataaaatggcaacaatggaaacaacaaaaatggaggaaaaacggaaaaggctaaaacacgaccaatctggaggcaagctagaatgaaagcaaaaac

SEQ ID NO: 48349 - DNA, 350 bp, Glycine max
  Clone ID: PAT_MRT3847_14665C.1
gtgctcaagccatacagtgcaaacattactaaactgtggccagcccagcgtcactcccctatatcatcatttgaataaaatcacctacagtatctgtgccctttcaattcctctattatctttctacactcctacctattataggggtgtgacaagcagcaataaaacaaccaggtggcccaatgctccacaattttcaaggactatttttgtgtcctagaaaaacaaatatgaaggaggcataatcagaaatcttaacccctttgtcttgatgaagcttgagtagaatggcatttggatgagcgtgggggtttaaggattgaactaaagtccatacataccactagtct

SEQ ID NO: 48350 - DNA, 405 bp, Glycine max
  Clone ID: PAT_MRT3847_14666C.1
cacgcgtccgcttgtaagttaggggagctcagccccgctaaacgtttgcgcagattgagaacgttgagggatcgtccccttttgatggcattttacaagacgcgtgtgtggttactactttcccggggaaagatgcgtattgaattcgcaccaccgaaggttgcttctatttgaaaactctgtcctactctagagaactacgagggggacacctggtgccactctacgggttggcgctagcatgactgacagctcgagaccaactctcgctagggcaacggatgtcgccaatgctgctttacatggaagtgatgccatttttctgggtgctgagactttacgtacgctgtgccctattgagactctatctactggaggcagaaactgatcagaggctgataatgt

SEQ ID NO: 48351 - DNA, 1510 bp, Glycine max
  unsure (1)..(1510): unsure at all n locations
  Clone ID: PAT_MRT3847_14667C.1
acccacgnctgtccggnaaaatacctgaaagagtaactgtgggaaatgacttgaaactggtgttcagaacttttgcacagataaatttaatctaacaaataataaaaatcgtttcttgagttctcccgtcttgcagaacctcacatgtgccatcgttgccttagctagtctagtagtcccttatttaaacacatagcttctgtactttggaaatgacaataattgcaaaaacaaattctagtcatatcatatatccttcaacctctcatcattaggcattcagcaagcaagaaaaaaaaatgggcaaaatcatgcttgttttgggtagcctcattggattatgctgtttcacaatcactacctatgccttctcaccttctggatggaccaatgcccatgccactttttatgggggtagtgatgcttcaggaactatggggggagcttgtgggtatgggaatctgtatgcaactgggtatggaactagaactgcagctttaagcactgccttatttaatgatggagcttcctgtggtcagtgctacaaaattatatgtgattacaaatcagactctagatggtgcatcaaaggaagatctgtaaccgtaactgccacaaacttttgccctcccaatttcgcccttcctaacaacaatggaggctggtgcaacccaccactcaagcattttgatatggcccaacccgcttgggaaaagattggtatttacagaggagggatcgtccccgtgctatttcaaagggttccatgcaaaaagcatggaggggttaggttcagtgtgaatgggagggactactttgagctagtattgatcagcaatgtggggggtgctggatccatccaatcagtgttcattaaaggctcaaaaactggatggatggcaatgtcaagaaattggggttctaattggcaatccaatgcgtatttgaatggtcaatctttgtccttcagggtcaccaccactgatggagagaccagagttttccaagatattgttccagcaagttggacattcggccaaactttctctagcccagttcagttctaagctgattacagataaaccaaccaacggctgaggcgtgcttttttattttattactggagctgcccgccacccttcttctggttttgattattcccatcaactccaagccctctatcaaggcataaattgttatcaataataacaatcaatcaccatcatatcatcataagcttgtatatcaaataaacatctttcaagtttaaattaatttatactataaattgttgtaatatcattatagttgaagttcaagctgtgcaacgggagttgggaaagtattaattccctaaaatcaccgttatatcataaggattaagctcaagcatgtagatcattttaacatctatgaagtttaaaagagaaagaggaaatgtattatagggagaaatttctaaaaaaaagctgtgccgctggagtagggaaaatattaattccctaaattt

SEQ ID NO: 48352 - DNA, 1916 bp, Glycine max
  Clone ID: PAT_MRT3847_14668C.1
aaaaaacaaacactcgaaccttcttgtgttggagaatatcattatcaccaaaaaccctttgtgtttgagcttccgagaaagtcttgatctccgctcatggcttctccgcgagctgcagaaaacaccgagaatagcttggagaagatcaagcgccagctcgcttccgcttccggtagaaacctgttgcaaggaccacttctcaagagatctgaaaccctgagaaaatggaacgagcgttgggtcatcttggacccgactacggggagaatggaatacaagataagacgaaatgaaccttctgttaaaggaacaattatatttgacgccaatagcaccatcaccatatctcctgtgaatttccacgggcttccaaagtacgatgggtgctgcttttatattgggacaccacagaaaaaggattacttcctctgtgcagagactcctggtgcagctagagcatgggtgtcaactttacatgcaactcagttggttctaaaagcccataaagaagctgtgaattccttaagtgggaatggttctacaaaattaggaactgcagccttggaatgttcaaaagaaattcaacagccttggaatgttcaaaagaaattgaagcagcaatgcagatttctttgcgaaatgctctgggaatgatgaataataggactactgatggtcctatggatgatttaacaataatgagagtgaaggatgaggagctacagaatttgtctcgagaccttcgggcacgtgattcaactataaaagatatagcagataaactctctgagactgctgaagctgctgaggctgcagcatctgctgcttatactatggatgagcatcggagaattgcttgtgcagaaattgagcgtttgaataaagattctgagaagcagcaagagctgtttacacagaagctgaaggagtctgcagaaaagattgggggcttaagcaaagaaagagagcaattaatcaggcagagagatgctgctattcaggaagcaaatatgtggcgttctgaactggcaaaagctagagagcatgatgtgatcttagaagcagctgtagtaagagcagaagaaaaggttagggttgcagaagcaaatgctgaaactaggataagggaggctgttcagagagaatccgcagcattaaaagagaaggaagagcttcttgcatatgtgaatgtactaaaagcccaacttcaaaggcaacacattgatacaactcaagtttttgagaagacagagtcatgctcagatacaaagcatgttgaccccacagaagagaatgtggataaagcatgcctgagtgtttctagagccatccccgtccctgcagagaatgtagtccacatggcaacagatcaggtgaacattcaaccagttggagataatgaatggagtgatattcaggctacagaggcgaggatagctgatgtaagggaagtagctcctgaaactgatggaagcagcttggatattcctgtggttaaccagcctggaaccaatcatcaccatgaacaaggagctaactctttccatcaaccctgatatgttattcacaagtatacaacatatagcaaatttcaactttaggcattgtattccattttgttggatgatcgtgtaaaccttattgttttcattttatcattgccttatcacgctgtgttatgacctgccctgatagtgaatacctttttctgatgtaaatgtaatgtaatacaacacgagctgaccggtaaatcatatgtgatatgtagcatttgatcaaccaatagagcccttttttttttttatccacaatgaattgaggacctttaacaacaattaaactcaaacgagcttctcgagcccaaaaaaaaaaaaattattaaaaaaaaaaaaaaaaaaaaaaaaaaaaaaaaaaaa

SEQ ID NO: 48353 - DNA, 246 bp, Glycine max
  Clone ID: PAT_MRT3847_14669C.1
agaagcgtggacaattcactcttgtagttggaggtttgttggtcatagcatatgctgttcctatggcacaatactatgcctatgtatccaaaaaataagataatataaatagatctggatgtcaaattctcactgatcaaattcacatgcataatgtgcagttgtaaccatgctcatgttacaatagagtttgagaaagctgaagaagaatacgatgacagtgtttgcttgtagaataatggcaaa

SEQ ID NO: 48354 - DNA, 1981 bp, Glycine max
  Clone ID: PAT_MRT3847_1466C.1
cccacgcgtccgcccacgcgtccgaaaaaaaaatcagaaaaaggaaatgagagattgttggacacggtgggcatcaagcattttgcttgttatttcacgcgttctctctccaatttggacctccctttccttcgttcctcactcactgcaacggcgccggagatccgtcgctctcctcctccaccaccaccgcgatgggcgccaattccatgctcgccgagttctctcacgatctcgacgaccagatctcccagctcatgcagtgcaagccactctccgagcaacaggtccgaggtttatgtgagaaggctaaggagattttaacggatgaaagtaatgttcagcctgttaaaagccctgtgacaatttgtggcgatattcatgggcagtttcatgatcttgctgaactgtttcgaattggagggaagtgtccagatactaactacttgtttatgggtgattatgtggaccggggttattattcagttgagactgtgtcactcctcgtggcactgaaagttcggtatcctcagcgaattactattcttagaggaaaccatgaaagccgtcagattactcaagtatatggattttatgatgaatgccttgctaagtatggtaatgctaatgcatggatgtctgttggggaaggagggtttaaacaaggacctgataattctagttcacccaaaaatctctgcctatggttttccctcagttagaatatatctgcagattctttgtacaactcaacaagagagttgcatcagcagatttcaaaaattcagggggagtttccccctggtgaaatacctttccaaccatttcaagcagttgctcctcaacctattcacacaggcgctgtttcacagtttcccaaccctgctgaccaagctagctttcaaatgagaatgtttgcagaaagggctcaaaagcaacacacttcttccaatcattcccttgttgatactctgccagtgacattatcaggtccatctgaacagagaaataactcgggcaatgcttcagcaacagctgcccatgcatggatgtctgttggggctggagggtttaaacaaggacccgataattctagttcacccaaaaataagatatctgtagaatctttgtacaactcaacaagagagttgcatcagcatatttcaagaattcggggggagtttccctctggtggaatgcctttccaaccatttcaagcagttgctcctcaacctattcaggcaggcactgtttcccagtttcccaaccggcctatggttttccctcagttagcatctgctgatcaatctagatttcaaatgcagcccccttggcgaggtcttagtcctcgtagccagtcaaggcagaaacaggaaacccttccacctgacttgaatattgattttgaatcaccagggtcacctgtaaaacaatcttctggtgtccttgttgactcacagcaaccagacctagctttgcaactgtgatgaggcattgctgtcttggtatgggtgtttccacttgaattggactggtcatggaatttgcagctcctgtaattgaatgttgaattttgatccttgaagacttgcataataaatgtgaaaatgccaaaatttaccgagattggaattttgcacaaggtagtcctgagtcaaaatcagtgccggagacttctgtggatttaacagaaataacttcatgattccccataatttcctgatgaggattaccgagtccatgccccatgtctctgttaacctagggttggagttgtagaaaaagtctgcaagttgattgattatattggttgcaggaaaattgcaaaatatattgttgatgccttgtatgtatattgttcacaaattgattaaatttggttgcctagatatttcgttccattgatgactacttatgtatctgaattggtggtagggcatcacttattattttgtacatgagattaacatgttactaatgg

SEQ ID NO: 48355 - DNA, 369 bp, Glycine max
  Clone ID: PAT_MRT3847_14670C.1
atttgcatcccagacaaagaagatgaatcggggccaatcatacttcattaggattcttggggtcttaactctagttaatcagttcttgattatattaaaagctatttgattgaagaaaataactacatggatcgagaagacattgcttcagatgtttcaattgctgataaaatatggaaacgccttcctagttgaatccaatctcacaatattcaagatcaccaacataagagttactatgactgaggtcgttctgtattgtacttcattgaacgattaatggaagaagcaatccagagactgagaatgaaagagttatatattgtcggaaagcgatggttcaaacccttagaagtgcacaatttgaga

SEQ ID NO: 48356 - DNA, 209 bp, Glycine max
  unsure (1)..(209): unsure at all n locations
  Clone ID: PAT_MRT3847_14671C.1
catattccccaggggcttcaatgannncaccacctggatgttcttccacataagaggtatcattatatcccttgttcttgatagatactccagcattctggcctcttgnnatgcaatgaaattgctgaaggactgaaggactttggtgcctaattatcggtgnaactgatttgagctgttgccttgtgccacggtctccnntggaacta

SEQ ID NO: 48357 - DNA, 860 bp, Glycine max
  unsure (1)..(860): unsure at all n locations
  Clone ID: PAT_MRT3847_14672C.1
atctccatcatgaggactagcaatatacactgaatgctgcaatatctgttgatgagatatattacctagagctcttttgatatcagaattagtttcttatggagatttcatccatcagagggttacctgatgatatgacggacaaagcttctgttcttggagatgctatcaaatacttgaagcaattgcaggagaaagtaaacgctcttgaggaggaacaaaacatgaagaaaaatgtggagtctgtggtaattgtgaagaaatgtcaactatccaatgatgttaacaactcttcttcagaacatgatggttcatttgacgaggcactgcctgaaattgaagcaagattttgtgagagaagtgtcctcataagagtacactgtgagaagagcaaaggagttgtagaaaacacaatccagggaattgagaaacttcatctaaaagtcatcaatagcaataccatgacatttggaagatgtgcccttgatataacagttattgctcagatggatatggaattttgcatgggagtgaaggatcttgtgagaaacctacgctcagcttttacatctttcatgtgagaacgttctgttagtccatattaaaccgacttcaaaaagcacaacaagaagaatagaagttacagtcaactatatatatatatataccagtttaaagtttatgttcttcgataatattttatgcttacatggncttgtgtgatgtctgtcatctcatctatttcaaccatattcttctttttgcatggtcaactcgttgaccatgttattggtaccaccctgttcagtttcacagntactatacagttgggtaggcatttttggcaggaggttgaaagt

SEQ ID NO: 48358 - DNA, 541 bp, Glycine max
  Clone ID: PAT_MRT3847_14673C.1
aatctttgaatttttttttcaaattgattgctgttctcacttttcaatgagatattcaaatatttattccaattttatcttgtaataaatagtgccgtcttgaaagatttaataatacatttattgaaatgaagagagagaataaggacattttagtaaaattattccctaataaatgttaattctcttgaaatacttgttttcttgatctatgtggaaaaaccttaaacatgagtcattttggggaatttggcttctctgctgtccctgctgcccccatcaaaataacaatgcataactgtattaatatttaatggtgatatttaattttaaaaatcatgaaaactgtacgattttgaaggaacagagacaacatgggaaggaacagtagagaagccaaatcccattttgggatggtgggagtatacttttgtatatgttatgtaataaatgatttctgatttctttcccaataaaaccttacatttttagcttaactggtaatcttgaattcgaattctagggaatacaacaggattaa

SEQ ID NO: 48359 - DNA, 284 bp, Glycine max
  Clone ID: PAT_MRT3847_14674C.1
ctttagtttgagggagctggctatgctgacacgccagttttgtatgaatgagcaggctacgtgacttataatatgagaaagcggaatgctcaggctgatccggaatttgtgtgccagttcgaacgggctgtagcagaattcaatacaggaaatgacgcatccccctcatgtcaagcactgctgtactatgtgaagttgcacacgtcataaaggatggcaaagatgagggaagtgtgtgttattttaaaaaaaaaaaacaacaaataaatagaataatttaaaat

SEQ ID NO: 48360 - DNA, 182 bp, Glycine max
  Clone ID: PAT_MRT3847_14675C.1
ttgcagtacatgcaaaggccccaccgttagaaaagggtcggcaaggttatcctgggccaagggccccctttccaagtccaccaaaacccgtttcgaaaaaaattggcccgttgccgaaaaagcccaagacttcactttttaagcttccgacaagcccagaattccggttgcacaaccgccaa

SEQ ID NO: 48361 - DNA, 350 bp, Glycine max
  Clone ID: PAT_MRT3847_14676C.1
ccacctccaaaaccgttacacacacaacattctatactcctttcaagcttattagccgcagctagggtttccttctcactctcccagggattgagtaacatctgttcattgatcgtgattggaaggttacaatccggtttatttgatggttgcaacttcgtaccagccgttgaagtgactgtgcatgtccgtgaactgtttttttcagaaattctattgaaattcttaatgggaagaacagttttggcacgccaaaaggatggtcttgatgctctgagaaagattatgtaaagcgttatgactcttgaagatttctttaccttgaccgagatgaaagatgggctcacagc

SEQ ID NO: 48362 - DNA, 1377 bp, Glycine max
  Clone ID: PAT_MRT3847_14677C.1
cgctagaaagtctcgagacagcaaaggctagatatcggtttgataaaatattgtacacataaatctagctccaattcctaatcacctggttaatttcttcacatagagctatcaagatccaacgttaacatgaagaatgttttagtaaggtcagctgcgcgagctctgcttggcggcggtgggcggagctactaccgccagctctcaacggcggcgatcgtggaacagagacaccagcacggtggcggcgcgtttggaagcttccacttgcggaggatgtccactcttccagaggtaaaggatcagcactcagaggagaaaaagaacgaggtcaacgacaccagtaacgccgtcgttacgagttactggggaatcacaaggcccaaggttcgtagggaggacgggacagagtggccgtggaactgcttcatgccatgggatagttaccactctgatgtgtcaatagacgtgaccaagcatcatacaccaaagtcattaacggacaaggttgcttttagggctgtcaagtttctaagggttctctctgatatctacttcaaggaacggtatgggtgccatgctatgatgctggaaacaatagcagcagttccaggaatggtgggagggatgctgctgcacttaaagtctctgaggaagttccagcacagtggtggatggatcaaggcactgctcgaggaagcggagaatgagaggatgcacctgatgaccatggtggagcttgtgaagcccagctggcacgagaggctgttgattttcaccgcgcagggtgttttcttcaacgccttcttcgtgttctacctcctctcgccaaaggcggcacatagatttgttggttacttggaggaagaagctgtgatttcatacactcagcatttgaatgccattgagagtggtaaagttgaaaatgtccctgcccctgccattgctattgactactggaggcttcccaaggatgcaactctcaaggatgttgtcactgtgattcgcgctgatgaggctcatcacagggatgttaaccactttgcttctgatattcatcatcaagggaaggaattaaaagaggctccagctcctattggttatcactgagtcattgttgtaaattttttaacaaaacgatatctagcctttgctgtctcgagactttctagctatttttaccatctggttcaataaaatttattttcagcgagcactttaaaaaaaaaaagtttattgagatcaatagacaatagtaggtgatactttggagacatcatacacacaacttgtacttcacctgcacaccttacccgtttcataagatcacaaaagggaacaggaaataagcaataaattcacctagattctatagtt

SEQ ID NO: 48363 - DNA, 647 bp, Glycine max
  Clone ID: PAT_MRT3847_14678C.1
cggacgctcgggcaaaaccaaatcaaatctctcacaagtcaaaactcaagctccatatttcttttttctctttacacctttgaattcattttttctcacatggacgagatcgacgtgcctcctttcttcgtgtgccctatctcattagagctcatgaaggaccccgtgaccgtctccaccggcatcacctacgaccgcgacagcatcgagaagtggctcttcgccgaggtgaagaacgacacgtgtcccgtcacgaagcagcccctcctcccggacctcactccgaaccacacgctccgcagactcatccaagcctggtgcaccgtcaacgcctcccacggcgtccagagaatccccacaccaaaaccaccggtcgacaaaaccctcatcgagaaactcctccgcaacacctcggcttcggactccccgagccttcagctccggtccctccgaaccctcaagtccattgcctcggaatcccaatcaaacaaacgctgcatcgaatctgcagaagggcgcagttaatttcctagcaacaattataaccaccaccaccaccaccaccaccaacctactcgatgatgacatcgagttggaaaataaaacaagttcagcccacgaagcattgagccctttacacagcattc

SEQ ID NO: 48364 - DNA, 394 bp, Glycine max
  Clone ID: PAT_MRT3847_14679C.1
tacggctgcgagaagacgacagaagggccagaggtaaaggatcagcactcataggggaaaaagaacgaggtcaacgacaccagtaacgccgtcgttacgagttactgggaatcacaaggcccaaggttcgtagggaggacgggacagagtggccgtggaactgcttcatgccatgggatagttaccactctgatgtgtcaatagacgtgaccaagcatcatacaccaaagtcattaacggacaaggttgctttagggctgtcaagtttctaagggttctctttgatatctacttcaaggaacggtatgggtgccatgctatgatgctggaaacaatatcaacagttccaggaatggtgggagggatgcttctgcacttaaagtctttgaggaag

SEQ ID NO: 48365 - DNA, 630 bp, Glycine max
  unsure (1)..(630): unsure at all n locations
  Clone ID: PAT_MRT3847_1467C.1
tcgtttcccggggatcctctagagtcgacctgcagatcaaaagtagcacacgccattacaaaaatatcatcagtaaagtactttagcgcagtgggaagctttaacaattctcaaaaaaaaaaaaaaacattgaataacatgttaatttacttggaatcacgatgtttgtcctgcatcacgcgtagttcttttttcaagttttcaaggccaactttattttttgcagaattatcaagaattttttcaagccttgctcgcatctgttcttcctgcgaattcagttcagactccctgtttcttaactgttgaagattttcttccaagttcttttgagcttcactatcagcgttaagtttcctatctagaagctccttttcctctctaagctttgcagttttcattccagcttcctctttgctgtaatgcaacattgcaacatcattattacaagttccaaaacacgaaaatgtaatgacaaatgaaaacttaacatgcatcataagtgataactactaagtactgacaaataaatttttaactgctcagggagaacaaattggctaccagaagacagaattgatgaaattcagagcaaattatgtaaaaaatatatgntttcttatcagggaa

SEQ ID NO: 48366 - DNA, 570 bp, Glycine max
  Clone ID: PAT_MRT3847_14680C.1
caaggatgcaactctcaaggatgttgtcactgtgattcgcgctgatgaggctcatcacagggatgttaaccactttgcttctgtaagtttccttttcgtctcataatggacaacaacaaaaattgttaggaacacattcttcaacatattttttttaaagaaatttaacatattttcttattagttggaatataatttattgaaaactataagatcccaaaataagttcattaaatatcacctgagatccacgaaatactttcaatagttccaactaataagaaaaagtatcttgttagcatttttcatcaaacacttctaattttgtaccttttcattgggtttgtttcactttgctctgattcagtcttctgaatgctttgtgttcttcttcgtgcaggatattcatcatcaagggaaggaattaaaagaggctccagctcctattggttatcactgagtcattgttgtaaattttttaacaaaacgatatctagcctttgctgtctcgagactttctagctatttttaccatctggttcaataaaatttattttcagcgagcacttt

SEQ ID NO: 48367 - DNA, 1487 bp, Glycine max
  unsure (1)..(1487): unsure at all n locations
  Clone ID: PAT_MRT3847_14681C.1
ccggggaactgtgaagtgtattggtcactgacctatcttggaagagttttgaagtttaaaccttcaaacccttttgcctttagattctgattctgagtctctgctgctatatatggcgccacgcgtatttcttgtgttggggatgttgctgatggtgtgccttgttaaggtttcgtctgatccaaagagagaagaagaaatactggaagaagaactacattttcccgataacgagccaattgtggtgggttgtgcaagacgaggtgcagtgcacattcgagacccaacttgtgcactagggcgtgtggcacgtgctgtgtgaggtgtaagtgtgtcccacctggcacatctggaaatagggaactatgtggaacttgctacactgatatgactacccatggcaacaagaccaagtgcccttagagaaaaaacccattgggaaatttgtgcttcattgattatgcaccgaagttcaagtgtactagtatgtggtggttcaattctgtttactatagcgatgtgtgtgcactactttggctatattattagactaatagtatgtttatttagaatgtgtaagttctagtttgtgtctgtattattttcggtgatgggtcatgtaaacttttgtgcctttgtttgcctgaacataaagatagtagtacattacctttttattttcctatgttttttaaaaaataaattataacatcattgtctattttatgttttgtaaatttcttactcttaacttgtttcttcccttaaaaacatggttctttttttattttaagctttataaaaaaatatttacttccaatctctatattttagtctacttttaagaataaaaatgtattcaacattacttgttattatctcaaagtgactataaattaatggtaactcttgtttgaattttctccagcttatcgtgagagactcgaacagaaggctaatgcaagatatgggtaataattcgccaataatctttactcaataacaaaattattggttcttaaaatagcctttaaattgtcaagccaagggcaaataatttttcacagggagttgggacatttaccttatactgtagtacttacttttcattcattattcatttattggtcacattgcaataatgaaatgaggggaaagaaataagctttgaatatttcatgactttttcagattgtggtgggttgtgcaagacgaggtgcagtgcacattcgaggcccaacttgtgcactagggcgtgtggcacgtgctgtgtgaggtgcaagtgtgtcccacctggtacatctggaaatagggaactatgtggaacctgctacactgatatgaccacccatggcaaacagaccaagtgcccttagagaaacanaaagcttcattagaattgccaatttgtgcttcgttcattatgcatcanagttttaagtgtactactatgntggngtgcaattctgtttactatagcgatggat

SEQ ID NO: 48368 - DNA, 259 bp, Glycine max
  Clone ID: PAT_MRT3847_14682C.1
acctttggtctgatttatgtgcttgcatcgtcgtgagaagatgatagaacgggatcccggcctgatcaaatacctaggtaagctcttctgactacggggaggggaatacccgcgcccccgcctccgtcttcttccgctccactcctcgacgcgatcgccaacagagtacacgtcacacaccgtccgataaggacgtatggcccttacggcagacgtccacctcataggtaacgcgtatacgcgcctccgactcaccgcc

SEQ ID NO: 48369 - DNA, 714 bp, Glycine max
  unsure (1)..(714): unsure at all n locations
  Clone ID: PAT_MRT3847_14683C.1
ttctgctgcgagaagacgacagaaggggactaactcaaccacaattccccaaaaaactctagaatttgcatgcactgttcttcatacaatggcattacgcgagcttattgtgatggggttattgctgctggtttgtcttgcaaaggtttcatctgatgttaacatagaaaaggagcaagatgaagaatttcgctttcctgttgaccatcttatcgtgagaggcgggaacagaaggctaatgcaggacatagattgtggaggattgtgcaagacaaggtgcagtgcccattcaaggccaaatgtgtgcaacagggcttgtggcacatgttgtgtgaggtgcaagtgtgttccacctggaacttccggcaacagggagctttgtgggacctgctatactgatatgaccacccatggtaacaagaccaagtgcccgtaaagcccatagaaggtgagccctatccaattgggcccttcacacaccaagcaaagctagcatagtttagtaaataataaatgtgttatctacacttttgtagatttggatttgtcatctttaagatgtgttctagtttttatctttgttataaaggtatggtacaatatgaatcaagtatataaactttgcgcttagattacttcatatatgaaaaagtatcgaattcctttttaattttgggttaannnnnannnannnnnnnnnnnnnnnnnnnnnng

SEQ ID NO: 48370 - DNA, 512 bp, Glycine max
  Clone ID: PAT_MRT3847_14684C.1
gcagtttcccgataacgagccagtatgttttttaaaaaataaattataacatcattgtctattttatgttttgtaaatttcttactcttaacttgtttcttcccttaaaaacatggttctttttttattttaagctttataaaaaaatatttacttccaatctctatattttagtctacttttaagaataaaaatgtattcaacattacttgttattatctcaaagtgactataaattaatggtaactcttgtttgaattttctccagcttatcgtgagagacgcgaacagaaggctaatgcaagatatgggtaataattcgccaataatctttactcaataacaaaattattggttcttaaaatagcctttaaattgtcaagccaagggcaaataatttttcacagggagttgggacatttaccttatactgtagtacttacttttcattcattattcatttattggtcacattgcaataatgaaatgaggggaaagaaataagctttgaa

SEQ ID NO: 48371 - DNA, 840 bp, Glycine max
  Clone ID: PAT_MRT3847_14685C.1
cccacgcgtccgcccacgcgtccgtacggctgcgagaagacgacagaaggggattgcaggcataagtcattttagtccgtgacttttcgaaacccctcatctagttcgtgactttgtaaaaagttattcattagatgattaatctagttcgtgacacaatggaaagtaagtttgactttgcaaaaacttattcaccaactaattagaaccctcatctagtttttgcgaccatgtaaaaaagttagggactaaatacctgacgcttttaataccatagactaatttgctattttctggaccactaatctccatttatttttattcggctcgactcgagccgaatcggctcgagtctttatagaaatctaatcgtttttagttcatacagttatcaaaagtgaccccacatcagaactaaaaacatgtgcttctgttagtcattaaaaatctattaagtttgtagggttaattaatagggagtgaaaccaaattttgagagtcaacattatctcttgtctctctctctctctctgttctgttgtgcatgatttgctattcctactgatttttctcattgagctccccgttggcccatataacctgcaaattttttactactttacaatgtgcagagctaccaggtgttcttcaagttgttcctagcaggacatatcagctccatggaccaaataacctgcagtagagaatgttcacctaaagttgtatcgttcaaaccgttatctatgccatgtataaactaaactagttgggctctatacggttttaaataagattttggaattaatatataataatacattactaatatttgggctatat

SEQ ID NO: 48372 - DNA, 1756 bp, Glycine max
  Clone ID: PAT_MRT3847_14686C.1
acgacccacgcttttcgaaaaaacttttaagtgcggcgctcaggcactcgctccgattagagcgcagaatcgggggaacggtgaagtgtatttggtcactgacctatcttggtagagatttgaagtttaaaccttcaaattaatcaaaccattttaatttgcctatagattctgagtcactgctgctatggcgctacgcgtacttcttgtgttggggatgttgctgatgttgtgccttgttaaggtttcatctgatccaaagatagaagaagaaatactggaagcagaagaagaactgcagtttcccgataacgagccacttatcgtgagagacgcgaacagaaggctaatgcaagatatggattgtggtgggttgtgcaagacgaggtgcagtgcacattcgaggcccaacttgtgcactagggcgtgtggcacgtgctgtgtgaggtgcaagtgtgtcccacctggtacatctggaaatagggaactatgtggaacctgctacactgatatgaccacccatggcaacaagaccaagtgcccttagagaaacaaaaagcttcattagattggccaatttgtgcttcgttcattatgcatcaaagtttaagtgtactactatgtggggtgcaattctgtttactatagcgatggatttgtgtgcactactatggctatattaattgactgttagtgtttttatttagggtgtgcctgtatgattgatgtgatgagctagtcatgtaaactttgtgcctttgtttgcgttaatataaaatgtagtacatcactgtacctttttatttcccaaaaatagtctaatttagtaaataataaatatgggttatgtacactattatggatttggattttacattttaagatagggtttcattttttacctttgatataatgtatagtattgtcagaaacaagactattaatgttaaatacattctagaatctgaatttcaaactttttaccaccaaatattactcgtgggtgaaaagccgcctgctttcttcgtgtgggttggtaatgactccgttgtcacacagaaaatcttacttgtggaggctctagtgggaaagacactcaacttaaccaccttggatggaagagagctcacaattcaagtcacagaagtagtaaaaccaaaatatgtgctggtggtcccaaatgaaggaatgccaatttcaaaggaacctggcaagaaaggaaacttgagaatcaagtttgatgttttgttcccatcaaggcttacctcacaacagaagtatgagctgaaaaggattttgagcaacagtactgctgatgactaattctgtcttggattgtggaggattgtgcaagacaaggtgcagtgcccattcaaggccaaatgtgtgcaacagggcttgtggcacatgttgtgtgaggtgcaagtgtgttcccccaggaacttccggcaacagggagctttgtgggacctgctatactgatatgaccacccatggtaacaagaccaagtgcccgtaaagcccatagaaggtgagccctatccaattgggcccttcacacaccaagcaaagctagcatagtttagtaaataataaatgtgttatctacacttttgtagatttggatttgtcatctttaagatgtgttctagtttttatctttgttataaaggtatggtacaatatgaatcaagtatataaactttgcgcttagattacttcatatatgaaaaagtatcgaattcctttttaattt

SEQ ID NO: 48373 - DNA, 505 bp, Glycine max
  Clone ID: PAT_MRT3847_14687C.1
gaggtttcaatccactcataaaatatcccaggtattgttcttcatgaagccttccaacttgtgatgacaacagctcaaaagcttcgacgaattcctccacacttcctttcaccttcttcccggcgaggcgagattcactctgtgcagagtcaccagcagaggcttcctccttttgagtctcccttctctttccgatctgtttacttaattctgcgagaatcaagctttgttgctgcacttggagagcgagctcttgcagcgttgttgacacattccccatctgtgtctccaaagcgtcaactcggtcacccatcttaggcttccttgacatctacaatcttcttcgttgtgtgagattgatccggtaggtcggaccaattgatgggtcttaatgcacaaaaatagtgataaaatggatataacagtgtaatatgagtaatgaaactgcaacggtattgctgtgagatccacaattacaggaagataagagcagaaaaaaaaaaaa

SEQ ID NO: 48374 - DNA, 1192 bp, Glycine max
  Clone ID: PAT_MRT3847_14688C.1
ttttttttttttgtcttcaaacatagtggaataaacgttgaattagtgaaattactgggacagaacaagtcatttaacagatgggacctttttttttttcattttgggaaaataaaaaggtaatgtactactatctttatgttcaggcaaacaaaggcacaaaagtttacatgacccatcaccgaaaataatacagacacaaactagaacttacacattctaaataaacatactattagtctaataatatagccaaagtagtgcacacacatcgctatagtaaacagaattgaaccaccacatactagtacacttgaacttcggtgcataatcaatgaagcacaaatttcccaatgggttttttctctaagggcacttggtcttgttgccatgggtagtcatatcagtgtagcaagttccacatagttccctatttccagatgtgccaggtgggacacacttacacctcacacagcacgtgccacacgccctagtgcacaagttgggtctcgaatgtgcactgcacctcgtcttgcacaacccaccacaatctatgtcttgcattagccttctgttcccgtctctcacaataagtggctcgttatcgggaaaatgtagttcttcttccagtatttcttcttctctctttggatcagacgaaaccttaacaaggcacaccatcagcaacatccccaacacaagaaatacgcgtggcgccatatatagcagcagagactcagaatcagaatctaaaggcaaaagggtttgaaggtgtgccttgttaaggtttcgtctgatccaaagagagaagaagaaatactggaagaagaactacattttcccgataacgagccacttattgtgagagacgggaacagaaggctaatgcaagacatagattgtggtgggttgtgcaagacgaggtgcagtgcacattcgagacccaacttgtgcactatggcgtgtggcacgtgctgtgtgaggtgtaagtgtgtcccacctggcacatctggaaatagggaactatgtggaacttgctacactgatatgactacccatggcaacaagaccaagtgcccttagagaaaaaacccattgagaaatttgtgcttcattgattatgcaccgaagttcaagtgtactagtatgtggtggttcaattctgtttactatagcgatgtgtgtgcactac

SEQ ID NO: 48375 - DNA, 410 bp, Glycine max
  Clone ID: PAT_MRT3847_14689C.1
cacacttatacaaaattctacaattagtaacttgctgcgagttgctccttggaagcaaggctctttaatgggtaagattgcgatgtctgggaccgccactcataaaaagagacattgggcctctattgaacaccgctgtttaacaaacatctgcacaacagagccttctgatgcctgaacgtggactaaatctgaaccacattccctggaattgatctttaccattgaggtgtggctgcccaatgatgggtgtgaaacgtggagatcttagtcagcaaaccaaacttgagggcctatgagcttacttattgacaatcccatacaggatacagtttccgattttcgctcgggaatgactcaagaatttgaaactgctggcaattctctgatacccgctttttttgttccac

SEQ ID NO: 48376 - DNA, 275 bp, Glycine max
  Clone ID: PAT_MRT3847_1468C.1
tatgcaatgctaggtcacggaattaatcgccgggctcactagctgactgccgggctgtcgtcctttttttttttttttcaaactagtagccaccacactatattaatccattcgagaaggccttactcctcagtatggactatggatagtagcctccacgctgacagcttattatgccacacgggaaggaggatattattaatatcctactcgagccatcaattaatgaccatatcgctatatacgaaaggcgcataggcttgtgcaacaaccac

SEQ ID NO: 48377 - DNA, 429 bp, Glycine max
  Clone ID: PAT_MRT3847_14690C.1
ccacgcgtccggtcgttgcttccttcttccgctgaactagaccttcgactcttaccttcttctttgaattgaaccactctttctttctgatgtgaccgatatctcatacatgcccacttgcaggcgtaaaaagtacatgatgagcaaggaccaacatgcgtaagaggaccaccaccacctacctcatggcggaggaggaggcgccgccatcagtggccttaacttatatttgatcaagctcaactagcccaggcccgacaggccctgcagagcttccactacgacgcctgatacttcactcgctgtacccgccatttgagtttcttcgtcgtcgtcgccgacgaccaatgcctgctgttgcctctgccctctgtctgctcctcgcggagcttaggaatagagcagaggcttgctttccgatctgggtgt

SEQ ID NO: 48378 - DNA, 1766 bp, Glycine max
  Clone ID: PAT_MRT3847_14691C.1
cccacgcgtccgcccacgcgtccgctgacctatcttggtagagatttgaagtttaaacctggaaattaatcaaaccattttaatttgcctttagattctgagtcactgctgctatggcgctacgcgtacttcttgtgttggggatgttgctgatgttgtgccttgttaaggtttcatctgatccaaagatagaagaagaaatactggaagcagaagaagaactgcagtttcccgataacgagccacttatcgtgagagacgcgaacagaaggctaatgcaagatatggattgtggtgggttgtgcaagacgagccacgcgtcacaccacgagtccgctccaaacactctagaatttgcatgcactgttcttcatacaatggcattacgcgagcttcttatgatggggatattgctgctggtatgtcttgctaaggtttcatctgatgttaacatgcaaaaggaagaagatgaagaacttcgctttcctaatcaccctgtatgttattttttttccttggcaagatattagtgaaaatgtttctttacttttgtgattttcttatgtgcttgatgtaaccgtatatattataatatccttactggaaatatcaaattctcttcagcttatcgtgagagacgggaacagaaggctaatgcaagacataggtaagcaaaacaaagtattttggatgctttattaggttaactttgatcctgtgcttccggttttaacttttagattcttactaactagtctccttagtgacattttttaaaaaaaaatttaaaaattatcataaaaatcacatgaaagcctaaaaaaacacaagcaatgtaattttatatgtttcgataaatttttttctttagattttttaactaatgtcctatatgttcccataaatgttttcttttaattttttaactaattctctaagaacattagtcgatttttgcctaacttttaagcatgagtacccattatcatttttcattctcaccaatgtatatatcatatatacataaaaagcctctagaatcagactactggatgctcatatagtatacacaattttatcttcaagtatgaaaaattaaaaattaacataagatttaattatttatttgatttctatacacaattttgggttttagtctatatatttagaaattgcctgatttaggtctctaaacatatattcttccatctattttagtcattacacatacatatttttatcttaagacaagtagtaaattatttatgtacttcagtcaaagttattaaatcttaaaataaagaaatgatttttgatatatttgtttggtggtggtgttataaatgactatgattatgcagattgcggaggattgtgcaagacaaggtgcagtgcccattcgaggccaaacgtgtgcaacagggcttgtggcacgtgttgtgtgaggtgcaagtgtgttcccccaggaacttcaggcaacagggagctctgtgggacctgctatactgatatgatcactcacggcaacaagaccaagtgtccgtagagcccggcccattgaaggtcagccctatccaattgggcccttcacacaccgagttgattacaccaagcaaagttagtctagtttagtaaataataaatatgggttatgtacacttttatggatttggattttgcatcttaagatcgtgttctagtttttacctttgttataatgtatcgtattgttggagccaagtttataaattttatatatatttttt

SEQ ID NO: 48379 - DNA, 328 bp, Glycine max
  Clone ID: PAT_MRT3847_14692C.1
caacacacaacattgtactcaaactcgtaagtcaccttaatgaaacatggaaaacataaatatggataaacatcccaaactgtacaattcaaaacctagaaattcaaccccatattttctttattccacaagcataatattccacttaaccgaaccaaacctttccaaggcaaactctatcttccccatcatccctgcataaaacagatcacacacatacccaattgattacactgagacctaaatctgctaaggatgctagcatgcagctcaactactagaatcaaccatgagaatcggatgaagcagatgacggcttatcggacac

SEQ ID NO: 48380 - DNA, 677 bp, Glycine max
  unsure (1)..(677): unsure at all n locations
  Clone ID: PAT_MRT3847_14693C.1
tcgcggaaaatgttaatactaataatttgatccttttactttgagagacagtggcagcggcggtactctcaaattgatcctctcagtctgaggaaggaagacggtgcgttcgtaaaaagtgaaaaagaaatggcagaactgagtttgggaattctaattgatattgttgatgaggaatggatgagagacactctccctgatgatgatcttccactgcccccaacactggttgtaaggacagatgatactgaggactcaaatcaggagacgcaacaagttaatctggatgcttggcacgatcttgcctttggtcaagaatagaagtttcatcattaaccagtgttgtgttttgtacttagtgagtagatggtccctgttatttggacttggcatcttcctttctatttccccgatagattgtaacttatcaactactagtacctgttaaggttatattaaggaattgtggtgtcattgctgaatgttaatgtttgctgtgcctgtcaggaaagcacttttgtatttttgcttcaaggttgaagtaagtttagggcaaccagtgcctactggtatgctctggagtctgacacctgtattaagttatgttaaagtaatattaatatgtttaataataataaaaagtttcgcnttttttancnntagcggccgctctagag

SEQ ID NO: 48381 - DNA, 427 bp, Glycine max
  unsure (1)..(427): unsure at all n locations
  Clone ID: PAT_MRT3847_14694C.1
gcgagcacaggatgccgggcgggttatctttaaacaaaagctctttttcctcgacnacaagagttggtctaaatcctgctacttccacgagtacgatttctgatgggaaagagaagcactctctgagctggtcacagactgcgngaatcatgctgtatgccactcttagctgagttgctgaaacactctactatgtgatataggactgcgtgtcagatcaaaactactcttgtgacatgctgaattctacgatcagtaacaagttcaggctggtgaaaaaccggattagtgctgccactctcctatctgatctaggacttgatgggaagacgtttgtatgtctgtcctttcttgcactctattctactcactgagccgcattgccggtcaaagtgcccttattggaaaaacacttgagcgttggtgc

SEQ ID NO: 48382 - DNA, 852 bp, Glycine max
  Clone ID: PAT_MRT3847_14695C.1
tctcccaccttatctctcttatccctctctatttctttgttcttcaactatcccaagggaactgagagagagagagagagagagaagtcatggacgctgttcttcaaaccagaggccttctctctctccccgcaaaccccgttaacagaatctcactctttaacccttcacaaggtttaaagcacagatttttctctccaaagccaaaaaacctttctgggtcttctctttcctccaatgggttcccaaaactctcaccaagacccaacaatgtctttgcccaaagggaccaaaacaaaaacttgttcttgtgcagggctgaggctgctgcagcctcctttggggaaccagaaagtgagaaacaaaagtttttgggtattgaagttgccaccttgaagaagattgtgcctctggggatgatgttcttttgcatcctcttcaactatacaatcttaagggacacaaaagatgtgttggttgtgacggccagaggaagcagtgctgagattataccgtttctcaaaacctgggtgaaccttcccatggccattgggttcatgttattgtacacaaagttggctaatgtgttgtccaagcaggctctcttctactctattattcttcccttcattgccttctttggggcctttggttttgttttgtaccctctcagcaactatattcaccctgaggcttttgcggataagcttctcaacatccttggcccacggttccttggtcctcttgcaattatgagaatatggagcttctgtttggtctatgtcatggctgaattgtgggggagtgtggtcatatcagtgctgttttggggggttggcaatcagattacta

SEQ ID NO: 48383 - DNA, 139 bp, Glycine max
  unsure (1)..(139): unsure at all n locations
  Clone ID: PAT_MRT3847_14696C.1
tcaccaaaacattatctcattcatttcatcataaatgttttcaacntttaaacaatcatacagggggggctcattacgcgggggcggcctacacccctcaactacttcattcaacactaaaaaatgcccttcaatccaa

SEQ ID NO: 48384 - DNA, 201 bp, Glycine max
  Clone ID: PAT_MRT3847_14697C.1
ctcgagccgctctcatcactacctctgcatttttctctcgctctctgccttccatcactcacgtcatgtccctgccccagatagtagaagatggccgacgatgacgatattcaacctcttgtctgtgacaatggaacaggtctggctaaggctagttttgctggagatgatgcgccacgtgctgtgtttcccagcattcta

SEQ ID NO: 48385 - DNA, 313 bp, Glycine max
  Clone ID: PAT_MRT3847_14698C.1
cggggggttgggtcccgtgagactgcgtccaagacaaaaccaaggggcccgacaaggccaccaaaccatctgaatgtgttccttcaatctgtggcagcaccctagtcccgcatccgtattgtagcggctgcttcattattgcacacatctgggacttcaattgggattgcactaatggaatcttgcaggtatgcccccgaagagaacggctaatcgatgtctgatgagatggactcttaacttgaggctgtgatgagaagtcgaaaagcattggttgagtgggacagcagattcaactttgctgagaaagatg

SEQ ID NO: 48386 - DNA, 514 bp, Glycine max
  Clone ID: PAT_MRT3847_14699C.1
cgaatttgcacgcatacgtctcattaaactcggctcgaggttaaaaatgatggggatccaaactggaacctcagtacgatcaaagatagggtacacctgactggggacacctcttgcaggtccaaactctaacggcacaacaacataaccatggatctgaagctgccttagcaccaactacttgcaccataaagatttgcagagcagtacattgtagcacacctgaactccagagattgtcaccactgacagatacgagaccaatgaacacacataaaacatcacggtacaataaagcacctgaggatgatgtagaatccagtgcatgtcttaacatgctatacgggctactggtgactgtacagcgtcaccctccttaagctcatgtggctaacaactcatggcctactacaggacctaagatacaaaccaaagaggtctacaagaagcgagattgggactaacactacggaggctatcacacataagcggatacagggaacctgttatactc

SEQ ID NO: 48387 - DNA, 181 bp, Glycine max
  unsure (1)..(181): unsure at all n locations
  Clone ID: PAT_MRT3847_1469C.1
agatnnagngtcannatnaanacanaaangaggtcttcnatattgttccattccacactanttcattctgnccacgcctactactaatntctctgatagtgattcatggcnttagcacttncctccactggnttgtcaagccttccanagaggtctggccctttgggctnaatnactagcg

SEQ ID NO: 48388 - DNA, 211 bp, Glycine max
  Clone ID: PAT_MRT3847_146C.1
tgaaaatgcggaatcctctgcatgatctggaatttgtgttttctttcgtttgttcgtttgtttaattcaataaaggaaattagacagagcatactcaacaagagggctctatatgatgttcctcttgacatatgttccgagtccaaatcgattttgtcagttgatgacctcattgcttcgattgctgatcagtgctattgagtctattgga

SEQ ID NO: 48389 - DNA, 428 bp, Glycine max
  Clone ID: PAT_MRT3847_14700C.1
acgctgtgccggcccgcgggccccggtccggggttcgcgccacgccccacgtgctctttcaaagtgttttctaagtgcaggagaggagaggacccgtgccaaccctatcttgttcttcttcgtttggaatcctttggtaaccttgatggctccattcgtaatctggtgcgaagaaggttcatcgagaataataaggtatagagctctattgtgaaggacaccgagactgcgaatcaggccgtgggcaaccactaaaccaccgaacttgtttacgagaccaggagtgggacctatcaggggatagaggaacccaaatgcgtaaactaccgatgtaagaccaagacccatgttacaagagtgggggtgacgcatggggacaggggtggatacaacacatctaccctcaccagttgtgtgatgcgtgacag

SEQ ID NO: 48390 - DNA, 1159 bp, Glycine max
  Clone ID: PAT_MRT3847_14701C.1
aattcgggccagaattcgacagaaggaggcgtgttgtccggtttggcaataaaaggaggagacgacgacgcggggaatctccggtctccaccgacatcccttctcttccaaatcctgtgatcccattccaatccgttccgttcagctcaatctcaaaatctcaatggccgataatgagcaaccgaataacgaggaggcaagtcctcttctccaccagccccatccccaacccaaatccgaaccaccaacgccacctgagactcccgagtttctcctcggctggaccgctgatgggctccctctggcccacgccagcgtcgtgggccagcccatgggccgcgccccttggaactcctccatctgcgcctgtctcggccaaaacgatcacttctgcagcagcgatctcgaagtttgtcttcttgggagtgtggctccttgtgtgctgtatggaagcaatgttgagagacttggatctgctcgtgggacatttgccaatcactgcttgccttattctggaatgtatataattggaaattcctgctttggttggaattgccttgcaccctggttttcctatcctagccggactgctattcgtcgcaggttcaatttagagggaagttgcgaagcacttaatagatcatgcgggtgctgcggaagcattttggaagatgaggtgcagcgtgaacattgtgagtcagcatgtgacttggcaactcatgtcttctgtcatgtatgtgctctttgtcaagaaggtcgtgagctccgtcgtaggttacctcatcctggctttaatgctcaaccagtactggttatgattcccccaggagagcagaccatgggacgtgaggcttgaaaattttctccttcatcttggaagtgctattcgtgcgtatattaccgttgtcttgctctatattatataacttgatgttgtcgaaccgtgtgatgactttattaaaagagggccctttattattattatttttttttttataaataagaacatgaaacatcatcataatttctgtttgcttccctactgttttgtatcatatatggatttgaaatgatattggagaaatttttctcctagtgtctatgccctaattacattccttaaaaaaaaaaaaaaaataaaaaaaaaataaaaaaaaaa

SEQ ID NO: 48391 - DNA, 427 bp, Glycine max
  Clone ID: PAT_MRT3847_14702C.1
agacgacgacgcggggaatctccggtctccaccgacatctcttgtattctcttcacaatcccgtgatcccatttcgttccgttcacttcaatctcaatggccgataataagcaacccaatcacgaggaggcaagtcctcttctccaccagtcccaacccaaattcgaaccaccaacgccacctgagactcccgagtttcttctcggatggaccgctgatgggctcccgctgggccacggcagcgtcgtgggccagcccatgggccgcgccccttggaactcctccatctgcgcctgtctcggccaaaccgatcacttctgcagcagcgatctcgaagtttgtcttcttgggagtgtggctccttgcgtgctgtatggaagcaatgttgagagacttgaatctgctcctgggacatttgccaatcact

SEQ ID NO: 48392 - DNA, 704 bp, Glycine max
  Clone ID: PAT_MRT3847_14703C.1
cgacccacgccgtccgtacggtttgcgagaaagacgacagaaggggctgcttttaatgcgtttgatgcgagttttggatttgatgatgtatttgtaccgtttctgtgcgcctaccacctgattgcgagttaacactgagctagactttttgataatagaattggcggcggcaagcttgatttggaaaaataattaaatcatgagatggatttcgtcgagaatattggctgtgtaagaggacttgctaaaagccgtagatgttgagatgtttttggctgtagggaataccatggttttaaattaatcccggttgcagttttgtcacgatccttgatattgggggaaattgcagttgatgtggccgcaactgcggtcgcggtgagtaaaagaccttgacgttgcagctgcaattgcggttgcagaccattttttaaaaccatggggagtactgaataatttgtttttaagttgcttattatataggatttctcgagtggaaactcgtgagttttgtgtacgggaattattacaagtgaagatagagctatatttgctattctggaatagatttataggttaaatgtgaaagtgatttgctaaaggaataaattgggtgactgaaagaatgggctctcattaaaattgcaaatattagttgctatgagaaactgcagtcattaagaggtggttctgcatatattata

SEQ ID NO: 48393 - DNA, 199 bp, Glycine max
  Clone ID: PAT_MRT3847_14704C.1
ttcgagccgaatcggctcgagagttgcttttacaaatatttattactcagttttgttttgatgtttagaaacacatttgagtttgcaaatctaaatctgtttttttggcaaaaaaaataaaaaaggggggccgccgcaaagtgacttagcggacccgggaataaattcgggacaggtacctccgggcgtccaagctttc

SEQ ID NO: 48394 - DNA, 1730 bp, Glycine max
  Clone ID: PAT_MRT3847_14705C.1
gcttgttggtcggtttggcccaatggaggataggattctggaatggagtcctgagaaacgttctggcacatgtaacaggaaggaggactttgcacgtctggtttggtccagaagatttatcttgatattccacgagctttccatgactggagctccactttcaatgatggagttggcaactgaacttttgagctgtggggccactgtttcagctgttgtgcttagcaggaaaggtggtttaatgtcagagcttgctaggagacggatcaaggtgcttgaggacaaatcagatctcagcttcaaaactgcaatgaaggctgatcttgtaattgctggttcagctgtctgtgcatcatggattgaacaatatattgatcatttcccagctggtgcaagccaagttgcctggtggattatggaaaatcgacgagagtactttgatcgttcaaaggatatattgcacagagtaaagatgttggtttttctttctgaatcacaatctaaacagtggcaaaaatggtgtgaagaggaaagcataaaactgagatccctccctgaaattgttgcattgtctgttaatgaagaactggcatttgtagctggtattccttcaacacttaacactccatcctttagtaccgagaaaatggttgagaaaaagcagttattgagggaatcagtccgaaaagaaatgggcctaactgataatgacatgcttgtgatatctctaagcagcatcaaccctgggaagggccagctattgcttcttgaatcagtaagctcagtacttgaacaaggacagttgcaagatgataagaaaatgaaaaaagtatcaaatataaaggaaggcctatcttccctgactagaaagcatcgtattagaaaattgttgccgttgatgagtaatgggaaagtagcttcgaatagtatctcaagcaattctttaagcagaaggaaacaagtgttgcctaatggcaaaggaacaattcaacaatctctcaaacttctcattggttctgttagatcaaagagtaacaaggcggattatgttaaaagccttctaagtttcttagaacaacatccaaacgcctcgacatcaattttttggactccagccacaacacgggttgcctcactttactctgccgcagatgtttatgttataaactctcaggggctgggagaaacatttggacgtgtgactatagaagcaatggcatttggtcttccggttcttgggacggacgctggaggaacacaggagattgttgagcacaatgttacaggtcttcttcatcctgttggacatccggggaatcttgttcttgcacagaatctccggtttttactcaaaaaccagttggcaaggaagcaaatgggggtggaaggaagaaagaaggtgcagaagatgtatttgaagcaacacatgtataagaattttgtagaggttattactaggtgcatgagaagcaaataagtgaaagaactgcttggtacttgcaatgcaatgctcccattcttttattggattgcacaaacccgagactgttagtttctttgtactactactgagtccaatttatgagaaggattaccagctcctttgttttctttcatttggacaaaataaataaatataaagatgttcctgaaaaaaaaaaaaatcctataaaacgtgaaaaccaagtcattcgttcatttttccttgcctttttttttccctctttttt

SEQ ID NO: 48395 - DNA, 651 bp, Glycine max
  unsure (1)..(651): unsure at all n locations
  Clone ID: PAT_MRT3847_14706C.1
acaattagctatgtttggagctatacggatgtcagatataaactggattcataaacacatgcatacttaaacaatgaatgaaaaagttttagatttttatataagcatacttacaactatatatgtatgtataaacattttgcgtactactttaaaaataatttaacctttaatcaagacttacctgagagtttataacataaacatctgcggcagagtaaagtgaggcaacccgtgttgtggctggagtccaaaaaattgatgtcgaggtgtttggatgttgttctaagaaacttagaaggcttttaacataatccgccttgttactctttgatctaacagaaccaatgagaagtttgagagattgttgaattgttcctttgtcattaggcaacacttgtttccttctgtgaatgtcagttttcataatcagtgcaatatataaaaattggatactatacaaccgtaagttataaaacattctttttaaattcatgtaacctgcttaaagaattgcttgagatactattcgaagctactttcccattactcatcaacggcaacaattttctaatacgatgctttctagccagggaagataggccttcctttatattngatacttctttcattttcttatcacctggtgac

SEQ ID NO: 48396 - DNA, 282 bp, Glycine max
  Clone ID: PAT_MRT3847_14707C.1
cccacgcgtccgctaggatactcatagttatacgaacttttattactaagctctcaaactcatttcaaagatcattaatgttttgtcgtactttcgcagcagttgaaggttggttctggtgaagcttcacagtattttttggcttcttttgagggacaagcaatctcttggagcttctgttttttctttatttggctgtcgttttgtatattatttttagctagtaagtagttttgctgatcaagtgaagcattttagtgaatggtggctcactcaaagttt

SEQ ID NO: 48397 - DNA, 200 bp, Glycine max
  Clone ID: PAT_MRT3847_14708C.1
atactactctcggccgttttggctaagatcaagtgttccatctgttcttatcagtttaatatctgatatgtggaccatcggttcacacgatattaaattaattttttgagggggagggtccactacagtagcaggctattggggctctcatgtgtcgtccatgcgttgcactattgcacgggcctggcgcaccccacttg

SEQ ID NO: 48398 - DNA, 379 bp, Glycine max
  Clone ID: PAT_MRT3847_14709C.1
agcagaaccagtgaagagaaggctctacatcaaagggatcccaattcattcttcatcttcctcttcttcactatcttttatggctcctaacaagctcaattcctcagtaattatattcccatcttccatattttgatcatgtccttcttaattttgacgtgaatttgatcttaattgttatttgggttcatgtgtttttttattgctagggtttttctttaattgggatggttacttcatgtcccattttgaggtttggacttgtgctcctggaatttgggagtctgggaaaccgtttacttaactgttgcaattgaccacacttattcatgctagcaaaattcaatctgaagagaaaaatgacttatagttaaaattg

SEQ ID NO: 48399 - DNA, 281 bp, Glycine max
  Clone ID: PAT_MRT3847_1470C.1
ggggccaacttgggctttggacaaatgtattggttttgggaccaaaattatcggttaaaaggaatttttgggaattaaatttttaataaaaaaaaaatggccaaaatccccctttcaaaataatttatttttaggaacttccttaagggacttgtattgaaaaggttttgaaaggggggccattatggataaatttaggggcaaagggttaaattaacacattttggattataaacccgaacaagcttgttccggaaaaactttaattaaaccaatatttg

SEQ ID NO: 48400 - DNA, 510 bp, Glycine max
  Clone ID: PAT_MRT3847_14710C.1
acagctactaagcgggtgcccctttcttttttttcacggaattatattattaaatccgggcatggatacgtacacggggaacatgaaggctaggagttaagccgtatagcgcagctttagtctatgctggatctatttcttaggcacatgtagaatcgaaataataagagaaatgctccagatattctggagcgatataataaacattgtataatggaggttgggccgctagggacacatcttgtccatgaaattggcccttttcaataataagcaatatttattggctcctaaaaaaattaactgcaaattaatgacaggcatcttttggaggagaaaacaatttttacttgacgggcttgacaaaccaaatcaacatgtgatagatgcgcctcttttgcactcttaacagttgctttatcatgatcattggaccggagaggccatccatgactaacaccacggtatagctccacaaagctctcaaactcagcttttacagacaacatt

SEQ ID NO: 48401 - DNA, 1132 bp, Glycine max
  unsure (1)..(1132): unsure at all n locations
  Clone ID: PAT_MRT3847_14711C.1
tgcaggntaccccggtnccggnnaattcccggngtcgacccacgcgtccggtatgagggggttgaggaggcttattatgcttacagggttcgcgatcggttgaggaaggaggtgttggtgcctttgaggaaggtgttggagttgcctgaggtgtttataggagcaaatcgttgggatttgattccttataatagggttgcttctgttgctatgaaattttataaagagaagtttttgaagcatgataaggagaggtttgaggcttacttggaggatgtgaagtcagggaagagtaccattgctgctggtgctctgcttccccatcagattatagggtctttgaatgatggggatggtggggatgtggctgagttgcaatggaagaggattgtggatgatttgttgaagaaggggaagatgaagaattgtttggctgtttgtgacgtgtctgggagtatgagtggggtccccatggaggtttctgtcgcattggggttgttggtgtctgagttgtgtgaggagccttggaaggggaaggttgtaactttcagtgaaaaccctcagcttcatttgattgaaggggatgatctcgggtccaagactgaatttattaggaacatggagtgggggatgaacactgattttcagaaggtgtttgatctcttgttggaggtggctgtgagtgggaatctgaagcctgatcagatgatcaagaggttgtttgtgtttagtgacatggagtttgatcaagcatcagcaaacccttgggagacagattaccaagcaatcactagaaagtttggtgagaaagggtttggtgatgcagtgcctcagatagtcttttggaatctgagagactcaaaggctaccccagtgccagccactcagaaaggagtggcactgcttagtgggttttctaagaatttgctgacactgttcttggataaggagggggagctgagccctgaagaagccatggaagcagctatttctggcccagaatatcagaaactagttgtgctggattaattagctactgtggcgagggttttctttttctttttctccgatgctaactaaataattaaagaaatgaaaatacagcatatttgatacacttctttgttttatt

SEQ ID NO: 48402 - DNA, 298 bp, Glycine max
  Clone ID: PAT_MRT3847_14712C.1
aattctgctccagcaggcaacctaaaccgttttttgaatgctgccactctcaaccatttcgcggggctggaagaggcatagagggagaaagctgggaggcgcatgcgtcactgtgctacataaacaaagagagtcagggcatgagccctacctcgattttggagtgaagcttttgatgcggcttacaaccgcttggacagccataatactatcgatcgaaaggctactgactccgaaattgccaagaaagacatccattctttttctctgcacgacctggcatcacatcccattgtgc

SEQ ID NO: 48403 - DNA, 342 bp, Glycine max
  Clone ID: PAT_MRT3847_14713C.1
ggttaaaaaccaagcttggaaaaaaaatcgccctgaggaaagggacaccaaccgaacttgtggcttaccaacgggccttttaattgaaacccaaaacctgggcttgggaacctttttgggccaaacacgacccttaaggaccggacaggtaccctaaagggaatagggctttgcatgccaaagggccaagtccaaggggttgaaagcccaaacggtaagtaccgaattctctaaacttaagggtccaaaaagggctgccaccggagcgggcatcccgcaagccatggtggaccctcaaatgggcccaagtggggacccactcagctggctttcaaggaaacc

SEQ ID NO: 48404 - DNA, 663 bp, Glycine max
  unsure (1)..(663): unsure at all n locations
  Clone ID: PAT_MRT3847_14714C.1
atttcgactcggttcggttgatgtttggactatttttcttctctctctgtctctctgaggactctttgtgtttcgactctattttctccaaacacaacaacaacaccagaggcagaggcagagagaaacagagagagaaaggagtaacaaatagttgattatttcaaagacaatgaacaataaagatggaaaacccgtcatccaaccagacaagagcaggattgtccctatggcaatcatatttgtggtgctatgtggatcttctttctatatgggtataatcttttgttctgagaaggacagatttgtggcaatgtacaaccagaactccattgaatcccccaaggagtcatcaataagttctctgcaaattaaatacacgagttttcctgaatgcagcgctgactaccaagattacactccatgcacagatccaaggagatggaggaagtacggctcctatcgacttgtgttattggaacgccattgccctccaaaatttgagaggaaagaatgcttagttcctcccccagatgggtataagcctccaattagatggccaaagagcagagatgaatgttggtatgggaacgtccatatgactggattaccaagcagaagtncaatcagcattggtttgaaaaggaaggggagaaattcatc

SEQ ID NO: 48405 - DNA, 793 bp, Glycine max
  Clone ID: PAT_MRT3847_14715C.1
ccaggctcgcgctcggttgttgcatggactatttttcttcttactagttcctttcttcttcttcttctctctctctctctgagcactgtttgtgtttcagccaccccccatttttcattcttccaaacacaacaacagaggcagagagaatcagagaaaggagtattaaatagttgattatttcacagataatgaacaataaagatggaaaaccagtcacccagccagacaaaagcaggattgtctctatggcaatcatatttgtggtgctgtgtggattttctttctatatgggtataatcttttgttccgagaaggacagatttgtgacaatgtacaaccagaactccattgaatcccccaaggagtcatcaataagttctctgcaaattaaatacaccagttttcctgaatgcagcgctgactatcaagattacactccatgcacagatccaaggagatggaggaagtatggctcgtatcggcttaagttgttggaacgtcattgccctccaaaatttgagaggaaagaatgcttagttcctccccctgatgggtataagcctccaattagatggccaaagagcagagatgaatgttggtataggaatgttccgtacgactggattaacaagcagaagtctaatcagcattggttgaaaaaggaaggggagaaattcatctttccgggtgggggtactatgttccccaatggtgttggtaaatatgttaatttaatggaagatctgatcccagaaatgaaagatgggtccattcgaactggcattgatac

SEQ ID NO: 48406 - DNA, 1159 bp, Glycine max
  Clone ID: PAT_MRT3847_14716C.1
cccacgcgtccgacggctgcgagaagacgacagaaggggatatttctaactcccaaccacttccttatcttattcttctcctcctccatctttgagattctcacggaaacttctgaagatggctggcatagcattcggaagcttcaatgattctgtcagttttgcctccatcaaggcctacattgctgagttcatctcaacccttctctttgtttttgccggtgttggttcagccatagcctatgctaagttgacatcagatgcagctcttgatccaactgggttggtagccgttgctatttgccatggttttgctctcttcgttgctgtttctgttggagccaacatttctggtggccatgtgaaccctgctgtgacctttgggttggctcttgggggccacatcaccatcctcactggtctcttctactggattgcacagcttctcggctccatagtggcatccttactcctcaagtttgtcactggctatgatactcctatccacagtgttgctgcgggaattggagctggtgaaggagtagttacagagatcataatcacatttggattagtgtacacagtgtatgccacagcagcagaccctaagaagggttcgttgggcacaattgcacccattgccattggtttcattgttggcgccaacatcttagcagcagggccattctctggcgggtccatgaaccctgcacgctcctttggccctgctgttgtcagtggtgactttcatgacaactggatttactgggttggccctcttattggtggtggtttggctggtcttatctatacctatgccttcatccccaccaaccatgcacctctcgctactgaattttgatttcatggtccacattgttgccttgtgttaatttctgattcgtaataaagttggagtacgtcattgttttctagcttgtaagaattcatgaggttggtaatctagtttttctttttcttaaaaattatatttttcagatttatggctttccctagtatagtgttgcattgattaacatctatcaaatgaggagaagcttacagctgtttttaggtaatcattctcaacttttatctacatgtctggatattaccctgaatgttaagatagtataaaaacttttgaactcccctgatt

SEQ ID NO: 48407 - DNA, 202 bp, Glycine max
  Clone ID: PAT_MRT3847_14717C.1
ctatataaattatataaggtggttaacctttttcttaatgagtgtggggaggtataaaattccaagccggaaaaaattggatgagaaagaaacagacagcaactgaagcattttaagaccaactaagaaatacgcggagtgttggaaaaaaaaaaaaaacatgacctcggggggagagagaaaatgctaaacccttactagg

SEQ ID NO: 48408 - DNA, 604 bp, Glycine max
  unsure (1)..(604): unsure at all n locations
  Clone ID: PAT_MRT3847_14718C.1
tattcacagtgttgctgctggagttggagctggtnaaggagttgttacagagatcataatcacatttggattagtgtacccggtgtatgccccagcagcagaccctaagaagggttcattgggcacaattgcacccattgccattggtttcattgttggtgccaacattttagcagcagggccattctctggcgggtccatgaaccctgcacgctcctttggccctgctgttgtcagtggtgactttcatgacaactggatctactgggttggccctcttattggtggtggtttggctggtcttatctatacctatgccttcatccccacccagcatgcacctctcgccactgatttttaatttcatgatcccccctgtgttgccttgtgttaatttctgatctgtaataaaggaggaaaagtaattaactcttgcttttccttcttttcatctctccgctttatccttttttttttttttttttgcttttaatgtaaagttggagtacgtcattgttttctagcttataaaaattcatgaggttggtaatctaattttaaaaaaaaaaaaaaaaaaaaaaaaaaaagcggccgctttagagga

SEQ ID NO: 48409 - DNA, 958 bp, Glycine max
  unsure (1)..(958): unsure at all n locations
  Clone ID: PAT_MRT3847_14719C.1
tccacgcgtccgcccacgcgtgcgcccactcgtccgaccacgcgtccgcccggctcgaggttttcactttcagactctcttttttccccgaacaacaaaacacgtcactcgcagtgtgcctctcacgccgacttcctatggcaagggatagctgcctcactcgtgtcaccgccggcgccgctatgggcggcgctgtcggcggcgccgtcggtgctgtgtatggaacatatgaagctattaggtacaaggtgcctggactattgaaaattaggcatattggacaaactacacttggaagtgctgctatttttggtcttttcttgggtgctggaagcttgatacattgtgggaaatcatactgaggataaagatttgtcctcccccctacttacagtgctttggttgctacacttgtaaagtatgagtagagcagggattttctgcttttttggttttctggatcatggaaaaggttttatggcactactcctatgaaattttgcatttatttctcccaagacattattactgttgaaatttctttgctggggctttccttctacttttttgattcctcattttcttccgagacagtgaattgctcttgcaataaaaaggagtgcagatgtgtgtgtttacgagaaagccccgccacgngggggggggccccgccccccccccccccccgacaaacaggaaaaggggggggggcccngggacctcccccccccccccccccttacttacagtgatttggtttgctgcccttgtaaagtatgagtagagcagggatttactgttttttcagttttcctggatcatggaaaatgtttcacagcaaaacaactatgaaatttctcatttttttccctagacagtactgttgaaatttcttggctggggctttcctacttttgattcctcattttcatctgagacagtgaattgctcttgcaat

SEQ ID NO: 48410 - DNA, 165 bp, Glycine max
  Clone ID: PAT_MRT3847_1471C.1
atttcatgtaagatactttttatgtgctacataccttagaaatattgactatggtatctgaagtataaagggacatgaagctcccactcgactaggcatgcttctgcaactagaacctatactaacgtatgggaggacttgcatatttcataacattactagaaa

SEQ ID NO: 48411 - DNA, 936 bp, Glycine max
  Clone ID: PAT_MRT3847_14720C.1
cggatgcgtggttggacgcgtggggggagattacactagtccgttgggcggtggtaatggctctgctgggggagggaggtctcggctactaactggctcggaagcttgacacgtgcggcgtgtggcgaacctggctcggcgacgccacctacgccaacttcgcacccttcctgtcttccccttccgcttgggactccttcataacctacaccactcacatccctctccaactcagagtgcgcgccctcctcttcgataaagccaccgttttcctctccctaaaccctaaccctaaccctaaccctatctcctatctccaacgtctcaaccctatttacctccaattacacgccgacgacgtctacttcaccctcgacgccgactccaagaatcagtcaaagccttcttcctcccaacaacaaaacacgccactcactcagtgtgcctctcacgccgacttcctatggcaagggacagttgcctcgctcgtgtcaccgccggcgccgctatgggcggcgctgtcggcggcgccgtcggtgctgtgtatggaacatatgaagctattaggtataaggtgcctggactattgaaaattaggcatattggacaaactacacttggaagtgctgctatttttggtcttttcttgggtgctggaagcttgatacattgtgggaaatcatactgaggataaatatcctcccccccccccccccccttacttacagtgatttggtttgctgcccttgtaaagtatgagtagagcagggatttactgttttttcagttttctggatcatggaaaatgtttcatggcactactactatgaaatttctcatttttttccctagacagtactgttgaaatttctttgctggggctttcctacttttgattcctcattttcatctgagacagtgaattgctcttgcaat

SEQ ID NO: 48412 - DNA, 1376 bp, Glycine max
  Clone ID: PAT_MRT3847_14721C.1
tgtcgagccgactcgggagagggcgattctggaaaataagatggaaggattacaaagagtatagagggaagggagggcaaagccaaaggggatttcgttgtgttgtgttcctccgccagcgttagagatgagttccgccgataccgtcaatgcgagttctgctgagtctgtcaaagaacctgtcatagggtcaagtctggaagcaaaacaggatgatactgaaataaaatctcaagttgatgccatgtgggaacaaatgaataaaggagtatctaataagaccctcaacagatttacaagcaagcctaattccgctccaaaaaaaactgcaaagaagacatcatctaactggatgtcttatttggccttggcaccgaaggcaactgaatcccttgggcaaggtgcttccaagaatggacctggcattctgcagagcagtacaagtgatgaagccaagaagcttgctgctgctgctcttgcagcagtgaaagatgatgctgccatggctgcctcaagcagggggaaacttgtgattactgaggttcgggactttgctggtcaagaaattgaagttaaaaagcttgtagattctgactcaaaggaggcaatggaaagagccaaagctcctccaccttctgcagtggatactgtccttgaacaaatcaagaagaaacagaagctcagtgtactggataagaccaaaaaggactggggtgaatttaaggaagaaaagagactggaagaagagcttgatgcttataagaagagttctaaccagtatttggacaaggtttctttcttacagcgagcagattaccgtgagtttgagcgtgagagagatgcgcgactggctttgcaatccaggaagcgaccagataatatgcaagaggatgactgaaggtagttgaagactggagttactacctttggagaattatgtatggttttgtagtgagttatagttcctgggaaggtcttggtctctcaaaagaggtaaaagacctttgatcacattaaatggggtattgatggattttgaggtttgagatttgaaatgcttttcaatgacatggtactatatgtggggggtaaaaatagggtgctagagagaaacaagtataaattttagactgacattagttcattcccgttccttgagagcctcagaagacattcactactcgctgaaggtagttgcaaagaactcattttgtgtctgtccattatttggctgattgaattctcctctaaagtaaatatcgggacacgattatcttgcaaagcaattcgaacttagtttcaagacataacaaatcgtgtgcatatgcgaaacctaatatagtatggtgttattattaatatctaagttttatgtg

SEQ ID NO: 48413 - DNA, 359 bp, Glycine max
  Clone ID: PAT_MRT3847_14722C.1
cgggccggaattcccgggtcgaccacgcgtccgccttaccctacctttgacgtatcgaaaccactaaaacgggattaggacggagcaaactggttggaggaacctttggtcttacagagtcaagttgtatgtctggattagacgatcaaattcctactgccttcgatccttttgctgatgcaaatgctgatgactcgcgtgctgggtcaaaggagggtgtgcatattcgcgttcagcaccgaaatggggggaaaagcctgccaaccgttctcggatctggaaaagaattcagctattgctcgatacgtaatgacgctcaacaaagagaactgttgctatggaacagatgggtaggaccc

SEQ ID NO: 48414 - DNA, 368 bp, Glycine max
  Clone ID: PAT_MRT3847_14723C.1
tttgtttttttttttttttttttcctttttttcccttaattttttttctttttttttttttttttttttctttttatttaaaaaagggccaggggccaaaacctatttaatgggaaaaaccttgtctttatttcccccacccaccccaaattccaaatttttcctctaaaaaaaaaacttggttcaaaaaaaccagcccctccccccaagggtaattaccctcttttaccgggatcataaattcccgggcccaaatttatgtccccccttgttatcattttgggccttttttgccttaaaccagctaaaaccttttatgggtttatcaacatttgaaacccccccaagggataaccccccaaattttt

SEQ ID NO: 48415 - DNA, 558 bp, Glycine max
  Clone ID: PAT_MRT3847_14724C.1
ggagaagacgacagaaggggggaaggaggaatggcaggaatacacgattacacagagtagagagggaggggagggcaaagccaaaggggtttcgttgtgttgtgttactccgccagcggtagagatgagctcagccgataccttcaatgcgagttctgctgagtctgtcaaagaacctgttatagggtcaagtctagaagtaaaacaggatgatgctgaaataaaagctcaagttgatgccatgtgggaacaaatgaataaaggagtatctaataagaccctcaacaaatttacaagcaagcctaattccacttccaagaaaactgcaaaaaagtcatcttctaactggatgtcttatttgggtttggcaccaacggcaactgaatcccttgggcaaggtgcctccaagaatggacctggcgtgctgcagagcagtactagtgatgaagtcaagaagcttgctgctgctgctcttgcagcagtgaaagatgatgctgccatagctgcctcaagcagggggaaacttgtgattactgaggttcgggactttgctggtca

SEQ ID NO: 48416 - DNA, 203 bp, Glycine max
  unsure (1)..(203): unsure at all n locations
  Clone ID: PAT_MRT3847_14725C.1
atctgagtcnaatgctccttaagtttaaggggtaagtcctcaacgaaaagccataactcttaaccgttcggatcccatatacgcatgggctacttcactcctttctttatttcacgttttctcgggaaaattagttgcaaatagatttttgcccataaacggaccattaaattgatcaactcgcttaaaccccgtatttttta

SEQ ID NO: 48417 - DNA, 471 bp, Glycine max
  Clone ID: PAT_MRT3847_14726C.1
gtaaatatccatatatcccatcatgaggataaaccatgatgaggtttggttaatgtaacacttttaggggaactatggcatcttacaatggtgtgtttggaatacaggaaaggaaagagcgaggagagaaaatatgaatagcaaggcattttattttgtgactgaaagaattaaaatggaaagaaaggggatagaaaaactatcttttagaaataaaattcaagggcctgtttactttaagagaatatttaattgttttatttttttgttttcacttttaattacaaaaatactaccttgtttcacattatttcttattttcaaaaatttgtacaagaatcattaaaaacaattttttttattgttttatgttttcattatttcctatatacacttttgaaaacaaggtaacatttttgcaattataagtgaaaacagaaaatgtttcctcatagtaaacttgtcccaaat

SEQ ID NO: 48418 - DNA, 347 bp, Glycine max
  Clone ID: PAT_MRT3847_14727C.1
ggtcagccaaagtaaaatattattttgtaaaattgggcatcagaaatacacatttcaaaagggtaccaaataaaaaaaacttcctatcatcttgttgactatctcatgggtcccccattccttggttacaaacttgatggcaaatccacaaaattctgcttacccccttggaaaatccagttccaaaaacttaacttcacccatgaaaaaggccaaacaccaggggttgccttcgttaatgaattgttcatctttaacaacttctcaaccaaacatggtataaatggttcattctatgaagcatgacctgagattttcaaaacttggaaagaatttcctttttcttt

SEQ ID NO: 48419 - DNA, 524 bp, Glycine max
  Clone ID: PAT_MRT3847_14728C.1
ggttaaagggaaggcataaacatccccccgtcattccctcatcacctgtattcccccaactacctcaaataaagggtgaaattacaataaaaaaaatcattgactatggcacgaattaattcgggaactttttaacgaaaaaggaaaatgcggcaatatattggaatctgcaagggcatagtaacgcttaggaaaattatgatacatgtacattccttaatacactaaaacagaccagtggccattaaacaaaaaccccagaaaccaatcacaaacaaataggacaagatactattcattgataactgagaatgatcaatggcatcacgcacaccattctggccacatgtatgggactgagaacaccctcattgtactgtaagccacaaaaaagccccacaaacagggtggaactagaacgagatcctacaaagggcatgaattgtaattccttcacatatcgcttacaggttctcaccacccttacgaaccgaggggggacagatcaacacccgctgcatata

SEQ ID NO: 48420 - DNA, 221 bp, Glycine max
  Clone ID: PAT_MRT3847_14729C.1
gaccaattgaacaaatatacccaaagccctatacaccaaaaccctaaaaaacacccatttgattcatttccaatggcaaccctcaaggttgcatttttggctgcattcccctgcatggttttgttaattcaaccaatggaaaatgcacctaccacttccgggaaggtgacaattacccggcccaattgcaccggttacctcaaaaaggaaggaaccccttc

SEQ ID NO: 48421 - DNA, 123 bp, Glycine max
  Clone ID: PAT_MRT3847_1472C.1
caaaggaggcaaatccatttttcgttaaaaagaagtgacgagatgtattacaagattgtttgcacctgacccgatcgtcaggttataaaaggctatgaataaaaaccggattgataatttttt

SEQ ID NO: 48422 - DNA, 496 bp, Glycine max
  Clone ID: PAT_MRT3847_14730C.1
cctcgagccgattcggctcgagatttcttttgagtccaattcgctggtggcaaaggcgaaagcgattgtggcgccaccttcgagtttggtgtcggttcctgatttgaatgtgatgccaattgcagattcggatttggtttatggggggaggagtaaaagggtttcgggcactgatggtgattattctggtttgcaattgcagcaaccggttagaatgtcttcggttgttgttgtggatttaaataggtcgccttgcaaagggaatgatagcttgggctcgaggaaggaggttatggggtcgaagaagaagaatgttgatgatggttcttcccggtctagtgccagggaggccgatggttcccgtgggaaaaaggaggtgccaaattctgttaaggttggcaatgttggttctggtaaattgaccttgaaggttgtcaagaagaagaaaattgttaagagagtggtgaagataggtactgcaagttctaagtcatct

SEQ ID NO: 48423 - DNA, 262 bp, Glycine max
  Clone ID: PAT_MRT3847_14731C.1
caatttttggttggtgcgtccattcctgaatatattctccagctgcccaatgaagtcatgagcagcccaatgggagctcttatatgtgagttattgcatttccatgtcacttacctgcatctacattattgcatatttttcattttcaccctttgttcattttcattcatctttaacaaactatagagagttttaagcagaatcttatttagagtgatctttcttcatttatgttcatgtgcgtattaatcttaccactttt

SEQ ID NO: 48424 - DNA, 448 bp, Glycine max
  Clone ID: PAT_MRT3847_14732C.1
attcggctcgaggggaatcttttgctgtgtttgtcaaggaggaagaaatccctaatttgaggaacatactgctgtccatctcagaagaaagatacttagagatgcataagagggcgaaaaaggtgcaagagcattttctctggcatgctgaacctgtaaagtatgatttgtttcatatgcttcttcattcaatttggtacaatagacttttccatataagccggacatgacgatatgaattttggagacaagtcactgtgattgatagcttgatgatgtatagattgtttgagttaacaaatgaagcaagaacaatatggttagagaaaaagttcattgattctagagaaaatgttattgtttgattcatatccctagagaataattgattcataataatgttagtgtttgatcatctagtgaaatcatgaagatctgtctttaatta

SEQ ID NO: 48425 - DNA, 379 bp, Glycine max
  unsure (1)..(379): unsure at all n locations
  Clone ID: PAT_MRT3847_14733C.1
aaaaataaaatttcntcgaaacttttatactattttactttcacactaaccnaaacaaaagagaggttattctttaaaaggcgcgcccacctaaacanataaattactataccaaaaacaacatataacccattccaacactcctacatcatgccattgatcaccttattcaatcaaaattaattccacagtacaaaatgccaaatccttatataatcaactctttttaaaaggacctaattttctcatccattccttaaaccaccacattttgaccaacctctatccacccttcttatctctcaatcaactattgctttttcacgtatccctacgagttaaaatgattcaaactacaaataaccactcatgctctcat

SEQ ID NO: 48426 - DNA, 258 bp, Glycine max
  Clone ID: PAT_MRT3847_14734C.1
aattcttatctatagggaagtttattgctgcctgaggcaaggtcaaagaaacttctcattggaataagaatagcgcctccctttcaaatcattttccttgcccatgcaataagcagagcgcatttcacattttcccaggaacacaccgggggggagcccccgcacgcccctcttttaacggaaaagggcgcgtacctaattatacctgggggccaccccggcccttgtgactcccggggggaaaggggactgaaaacc

SEQ ID NO: 48427 - DNA, 330 bp, Glycine max
  Clone ID: PAT_MRT3847_14735C.1
aacgaacaaaaattatactcagaatatgagtgcttttatgacacaacctatgctaaataacaaaattctctattttgatcatgctggatttaacactgttaaattgaaaatatggcttggtcaatttgtgcataaaatatatacacattgtctgaaaggcttgaacaactacgattcccataagtaggaaacgcctgacttcttctacctttgaggaagtgtttactcaaataattagcttgtacctgttctgatggacaacgcttttttttgcttccggagtgctctactaactccatattaccattagaacccttggaagatgcatgc

SEQ ID NO: 48428 - DNA, 307 bp, Glycine max
  Clone ID: PAT_MRT3847_14736C.1
catttgggatcttgcaaatatatatatatagcaacggacagttcaacagatacgtatgccaacttggtaaaagaccagcgacacacccaaactagctaagttgtgattataagaaagacggaagctcttgataagcccttcctcctgctggaagtatgttgaaaagtgcttactaaatctagggtccgatcggcatgcaataggcatgccactatacagattagttgcattcagtttcctttcctgtcaatagaatataacacaataattggtgaagtactttatacactaaacatgtcgattttgc

SEQ ID NO: 48429 - DNA, 178 bp, Glycine max
  Clone ID: PAT_MRT3847_14737C.1
gaataaaggaatgcctcaaaacttaattcacaatacaaacaagtatgtcatgagttcatcattccaattcaatgatcctaacttggatatttagaagcaaattgatgaaactctacgtaaattgttgtttgaatttttaatttaggtgtccttgtattcttacataaaaaaaaaaaaa

SEQ ID NO: 48430 - DNA, 340 bp, Glycine max
  Clone ID: PAT_MRT3847_14738C.1
cccacgcgtccggcgacgcttacacacatatgtgggtcagacttgtgttcgccgatacaacattcacggttttccttgtgaattctactatgagggaccacgcacaagaagcaccatctgcttgtacagttgaatccccaacgtatcacggtgacaccttctacaccaccaagcgctcggatctcttgctgctcctggaaggactcttacgccaccacttacatatacagattccgatcacattcctacaccacctattggatttggacgaggaggcggaagtggcaacggaaaaagtgcggccggctcacagcgttaaatacggtcaggaaatggtaat

SEQ ID NO: 48431 - DNA, 290 bp, Glycine max
  Clone ID: PAT_MRT3847_14739C.1
acccaccgaattaattccggaaggaacataaaaggttacaaattaaattttacttttaattccagttaaaggcctgaccctgtttttaagtttttaacctaccctttttaggacccctttttgaaaaattaaagcaaaactttttgcaaaacctttaacttttttaagcttgggacgatggaaaatttttttttttcagcaagggaaaaagcaaaaccctttgggagaagccttttaaaatatttggcgagaatttccccctaaagatttattttttttccgacattttt

SEQ ID NO: 48432 - DNA, 482 bp, Glycine max
  Clone ID: PAT_MRT3847_1473C.1
tccaggaaggtttcccgtcatcactgtatgacgtcctccttctttgggggggggggggggggggggggggggggggggggggggctaggagaaataggttgtagggtagagggagtgcgcgtgagaggccctcttaaagccttaatggaagcgatgtatcgaggatcccaaggagtatcctcgtgatagaaagagtatgacttgtaagggccggctaaataaaaggcggcagcaatacgagatgccatttaggaaagacctgaaaagtaatggagtaggaagtataatagccggttgtaagaatcgggtgatgaacctgcctgtattcaagacatcgtatcagccgtttgggggtgatgttattatgtaccagggatccttattgctagggggacggcaattgggaagctgtgttaatacacctgtaaggcgccagggtagaatacctgcatttggggcctccgtggtggaactaggggggt

SEQ ID NO: 48433 - DNA, 661 bp, Glycine max
  Clone ID: PAT_MRT3847_14740C.1
attacttcccctctgggctcgagcaacagcttcccctttctccccttctccagaacctccgcgtcgtccgatgggaacagaaggttacacttacatggggcgcagtttgaccgaactccgcatcaacgacgattcctcttcctccgccttcagcgactgcaacagtgacagatctggcgaattcgccaccgcttcttcgcagacgcggaggtttctgatcgcctgcgccaccgaaaattccgacgacttgattcgccaactcgtttctgatctccactcctcttccatcgactatcagaaacaagccgccatggaaatccggttactcgcgaagaacaagccggagaatcgcatcaaaatcgcgaaagccggcgcaatcaaaccgctaatttctctcattttgtctccggacccccagctccaggaatacggcgtcaccgcgattttgaacctctcgctctgcgacgagaacaaggaggtgatagcctcctccggcgcgatcaagccgctggtccgcgcgctgggcgcgggaaccccgacggcgaaggagaacgcggcgtgcgcgctgctaagactctcgcaggtggaggagagcaaggcggcgatcgggcggtccggcgcgattccacttctggagagcctcctggagagtggcggcttc

SEQ ID NO: 48434 - DNA, 1696 bp, Glycine max
  Clone ID: PAT_MRT3847_14741C.1
gttaataaataaaccttattgttgggggggagtgcattatttttgcatagcccaaaatgcaaaccaaactcaaactcgtatcattttgtaccacaaactttacaaagcttcttctccgttacgaagatatttacaaagtttaactctccgtctctcttgaaggacgcacgttgtgttttttttaaccaaattcacaatttttaaacgtggtgtttgtacacactcacgcacggtgagacaccaccaaggtgaataaatttattactgctggcgtctacgccaccacttctgatgtacttcgagcagcgccgttgccggaccttggttgccgcagaagctcaattagtttctccgccttttgcttggcgcgattggtgccggactgagacaaagcgaccaaaggaggaatcgcaccttcgcgagcgaccatggtgcgatacgtcacgctgtcctcgcaaacctgtaaaagaataaccaccgcgatttccttctgcctctgcgtcccaacctcgacgatctccaccagcaccggcacgcctccttcctccaccagcgccaccctcgcctccggcaccgcaaccagcacgctcaccacgtacgccgacttgtccaccatgttcgactcgaagtccgccatcaactccaccagcaccttcatgatccccgccttcaccgctctgatcttattctccttcaccgtgcacagcgagtacagcgccgtcgacgcgtccttcttcgcgcggaacccgccgctctccaggaggctcacaagaagcggaatcgcgccggaccgcccgatcgccgccttgttctcctccacctgcgagagtcttagaagcgcgcacgccgcgttctccttcgccgtggcggttccactgttcagcgcgcgaaccagcggcttgatcgcgcctgaggaggctatcacctccttgttctcgtcgcagagcgagaggttcaaaatcgcggtgacgccgtattcctggagctgaaggtccggcgaggaaatgagagaaattagcggtttgattgcgccggctttcgcgattttgatgcgattctccggcttgttcttcgcgagtaatcggatttccatggcggcttgcttctgatcgtcgatggaggaggagtggagatcggcgacgagttggcggatcaagtcgtcggaattttcggtggcgcaggcgatgagaaaccgccgcgtttgcgaagaagcggtggcgaattcgccagatctgtcactgttgcagtcgctgaaggcggaggaagaggaatcgtcgttgatgcggagttcgctcaaactgcgccccatgtaagtgtagccttccgttcccatcagggattactggattaggatccgaagcggaggttcgggttttgggtttgaggttcgggaagaaagaggaagctgaggtgtagcggacgcgtgggtcgacccggtacacaccaaagcaaaacaaaaactaaattcaacaacaacaaaagttaaaaatatataattaatatatatatcgtaaattttaattattgctcaagcatggagcattaaatcaaacccggcaattaaaatattcccaaacccatccaataagattggcatatccgatgcaatcggaatacatgagtccatgctcactatgataacaaatttaattgcacatttaaaagcaatctaatttgcggtgggtggagatccacc

SEQ ID NO: 48435 - DNA, 412 bp, Glycine max
  Clone ID: PAT_MRT3847_14742C.1
agaagacgacagaagggatatgaatgattgacctttcaatcaaacggtatgtaaaatatatacacataaaattacaacttttttgcatcaagtcatcatgttctccaactttccttcataattgtataaaactattggtatccaaattttttaagtactgtggggtacccccgtatcctagaaaaagcctgcaaaaagatagaaagtcattgcggactatatttagattcaaggcttcaaacacctttgatttatcgattgactggttgagttcataacaaacactgtacttgggggtaaactatcacataagaaaaggttaacattgaggaactacatttttggcctgccaatggaacatgttgccagaaaaccttaatagaatttcctacatggattgatgcaagtgact

SEQ ID NO: 48436 - DNA, 808 bp, Glycine max
  Clone ID: PAT_MRT3847_14743C.1
ggctcgagcaaatatgatccagactcatttatccctttaacatacttttggaactttccatgggaaattcaaacatacccaagtcattcaacccaaaagacttttacaccatcgcttgatgaactcatcgtcgaaccctatttcaccaggttttcttctgaatgatgaatcaaagtgaggtaaccaggaagagacttttttcacttgccctaagattatggatatttagaaggagtggtagtatagaggagagaacatatcaatagtgcttccgcaatgaccacatcaacattagtggcaacattctgctagtggaggtgcacttcacatgggcaatatgagaatggtaatatggtttgcatatggaatcatagaaataaatgggttttttttttttgggaaagacatttgataaggatgaactaaaacaacaattcctattcactgcttggtcctggttaaatagccaccacacaaattttgtatactccttcctacaatggtcgattaacccttggcagtgcttaccggagagacgctaacggggggttgggtttgatggtattgatatttaaagggagggtgtgcattgctacttgtctaccacatttattggttggcaaacacatgaagatagaaatacttcatattcttgtgttgtgtgatttctatcgactaagtatggagaatgttttgtctgttatgaattgcaactgccggtgttacactacaaataaagtatgcgttttgcaacattcgatgccaaaatataaataagggttactaaaatgtttttatgacattttat

SEQ ID NO: 48437 - DNA, 420 bp, Glycine max
  Clone ID: PAT_MRT3847_14744C.1
cccacgcgtccatacacgcttaataatggcctcaaatggctccagggcggttctcgtaaccaggtaagattccgaccagcacctacgtctacccgttgatcatgcttagactgctattgctcctcaggcatccaccgccaccaccgcttacatctcaccttccatcaacacctccacatcggccaccacatatcatacgatctacaccagaaccttttcataggaatcatcctcaacaggatgccagcaaacatgttcacagcaacagactgaaacgtggtacgctcttgaaaacacattcacacatcttgtttaaggagcaggggctatagttgctatctcactatcacaaatgcttgcgagcgccataaactaaccatcattgcttccacagaatatggaggtgaatatgcctgtata

SEQ ID NO: 48438 - DNA, 428 bp, Glycine max
  Clone ID: PAT_MRT3847_14745C.1
gtcggttggggattcgaagccgcgccctcttcctcctccctcctcccttcacccttccccaaccttgtatctccttatataagatattaactaattaatgtcatagtacatgagtattttttatccttattaatgtgtgtttggctcgttggtggccctgtttttttattatttggtttcttaatagtcctcttacggcatggaccagatgaacaataaaggcttaatttaataattcgtaatgctatttgaccctaacatcattggcccttgggatcatggcatgcttattagtctatggcccttggataaacttctttataggagaagaaaataaaaaaagtaaaaatgcattgagtttctctataacttgatcaacttatgcaccttagcttttgcaaaagtcaaatgaaaagagcttttgtaga

SEQ ID NO: 48439 - DNA, 205 bp, Glycine max
  unsure (1)..(205): unsure at all n locations
  Clone ID: PAT_MRT3847_14746C.1
gcccattttacttggcatggaccttttgtacaacctattgtattaatgttttttctattcacacncgcgggtgtttgtttgagaatggcgggggtggtttaaactattacttgtcttcagctaatttcttctgttgtttgaatggaataattgctagagcgttaatgatattattacaagactatgattatctttaaggctcaca

SEQ ID NO: 48440 - DNA, 249 bp, Glycine max
  Clone ID: PAT_MRT3847_14747C.1
tctatccggaattcgttgttagctttaaagtctcgtctgacgctgcaggacatttttatggcagtgaagtctcagaatgttcagcgggcaaatacccattgttacctgccgctgggcccgaaacacacgcactcgccaactgcaactcatggacaactgcaatgaatcatcacatgcttcatcaacttacgggaatcccctcggataccatccccggtgcccattgccgttatcgcagagccggttcca

SEQ ID NO: 48441 - DNA, 2027 bp, Glycine max
  Clone ID: PAT_MRT3847_14748C.1
ttttttagttgtaatagagaaaaccatggttcacgttatcgacattattcaatcaaacaagctataacggtatgtaaacaatgaagagaaaaacatgacttccctaatttatcaccaccagcaaacgtgtttccagtagacaaggtatagtttaaaacttaaaaaagttaagcaaggaaaacccttgaaaagtgagaagaaatgttcaagataaacaacaattagatgttgcaaaaatgtctaatgaagtattgaatttcttttagcttccttttggaccaatgaagcagccagtcaagtttgttggctacagttctaaaaatgaaccttgtgatcattccaatccccgcaaatttctaaaatttgatggtccaactgtgtcaataaaccctttgatggacaaatcaggaactgtaacattcttgccgcgcaactcgtggtcaatgaagacaacaaccacagtgatatcatcatggaagaaacgcctaatcccctttccaatcttctgaaggtctttatatctcatttcccttttcctagctgcctcgtttaaagctgctttaagaagtcttcttgcaataccgattcgtggattgttatgaacaatctcagcagcttcctggtttgtcaagtgttcccagagtccatcagatgcaaagataatgaacttatcattaggttttaacactcttgaacatatagaaggttctgcggttagcacaggtcggcggataggttcaggcaggtggaaccgtgggaatgacggatcaaatgagaactctggccgcttcaaatatgcatctcctatagatctggatacctggatgatgcctttaatgcgccaggttccttgcttcataactacaatttgtgaatcttctggatgcaaagacctgagttctcgtctaacctcctctttgctagcgttgtgctctttggtcaactgctcagcaatgatcttgttagatctacctacagaaccaattacagcgcgagagtctccaagattcgcaatatatagcgtccctttccagacaacaccaaccagacaacaggaacccattgctgctatcaatggctttattccataactccttcgaacaagagtcagaaacccgtcctcagtagcagaaacagcacttctgataatatcttcagacatagaaccattttcttgagcaaccctgatgagattaaggaagagatgatcgttgatgaagcgcgaggcttcggcgccgccgtgtccgtcgtagacgccgacgaagacggcatcggagccggtctcgacctggctgtgatcctcgatgacctcgttggcctgaaccaccgcgtaggagaattcgccgcacgagtgtttttcgaggtccttcccccacacgagcgcgtcgccgatggtggacacgtcatcgacatcaccatccttgctcatacgcgcatatcgccgcaccggtctcaagcacgccgacactatccttgccagccacgaaaacatcccacatttccctctctcacggatccccagaatatgaagccggagagagaggaatgaagaggtggatgatgaaatgcacccagatgggggagagggagaaaaacgagtttttttggtgatggggggtgagaaagattggaactttgaaagaaaaaactggtgggtgtggagggaagagtgagaaatgtgacgtgaagagaggaacaagaaggtaaataatgaaatgtacccagatggaggaggtggagaggaacaagatttttggtgatggggacggaaaaagattggaagggaaattcagaaaattggtgggtggggaggggagtgaggcagggtgtggattgggtgtgaattctgatgtgaagagagagagagagaataagaatattttgaaaattgttggatatggagagagagagagagagagacagagatgggggattatgctattggaattttgaagagggggaaatcacggtaatgggacgagtatgaacaatagagacagctgaatggtttaggagcggacgcgtgg

SEQ ID NO: 48442 - DNA, 643 bp, Glycine max
  Clone ID: PAT_MRT3847_14749C.1
gagacagaaagcctagtgccacgcgtccgcagaaagcctagtgtaagagaaagaaaatggcacctgaaaacccttcaacgccagatcccgaatcgccaacctctccttccgttggtttcaacaccgaccagcttcctcacacccacaccagccatgcctcccaagacgacgaggcttccgtcgatcccgatatcgtacgagacgacattgaagaacagcccgaggaagaagaagaagatggagaggatctttacaatgacaattttttggatgattataagagaatggatgaggctgaccagttcgaatcgttcgggctggacgactcgttggaagacgacagagattttgatcagatcatgcaagatcgaagggctgcggaggttgaactcgaggcgcgcgatggtcgcgcttccaatcggaacaagcttccccagcttctccacgaccaggatacagatgatgacaatcacaggtcttctaaaagggctcgagctgattttagaccttctgtagcaagtgatgatgactttgatggtatgcaaagttcacctggaaggtcacaacggcactcaagagaggatattcttatgactgatcaaacggaggatgatcgagatgacgatgattttgatgatggata

SEQ ID NO: 48443 - DNA, 224 bp, Glycine max
  Clone ID: PAT_MRT3847_1474C.1
gtgatggaaccaaaaaccccgactccctcttattaaaaaggtaacctaaacccgccaacaggggccaagtttgccccatttgaaactttctcttttgaattcgccttggattatttttaacaacccccttgaaaaacccttcgggttcgggggacaacttttacaacccagccctttgccggcgcccggggggggggaacaacatcggggggcccggggggagg

SEQ ID NO: 48444 - DNA, 284 bp, Glycine max
  Clone ID: PAT_MRT3847_14750C.1
tcaaaactgcaaagtggtgtagtatgtattatgttgcactctgggccatctctgttggagagctaaagcttcaagcagagatggcccttaaaaataatgataaaacctatatgtagcttcaaaacttcaaaattatgtaggatgtattatgccgccctttttttggggagtgtgaaaccaacacccttaaaataaaggggacatttcttgcccttgagctattgtcaagcggtttggacttgtgatgaggagtgtaagggcatggtagcctttcatatatatat

SEQ ID NO: 48445 - DNA, 404 bp, Glycine max
  Clone ID: PAT_MRT3847_14751C.1
gggaaattaaagtccttttattaatgggacacaattgagttcaacacaaaccgatcttatttttaaggggcctttttacagacccctttaacattaaagtttttcaaatgttttgggaacccattcaacattacacaacgggcttaaaaccccccacgggaaccggggacaaggggaaggggtgattccttctggatgttgtaatcagagaggggtctttcatctttgagctgtttgccaacaaaaaaaaatctttggtggtccggggggaagccctccttggcctgaaacttggcctctacattgacaatggggttaaaactctctccactcggggtaatatttttacccctaagagtttttaacaaaatttgttttccccccccaaaactccacaccaaggg

SEQ ID NO: 48446 - DNA, 330 bp, Glycine max
  unsure (1)..(330): unsure at all n locations
  Clone ID: PAT_MRT3847_14752C.1
ccgggggcgacccacgcctcgcctgcattctctttgcgcagttccctggggggcgtgggagaggcagatcttcctcaagaccctcaccgggaagaccatcacccttgaggggggaagcgctgacaccatcgacaacgtgaagggcaagatccaggacaaggggggagttcccccgggtcagcaacgtgctcatcttccccgaaaggaggggaggacngccctaccctcnccgactacaacatccagaaggaggcaacccttcaccttgtgcttcgtgtccctgggggggtgcggatcttcntcaagactctcactggcgaaaccataacc

SEQ ID NO: 48447 - DNA, 300 bp, Glycine max
  Clone ID: PAT_MRT3847_14753C.1
cctgttagacacatttgtttttatttgttagacgtttggttatacttaatttcttacaatatttacatgtcggaattatttgcttagggggtccacgttacttactgttgtagaattcactatagggggcctgagactacacatactactgttctaaaagggggaagtgcataaatagttgggtcggttgggaatgtcatttttggcaacggcgagtctcaagctcgcaccagagcacaagcgatgtcgggcggcaattcactcttcgaacgtgacttcgctagatcaccaccgcccatt

SEQ ID NO: 48448 - DNA, 309 bp, Glycine max
  Clone ID: PAT_MRT3847_14754C.1
gctcactagccgagtagccggcctttcgtcttttttttttctttccaattttaatttattttctatggtcctttgtggggcatatggactcacttaatgcatttttcttctcttttaaattatttacatgtatgccaatcgctccgattgggaataacacttaccaaatattcctaattgagtttcatttgtcattatgatatcactcaacaatagcatccactcagaattcaaaatacccacgggtctacactagcaacgtgacaacccccccggtttggaaaagatccaaggctgatattgggaacc

SEQ ID NO: 48449 - DNA, 1565 bp, Glycine max
  Clone ID: PAT_MRT3847_14755C.1
gtcccaggaggcttctctctcttctcagtaagggggtggaggacaatgccaatcagcttggaatatctgataaatcaattaattatacaaatgatttgaaacaaaatcgtgttcgtcttttggaaatggaagaggaagccagaaaggagatccctcttgatatgtacctcattttgggagttgaaccatctgtttcgatatctgaaatcaagaaggcctatcggaaagctgcacttagacaccacccagacaaggctggccagtctttgaccaaaaatgacaatggagatgatcagatatggaaggttattgctgaagaagtacacggggatgttgatcagcttttcaaaataattggggaggcatatgccgtgctgtcagaccctgccaagcgggcacgttatgatgcagaagaagaaatgaggaattcccaaaagagacgccatggacctataggtaaaaatagtgtggatgcccagtattacccatttgaacaaagcaacaggagacagtggagagaagttaatagatcatatggtaattcgtcttttcgaggttatgaacctggccgatcgagcaggaaataataaaatctgcatggaatgttaatcccgtgaggatctggattgctgtttgagtatttaaatgtggcctagttagatggtgccttttaagttatccgctgcatttggccttctgaatttacgcactatggtaagttcagtactgcattttgatccagctgttacgcggcttcaatccttcgagttagaagagatccaagaggtacacaattccgcttatgatgacatagcagttggagaagcttggctgaatggctagtcaatgcttccagttactttgggaggtagaatttctcttggaaagagaaagacaacaaacatgcttgcattctatataattgtcatttacagctgaccacgactttgagcgaggagttggtgtttttagcttggctgataaacccagcacatgaaaaagaagcttgaaaattttgcattatggttggttgagtgagggctggtttttttagatatgtaaattttactgacacacgttgatattgagatgtacagacgaaattaacttataccactacaaagattgtaattaccaaagcacagttgggcttgtgtagaaagagttcataaaaattcaacttagcacttgcgagttagtattccaaccaatgttcatctacaaaagtccaaccaatactgtcagagtttttgtttataaaataaattctagtattaggccacattcgtacggccaacgattggcattttgcctagagccataaatatgcaatatattaaagtgtcatggctgttgttttttgccactaacaactgggtgtcctatttgacaacataagcaattgtaaaagcaacggaaacaaactaggtttaacgcactacttggatctctgtctcatctttcggcgcttcctcttcagcctcctcatacgcttcttcttccacttggccctcatcgcgaaaagaaaacagaacccttcttcgtttccgaaccctagccctggt

SEQ ID NO: 48450 - DNA, 305 bp, Glycine max
  Clone ID: PAT_MRT3847_14756C.1
gcaaagttaattggatattgaaaaaactagaaacaattttatgaaaaattaagtccgtgatttcctcgtgctaaatctttgagcatggaaatgcatgccttcgaaatgtttcctctccgaatgaacactggctatggtgcccgtacactggaggtgaaatgcgcaatttggaagcttgctgtggaagcacacaacatctttggctttgagaccattcctgaatagtgcattgaaccaacaaaggaatacatccatggataacagtatagattagactccaaaacagtttaccaacaagcttactt

SEQ ID NO: 48451 - DNA, 505 bp, Glycine max
  Clone ID: PAT_MRT3847_14757C.1
gattagtgcagagatggcttaagcaaaccctacccaaagcttcccctgttgcagtgcctccagcactgggcgctattttatcaccacctccttcttcatctctgtccaacaaacacttccactcgaccatcacctcccatctcttatcacgctaatgaaacccaaacgcaaacacaaacacccaattcccctgctccttcatgaccttctgaccctactgctccacctgcttgtactcctcaggcagtgccattaacccctcctaccttccatataactgtctcctacaccatcatgtacaccaccaccaaatttgcccacttcatcaccacctgattctacaccaccatagccacctgcatctcccaccccaccagttacaacatctgccccgtcagcagcagttacaacatctcaccactaaccaccaggtagcacatggcctgctgcacctgaaactacaccttcccttccaaatctgtcttcaccatgtacaccagccggt

SEQ ID NO: 48452 - DNA, 266 bp, Glycine max
  Clone ID: PAT_MRT3847_14758C.1
gttatttcccgatttgagcttacaaaagagttccttcacgaatccatacatgacgcaatcgggcccgttgatctgagttaacatgcttaactctatgattttaattactgctgtctttaacttgtctacccttcttcaactcgatcctgtctctgaccaacatgcatatatctatcttatccacgcatcataactgacttatcatatgttcctcgaacacgattggttcaatcatattttaccaataaaacgctgctgattactat

SEQ ID NO: 48453 - DNA, 479 bp, Glycine max
  Clone ID: PAT_MRT3847_14759C.1
gggggttaattaataattaatattaaaataacaatggtcctttttccaggaaaaatcttttttttttacccatgggcttggaaaacaaaaaccccaatttggttggaattttcagttcatattagcatttttaacaacaaagtaataacggggtccttaaacatttaatatttaaaaacaatttttaaaatgccttgacttgccccccctttttaagcaaatttcccaaaaggccctgtcttatttgaggcagtttccaatccatgttcagcttttgaaattcctgggatccaaacccttttactatttttgtggttggaatccgccaaaattgtaaatttttttgctgtcttcataaactcactgaagggttcctttccagtttgtttaaaaacaccagttgcgtcacggtaaaaaacatgactcaacatttaaaaccttttttttccaaacatgttagccagtttcatgtacaactt

SEQ ID NO: 48454 - DNA, 394 bp, Glycine max
  Clone ID: PAT_MRT3847_1475C.1
aattactagtgtgtggactacagctggtgagagattgcatggcacagaacatgagggataggatccttttctaggtggaattgaaaaatatgcacactcccatgatagcccctagatgaagaaattatgtctaaggtggcacactacatggccagagaatggattgattgctttgatcatgaggattccttgagcgaagcagctttgagggcagcactaactgcgcgaggagcaacgtgctgtatggaaagaatgagattcgccacatcggcggggtgtactaatgtgctatcgcgcataactgatgcaagaggatagaggagatctgttactagggagggcgaaaagatgacatctgttgcgggaaccagtgatggagaggcttacaacatgc

SEQ ID NO: 48455 - DNA, 272 bp, Glycine max
  Clone ID: PAT_MRT3847_14760C.1
ttccccgtctacctgctcagcgcagccgcccttcgttctttttttttttttttttttttttttttttttttttttttggtttttttttgtttttaaggccgaaaaatttttattccattttttaatgtttggaaaggaaaatggaatacaggtaaaataccctcaacaggcataacaaaacggtcctttcagactaaccttttaaccctctacaattaaaggccgtgttttccaaaaagggtttctttttttcaaggcgtactttaaatttc

SEQ ID NO: 48456 - DNA, 116 bp, Glycine max
  Clone ID: PAT_MRT3847_14761C.1
atcatgacacattttccttctcagtgcaaatctgggattcttgtaaattgatagacaccagcacactcgttgcctcccttcccagagcataacatggaaaaagtttgtcattgtcc

SEQ ID NO: 48457 - DNA, 445 bp, Glycine max
  Clone ID: PAT_MRT3847_14762C.1
agaattcagaaagttgttttccaacagatctgtttattaaatttggtaagttcaattgtaaaaaaaaatacacttaggcatttagcattctactgaattttcacttaatctattaaaatattgaggaagtcaaacttgttaattatcatattatgaaaatattgagatagaaaaatgtatttgagtattatgtgagcctgttttcagcttcgtgctctgtatattaggtttggcaatagtaggctaaagtgtggttaaaaattttcactaaaaactttgctttcatagtttaacgacttaaacattacagagagtgggtgattcttgttttatacaaaaaaaaattgtgtaaatatgttaataatcatgaaaagtgcaacttgtttcaaaggtatgtttacatatttgttttttagttgactatcgatatattgccaccaaaatg

SEQ ID NO: 48458 - DNA, 515 bp, Glycine max
  Clone ID: PAT_MRT3847_14763C.1
gttattcaagtcccgctctcctctctccaatcgctcctcctcctccgcgcctcctggctcaaattgaaggtttttgaagctcacaagcaaatatttgtgacatgggtatcatgatgaataaggctcgtgtgttggtggtgttggtaatcttgattgcttcatcagtggcagagaagccttctgttgtggaagcaaggacactttccttaacatcatctcatcaagggtactcgaagttttttgccacgcttggacttgtttgcaagtgttgtgacggggttggaggtggtgcctgcacaagcacgtggacagagtcttgctctaacctgcagtgttccccttggaaatcacactcatgaatagtctcctacatctttcctgttttcatttgcatacagattctttaggagatattgtagaaattaactcttcaatctgatattgtgttctatgtattgtatattttgtgtatagttctgcgtgcttttgggatgtatttgtcaagagcaatagca

SEQ ID NO: 48459 - DNA, 406 bp, Glycine max
  Clone ID: PAT_MRT3847_14764C.1
tgctcagaataacacctacaattaacccataatttgaaaccgtaagaacgacataggaaaaagagagaaattggaagcatttcatagaacttattacaacagatccatgtgacaaatcactatcactctgatatgatatacggcagatgcgctatatatcgcgcatgaaactcctagggctatacagattacagagggggccaatactgaacgaattattccaatgtaagtgcatggcagcatatcttacactgagcaaccatgatcacatagcatgccatatttaccagaaaaaggaacattttcggcaaatgggtcagaaaagatcacaaatctgatgacccttatcagagaagtttctttcccttgggctgttaaagttttggcatcaaaacaacccaaagtt

SEQ ID NO: 48460 - DNA, 287 bp, Glycine max
  unsure (1)..(287): unsure at all n locations
  Clone ID: PAT_MRT3847_14765C.1
ccaaaaactaatgcccaaatccaacgggcccctccaaaacaacttgggcctggcacttgcaaccaatccacaccaaacaacatgaccgacaacacccccggaatggctgacaagctcggcgcanacaaagacaccaatgctattcctagcccgaaccctagtgtgatcagctcagcgggtgctattcgaaagcagttcaaccccgacggcgcaattggccagattggcgagaaggtccgaggaccattcaacaaggacggtgtcattggaagccagttcgatgcgag

SEQ ID NO: 48461 - DNA, 264 bp, Glycine max
  unsure (1)..(264): unsure at all n locations
  Clone ID: PAT_MRT3847_14766C.1
tacattagagaggtcaagcgatttgcatttttcgaggaagtgcagggtacaaataatgaccttncgctaacagggactggcgtctcatattaccatncagtgattatgttaatatgggggggggctacgnaaaaatganaccaataccctttaccacangaangcgtaataanacccccggtccaagattgcagatataatgaaaggtaaacnggtgtgcctggggtagaaaattgggatcaaaatggcccaacaagcccaccc

SEQ ID NO: 48462 - DNA, 422 bp, Glycine max
  Clone ID: PAT_MRT3847_14767C.1
aaaaataaaaactgaaatttcattctataaataaaacgaacctcaacaacttttgttttatccgccaccatataaccccccgggattgtccaaccttggtaacaaaaaaccccagggaaagggctccaccgtatgaaaaacaacctaattttactttttagggcttaaaagtaaaaataataccctttttaattcaggaaatccaattcccaaggtttttttcctgtttttaagcccaaatccaaaaccccaaatttgacaaaaagggacggggaattgtcaaaggggttaaggaaaacctcattggccccccaggggggggaagggcccaggatcctaaatggagggagctggaccattgctgtatgcatttccactgaaacctcttttaaaaccagggccacgtccccgaccgggcccac

SEQ ID NO: 48463 - DNA, 147 bp, Glycine max
  Clone ID: PAT_MRT3847_14768C.1
tatatttattcaatctcgttgttaggctgaaatactctcacggctaatatgtctgatgttgagcatgtaaataatggacagtgagatatattttacgtttaaaaatataagaaaagcatgaacattggacaaaaaaaaaaaaaaaaa

SEQ ID NO: 48464 - DNA, 565 bp, Glycine max
  Clone ID: PAT_MRT3847_14769C.1
ggctcgagctaaccacgacatcgacggcgaccatgagctgctttcgcacagctttccggcgtcgccttcgcccagacacacctctactgggctggcagaatacttttgtgacgcggagtcgctgcgacatcctccgctcatttgctacttcgccagcccgtgccgcacggccttcttctgctctgctccagcctagatggcttaatgcaaagaacggtcacgatgacccagagaacaaggagtcggaacaggaagagagcgaggaaggagaagacaaggacaatgagcatactaatgaaccagcggaatcgtcatcaagttcttcacgctctcaatccgcgtcttcctctaccccaacccaaaatagctcctcatcatctacaccacctccggcagactcaccaccttcattttctcagcccggttccattgccaaacagtctgttccagaggtctatccccaagttctcgctctgcctattgcgaggcgtccgctcttccccggtttttacaaagctgttgtcgttcgcaatcctgaagtcgttgctgctattaaggagatgat

SEQ ID NO: 48465 - DNA, 122 bp, Glycine max
  unsure (1)..(122): unsure at all n locations
  Clone ID: PAT_MRT3847_1476C.1
gacacgctctcccctctctcgccaccggccctcggggccaagtgacaatgtactctttccaaatagatgttattgttcttggaatggcgaaaaataatgggagtagtaatanattttcttaa

SEQ ID NO: 48466 - DNA, 193 bp, Glycine max
  Clone ID: PAT_MRT3847_14770C.1
acggctgcgagaagacgacagaagggggcgcacccagagaggaagcttagagagagagagagagagagagagatgagagagtattggcgcgtcatcaaaatgggtatttctagggattccatgcacaataggcgtgccactcgtggcaagaaaaaggcgtggagatagaagagatattatgagcctgggcgtc

SEQ ID NO: 48467 - DNA, 2276 bp, Glycine max
  Clone ID: PAT_MRT3847_14771C.1
gcacgagggaagatgggccatataaccattgttgggccttcccttagcaatattgaaagcaatcttgctgtagtggtggaagggaaaagattagatgacaagactgcagttgctccatgtgtggggatcataatgggttctgattcagatctacctgttatgaaaagtgccgctgaaatcttggagatgtttggtgtgcctcacgaggtaagaatagtttcagctcacaggactccagaattgatgttttcttatgcctcatctgctcatgaacgaggcatacaagtcattattgctggtgctggtggtgcagctcacttgcctggtatggttgctgctcttactcccttgcctgttattggcgttcctgtgcgtgcttctaccttggatgggattgattcactcttgtcaattgtccagatgccgagaggtgtccccgttgtcactgtcgcagttaataatgcaactaatgctggattactggcagtaaggatattgggtgttgtcattgcagatcttctgtcaaggatgagtcgatatcaagaggaccaaaaggaaagcgtattggacaaaggagataagtttgaaaaacactgttgtgaatcctacttaaagaatagttaattatccccattaatttggtggttattttgtaggctcgtttctcatttttggtcaacaacaaattttgataagaaaagatttcacatggatggtgtattgggccccttttgtcaaggaactagctggcattgtggcgagaggaagagacaattcaatttcatgctatcctgttgttgaaactatacacagggacaacatatgtcacatagttaagactccgcctaatatgaaatggaagactagggagcttgcctctgaagtagctttgaatgctgttaactctctagaaggtgctggtgtgtttgcagttgaattgttcttgactaaggatggacagattttattaaatgaagtggcacctagacctcacaatagtggtcatcacacaattgaatcttgctatacctcgcaatatgagcaacatttgcgggctgttgttggtcttccacttggtgatccatcactgaaaactccagctgctatcatgtacaatatattgggtgaagaagaggggggtcttggttttcaattagctcatcaattgatcaaaagggcattgaccatccctggggcaactgttcattggtatgataagccagagatgagaaagcaacgaaagatgggccatataaccattgttgggccttcccttagcaatattgaaagcaatcttgctgtattggtggaagggaaagaattagatggcaagactgcagttgcaccacatgtggggatcataatgggttctgattcagatctacctgttatgaaaagtgctgctgaaatcttagagatgtttggtgtgcctcacgaggtaagaatagtttcagctcacaggactccagaattgatgttttcttatgcctcatctgctcatgaacgaggcatacaagtcattattgctggtgctggtggtgcagctcacttgcctggtatggttgctgcccttactcccttgcctgttattggcgttcctgtgcgtgcttctaccttggatgggattgattcactcttgtcaattgtccagatgccgagaggtgtccctgttgccactgttgcagttaataatgcaactaatgctggattgctggcagtgaggatgttgggtgttgccaatgataatcttctgtcaaggatgagtcaatatcaagaggcccaaaaggaaagcgtattgggcaaaggagataagttagaaaaacatggctggaaatcctacttaaacaatagttaattatccccattaatttggtgattattttttaggctcatttctcatttttggtcaactacaaaattttgatagaaaagatttcacatggagggtgtatagacccatggtatcaataagtaggttaagaataattcgagctatatgttttgttacctaaatcaacaggttttctattttctattgctaacatatagcaacagatgaaaattgtgtaatctggcagaaaatccttgtattcacattgatattgactgttatcaaaataagtccctgccagtgttgtgggatagatttgatcagctggaaagcaaatgatgagccaaaatgtagaacctgtattttattttggctgctaggtgaagtcgggagctaattttggttataaaaattcctagtggtcctttgcttcttggtattatga

SEQ ID NO: 48468 - DNA, 309 bp, Glycine max
  Clone ID: PAT_MRT3847_14772C.1
ggcacaagtgagtttgttgatctagataacgataaacagtgttatgaaaatgaaggtccttgttttcgtcgctgctacaattttggcagcatggaactgccatacgtactatatgttccctcaccgattaagcagtggctatcgtgctcgtactccggaggtgaaatgcgcagattgatcgcttgctgtgggaccatacatcatcattggctttgacaccattcctgaagagtgcgttgaaccatcagttgaatacatcaatggtcatcaatatatatcagactctagaacagtttaccaacaagctta

SEQ ID NO: 48469 - DNA, 185 bp, Glycine max
  unsure (1)..(185): unsure at all n locations
  Clone ID: PAT_MRT3847_14774C.1
gcgctcgctctatttntcagtctctgngtntgcggctgaggattccganacgngtgaccttgnncgttctcgcaaanttnangtaatcatgggtaanggcnaggttcacatcaacatgtcggtcattggactgccgaacccgggaancaacnnaccactggnnatnnattcacaanntggggggt

SEQ ID NO: 48470 - DNA, 661 bp, Glycine max
  Clone ID: PAT_MRT3847_14775C.1
cggacgcgtgggcaaggtttctggtttagctagctcccgctgggtcctttcttctcaccactgcacccacccatccctctcgcgttgagtcacgagtcacgagtcacgagtcactcactaaaactactacttcctcagttcctcctgttaggtttctctttctcgcgcactcgtcactgtctcctccttcatcttctcccgctccgaattttgaccgagttgttgactccacgatggcttccaattccgatttggtccgcgccgttgagtcgctcctcggcgtctcgctcgccgattccgtctccgattctttgctcctcattgcgaccacctccgccgccgtcataatcggccttctcgtgtttctctggaagaaatcttcggatcggagcaaggaggtgaagccggtgatcgtgccgaagggcttgccgaaggatgaggacgacgagatcgatgttgccgacgggaagactaaggtcacgattttcttcggtactcaaaccggcactgctgaaggctttgctaaggcattggcagaggagatcaaggcaagatatgataaagcagctgtcaaagttgttgacctggatgactatgcagcggatgatgatcaatatgaggagaagctgaaaaaagagactgttgcatttttcatgctggc

SEQ ID NO: 48471 - DNA, 2857 bp, Glycine max
  Clone ID: PAT_MRT3847_14776C.1
ggaaatccattgacatcgatggaaagaagtggcccaatgtttctggtttagcttagttagctcccgctgggtccttccttcttctcaccactgcaccaacccatcccctctcgcgtcgagtcacgagtcacgagtcacgagtcactcactacaactacttctttctctttctgttaggtttctctctcgcacacttgtcactgtctcctcctcgctcccaattttgaccgagttgttgactccacgatgccttccaattccgatttggtccgcgccgttgagtcgctcctcggcgtctcgctcgccgattccgtctccgattcgctgctcctcatcgccaccacctccgccgcgctcataatcggcctcctcgtgtttctctggaagaaatcttcggatcggagcaaggagctaaagccggtgatcgtgccgaagggcttgccgaaggacgacgacgacgaggttgatgttgccgacgggaagactaaggtcactattttcttcggtactcaaaccggtaccgctgaaggctttgctaaggcattggcagaggagatcaaggcaagatatgataaagcagctgtcaaagttgttgacctggatgactatgcagcggatgatgatcaatatgaggagaagctcaagaaagagactcttgcatttttcatgctggcaacttatggagatggagagccaactgataatgctgcaagattctacaaatggtttactgaggggaaagatgagaggggcacctggcttcaacatctcacatatggagtttttggcctgggtaacagacaatacgaacactttaataagataggtaaagttgttgatgaagatcttagtgaacaaggtgcaaagcgtcttgttacatttggattaggcgatgatgatcaatccattgaagatgatttttctgcctggaaagaaactttgtggcctgagttggatcagttgctccgagatgaggatgatgcaaatactgtctctaccccatatacagctgctattcttgaatatcgagtagtgattcatgacccgactttcacatcatcctatgataatcacgtaaccgtggcaaatgggaatgctgtgtttgatattcatcatccttgcagggtgaatgttgctgtacaaagggagcttcacaaacccgagtctgaccgttcttgcatacatttggaatttgatatatcagggactggcttaacatatgaaactggagaccatgtgggtgtttatgctgataactgcgacgaaactgttgaagaaactgggaagttgttgggtcagaatttagatctattgttttctcttcacactgataaggaggatggcacttccctaggtggttctctcctgcctcctttccctggcccttgcacactgcgtactgcattagcacgctatgctgatctcttgaaccccccacgaaaggctgctttagttgctttagcttctcatgcatctgaacctagcgaagcagaaagattaaagttcctttcgtctcctcaggggaaggatgagtactccaaatgggtggttggaagccagagaagtctccttgaggtgatggctgagtttccatcagccaaacctccactaggtgttttttttgctgcagtggcccctcgtttacagcctcgttattattctatttcatcctctcctaggtttgctccgcaaagggtacatgttacttgtgccttggtgtatggtccaactcccactggtagaattcacaaaggagtatgttcaacctggatgaagaatgctattcccttagaaaaaagtcccgactgtagctgggctcctatttttattaggccatcaaatttcaagctaccagttgatcattcaattcctattattatggttggacctggtactggtcttgcacctttcaggggatttttacaggaaagatttgccctcaaagaggctggtgttcaacaaggccctgcaatactcttctttggatgtaggaatcgtcgaatggattttatttatgaggatgagctaaagaattttgtggaacaaggttctctttcagaattgatagttgcattctctagagagggggccgaaaaggaatatgttcaacacaagatgatggatcaagctgcacatctgtggagtttgatttctcaaggaggttatctttacgtctgtggtgatgccaagggtatggccagagatgttcatcgaactcttcataccattgtccagcagcaggaaaatgtggactcgacaaaggctgaggctatagtgaaaaaacttcagatggatggacgttacctaagggatgtgtggtgatttttctgatcattcttctgcccagattgtggtatccttgctatttgatatgctaaattcaggattggctgaaggatattcttgagattagtcactgcctttccggaaatttaggacaccaacagtggaggttaaacaggtttccttgagaagaaatgcttttctggacatttacccttttttcttttattttctgttatctttatattctcttataaagataggctggatccctctgaactaggattatttataggggggctctgtgatagttagtctcagaaatcggtcaacaacacatacaggttacagtggatggtcatgtattattaagtgtaggaattggtaacgaataattattttattaatgaaacatgtattttttttaaaaaaaatacagtggatgttctacactgtaacttagtctgtgtactgttgaaggactaattgaaaggtgaagaattcacataatgattcttctccccccttccttttattttaagatagttttctcaattgttaaacttggacacac

SEQ ID NO: 48472 - DNA, 1388 bp, Glycine max
  Clone ID: PAT_MRT3847_14777C.1
gttcgccatggaggaatcaccggcgaacagggagggccgacactgcgcaagccgaccgcggcttctggtggtgttcgccatggatgaatcaccggcgaacagggagggcaaaaacagagcacagggaaacgaggaacaagaagatgatgactacatgggtgacctttctcagtttcttccttccgatgctctcttccctcccaagttgttttcatccaaaaagatttccagcaagaaagatccttcagtcaattcttccaagaaccggttgaaaactcatagctggcaagaacggagaaaacttgaaagagaaaggaagcaacaagaagaggatgagcaaacattagcgaaagttgaagctccaatagcacaatccaacattgggtttaagcttctcaaacagatgggttacactccaggttctgcgcttggcaagcagggctcgggcagggccgaaccagtggggattgaaattcgacggtcacgagctggtgtaggcttagaagatccccacaaggagaagaggaaaaatgagggaatcatgatggacaggaaaaggaggaaagaggaggacctaatgaaagaatttgggtccaggcaaaagtcacagtggcagagtaggagagttataattaattacaataaggcaaaggctgcccttgaccaactggagaatagggtaattgtggagccacaaaagaatgacgatgttgcagagggtgaagaagaagaagaggaagaaataacagaagaggacttgcacgatgttttgatgaaactgagggatgaatttaattattgcctcttttgtggatgccaatatgaatcgaaccatgcccttttggccaactgccctggaaccaatgaagatgaccactaaattgaagatttctgatgtgaacagtgtacactatcagatttgctgtgtttgtcaagcaagtgctggaagcttttttaatgcttactccaacggagctggataagcttacatctggtggatgattgaacttatggcgcttcttgtgccaatacgctggtgaattgtgtctatggtctcgttacaatttagataggaggttgcctcatcttcatccatgccgagggacatcgtggcctgccctcttttaggaaatggattggttcgtatacagtttgtgaaactttcaatacatactggaaaatttcacagtattttacttggtcaattttttaattttagactgcatttaaaaagtttgtggccggacattcttacctgaacttgatgtggatattacatcaaaattttagcaaatatcaatcagatgtattgattgttattaaaaatagaaattaaccatctcttgaagaattatattatataattcattcagtcaaaacttatggtg

SEQ ID NO: 48473 - DNA, 1608 bp, Glycine max
  Clone ID: PAT_MRT3847_14778C.1
ccacgcgtccggttttttcttccaacaaccaaaatctcgcttcttttgtgattcttgttccctcgaacagtgtatggcagctagattgtcagggcatgaattgtctgatctgtgtcttgggaaaccgccgcttagggccctctccgtccgcgacaccgtagccgacgccctcgccgccttgaagaggattgacgacacctacgtcagcgtctggaactgcaaccactccttcatccgaaaacaacaacctcaaattcaatcccagaaccaatgctgctgcacctgcatcggtaaggtttgcatgctcgacatcatctgcttcctctccaaaccccagagcctctcctccccttccgccgcccttcattcccctatctccgccgccctccaagacaactccgccgtcctcgtcctccatctcccaccctctgccagtttactggaggctatagatgttatgcaagaaggggtgcagaacctggtgataccaatacaaaaccaggttgaatctttggactccaacaatgtgcaccacaataacaacaccacatactgttggctaactcaagaggacgtgctccgctacctcctcaactcaattggtgtgttttccccaacaccggggaaccccatcaacaccttaggcgtcatcgacacaaaaaacctctttgcagtgtgctatgatgaccctgcctcctctatcttggacctcttggccttgtccctcatataccaaagctctgtcgccatcgtcgacccaaatggtaagttcggtggcgaaatctcccccgttatgctcaactcctacgacgaatcggtcgtgccggctatagccaccctctctgtcggcgacctcaccgcttacatagactgtggtgggcccccggaggacttagtgcaattagtgaaggagagggtgaaagagaaggtggaggagcagaacatgttggaattacttggcgatgaaacaacaagaacaggacttacttcatggtcttctttttttctagttgttcttctgatgaagagttttgctctgggaagaattggaagcttggagggtactctgcaagggttgggagaaggtctgaggccattgtttgctaccgttggagctctttagttgctgtgatgattcaggcattgtcacatcgtgtgagttacgtgtgggttgtggaagaggatggaaccttgacggggattgttactttccaaggaatgttgaaggttttcagagaccacctcaaatccatgtgctaacagttactttttaactactatattacatgatgatgatgaagataacgacaactactatgctactacttcctctaatttgttgcaataaaaacccgcttgcaaattgtctctttcggctttgtccaggaatttagacgtgaagtagatagcacggatttgtgttaggcacaaatcaattttgctttttgttttcctacccgtgactttcttttgcttaaatttggtctcccggcccaaaatattccatcatgtaatttagttttcaaaggagaaagtgttaaagagtttaattacaataaaaaaaaaaatttttactgctcgataaatacaatgttgtttgaggaatgg

SEQ ID NO: 48474 - DNA, 792 bp, Glycine max
  unsure (1)..(792): unsure at all n locations
  Clone ID: PAT_MRT3847_14779C.1
ccacgcgtccaagaaaatcccccttacattatcattgcgcctcttcgtaagcccaccgcggcttatgttgttgttggccatggacgaatcaccggcgaacagagagagcaaaagcgaggaagaagaagaagatgatggctacatgggtgacctttctcagtttcttccttccgatgctctcgaacctgctaagttgtcttcgtccaaaaagatttccagcaagaaagatccttcagtcaactcttccaagaactggttgaaaactcttaactggcaagaacggcgaaaacttgaaagagaaaggaagcaacaagaagaggatgagctaacattagcgaaagtggaagctccaataccacaatccaacattggatttaagcttctcaaacagatgggttattctccaggttctgccctaggcaagcaaggctcgggcagggctgaaccagtggggattgaaattcgacggtcacgagctggtgtaggcttagaagacccccacaaggagaagaggaaaaaggaggaaatcatgatggacaggaaaagaaggaaagaggaggacctaatgaaagaatttgggtctaggcagaagtcacagtggcagagtaggagagttataattaattacaataaggcaaaggctgcccttgaccaactggagaataggggtaattgtggagccacaaaagaatgacgatgttgcanaggggtgaagaagaagaagaggaagaaataacagaagaggactttgcacggatgttttgatgaaactggagggatgaatttaattat

SEQ ID NO: 48475 - DNA, 157 bp, Glycine max
  Clone ID: PAT_MRT3847_1477C.1
acttcctttttttttttttttaaaaggaaaacgcaccaaattggggatgatgtgcaccctttaactgaaatttataaaggaagacagttcaatatcaaacttatcatgagggcaattccaacttggcattattgtttttgaacatacgaccatgcga

SEQ ID NO: 48476 - DNA, 739 bp, Glycine max
  Clone ID: PAT_MRT3847_14780C.1
ctatctcgatcgaactgtccaaggtcctgtcaccgaagggcgaggcgaaatgcctagaacggggcgccacagtaactaagctcgcgagaacaagttccgttgcacaggggctggactgtgggcccgacgcacaacgcacaaccatgcgctaagctattagacctagtgtaatgtagcgtgctcggggttcgaaaagcgaagagggcaggaggacagggtggcgatgaaaacgggcaagaatgattttttaaggggggggttaaaaaaaaaaaaaaaacccagcttgctactttcccccagttatgacggtgacacgaaggcttaatctccgccactgttactggggcggtttgggacgcacccggaagggacactggcctcgaagtagccgtagactgcgggttgcgcgcaaaggcggagttctgtataaggttatataatagatcacttccaactagaaacgcgaaacttgccccgcttgaagcacgcactgaatgtataggaaggctcggctctgtatgctttctgggttacgtcccaaattgcgtcgcttactgctaggaagcaagtccttaatctctccccacacctccgggctcgaggccctctgtggttctggttgtctgtatgcatgtctgctctgtccgtcggtcctgctcctcactccgagtactgtatgtaaacctccgaagatccggagttatacaagtaccccagaatctagcagacaatagcgcac

SEQ ID NO: 48477 - DNA, 388 bp, Glycine max
  Clone ID: PAT_MRT3847_14781C.1
caaaatatcacgcctaattttccatttaatgtaactgatcagtgttctgaagctgatgatgatggaaagattaaaattacttggctaccagcaccagaaccgccctgtactgagctaatagattgccacaattggccccattcgacatgcagagaaacaagtgaaggaggaagcaggtgccgttgtgactcaaactataagtggaataacacaatcatgagttgcaccttagaagagcattcaaccaaccagctggaattgattcttatagtaattcttagtggcatggctattctggcatgcacaatagcatttgccatagtgcggagaaagaaaaaagctcatgagcttggtcaggcaaatgctcggattcaggagagcttatatg

SEQ ID NO: 48478 - DNA, 367 bp, Glycine max
  Clone ID: PAT_MRT3847_14782C.1
gtacaatattaacaactatatttttttgggcccacttaggtaaaaccgaggaaatccgacccagcgcccaaaggcgggacacgcttaggataaaggaaggtccttaaaacctaggaaaaacaccggataaagtatgtgccgagaggaaaaatttatggctggaaaaattcccaacaatttaaggggcggaatctaaaagcgtaaaccctggggggcctaaaaagcaaaccactctaaaataaaaaggacaggcttcagagcccccttttcagtgggaaaaacagtgttcccgacggaattaaaaaaccggcaaaaccggagggaaaggggggtggggaatagggccccagggggggattttttttaa

SEQ ID NO: 48479 - DNA, 568 bp, Glycine max
  Clone ID: PAT_MRT3847_14783C.1
aaactgcaaactcttgtagcaagaatgctgttatgatggcaggaaccaaatgattcctcctgatagtaaatggataagacaaagcattttgatgctgataacatctctgtgaccaaagttatgtatccataagtaaagtaacagtccactaaactctctcatgggtgctatcacctaacatgacccataaaaagaggttctaacttaaagagaaaatacaccaactttgggatttcacaactctggatggttatgtcccaaaggggattttaacatagggcttggcatggacttctcttctccagatgggctagctgaatgtctaatggctcgcaggtgttccaaggcagccaaaacctcaaacatctgcggtctagtcttggcctcactaatacattgtaaggcaataatagcaattgtataagctgccttctgagggtattgcccttctaacttggtgtccatgatccggaacaacttcctcctatcacccaaatagggtcttgaccactctaccaaattttgttccactccagattttgtgttatcaatagcatggcgccctgat

SEQ ID NO: 48480 - DNA, 427 bp, Glycine max
  Clone ID: PAT_MRT3847_14784C.1
gagcccccaaaaaaatttaatttaaaagacatttctaaaaagaggggtttttggggtaacttttttcccttgaacctttaaaaatttttttacaaaaaagcgaaaaagggcaaaactggccttttttttccgggacatttttgaattttttttcacagggaagggtgttgttccaccccaaaaagaaacatccttttgaactgggggatttaccaaaaacttaacatccaggttcacattctaaagcttttgttttttttttgacaaaaaccaggttcaaaatggtggttttgggataaaccaggtttatgagcccaaaaagcttttgggtccggacaaaataaaaaaaaatcttcaatttttaaattcggtttgggccaattcacaaaacgggcctgttttggcttgaataaaaaaagggtgaggg

SEQ ID NO: 48481 - DNA, 321 bp, Glycine max
  unsure (1)..(321): unsure at all n locations
  Clone ID: PAT_MRT3847_14785C.1
tatatnatctctttcctaatgtctatgactgagtcactaacaatgcntaccatgagacattcccacgtggcctgccggaggcttacgacgaagacttatatgaagggatgaccaattttgctggattttttttcggggagggggttngaccatcactgacgtgtgctggaaaaattatggtgaccacagaggagtgagggggtttgacctcacttcgtgctgctagggccaggttagatggggtcctatagggggcataggttgaccagagagggggggacgacagtttgactacggtgagaccattcctgcaccggctgg

SEQ ID NO: 48482 - DNA, 238 bp, Glycine max
  Clone ID: PAT_MRT3847_14786C.1
caatgtcaatgataccatcaggaggagacactacattcggtggtcttgattggtcaccacacgatggctatcaccctaggcataggaaggatagcattgactatactcagttaacatagcaagtcacaggtcatccagatgttgtcatcgatggaacaatgagatcatttggcagagatgtgaccgaggcacactcctctaaaattgagatagctgactttcgtggacccatcaaagg

SEQ ID NO: 48483 - DNA, 412 bp, Glycine max
  unsure (1)..(412): unsure at all n locations
  Clone ID: PAT_MRT3847_14787C.1
tccctttttagttttttttaaccttagacgctgcgtttcgctctctctgagttgaagaggatgaggctattgccttgcctcgctcgttgaattgatggtggacaccctaataatattattgcgtttctgccttgggtttgttcctcgccgtttgatttattgtggttattaaaatgcatgtgccagtctcgcccctaactctttttccctatttgtccttgctccattcttaagataatactgtatttcgtctttttctaaccataaagactgaaattcaataagcttatcatatttttttcaatttcttttatcagtttttttaagatatttttttaaattttacaaacttaattaactgcatacaattttactttaagatccttanataatacatatcatgangtcatga

SEQ ID NO: 48484 - DNA, 447 bp, Glycine max
  Clone ID: PAT_MRT3847_14788C.1
attggataccaggaattaaggaaattcggttgaaggatcttcccagcttcattagaaccagcggatccagatgagttcatgcttgatttcatacagtgggagtgtgggaggactcgaagagcttctgcaataattttgaacacctttgatgccttagagcacgacgttttggaagcgttctcgtccattttgcctccggtttattccattggtcctttgaatttactcgtgaaacatgttgatgacaaagacttaaacgcaattgggtccaatctttggaaggaggagtctgagtgcgtggagtggcttgacacaaaagagcccaacagtgtcgtttacgtgaattttggtagcatcgcggttatgacaagtgagcaattgattgagtttgcatggggtcttgctaatagcaacaaaacctttttatgggtcataagaccagatctt

SEQ ID NO: 48485 - DNA, 373 bp, Glycine max
  Clone ID: PAT_MRT3847_14789C.1
gcgcccacgcgtccgctgattccatagtgaagaaaaatggcttcaatcatcgcccgcaccccaagtacatgggtcactcgcacaggtcatgtgctcaaactacctgttgtggcctcatactataccgctcttggattgccatcaatggccaaggctgtgatagtgatgtgctccatgtaggaaaagccttcaagcagctcatacctaatgatgggggcatacttgttagcagctacagctttcgcaaccatgtcaagcccagcagccatggctttggttgattagagactcatcactgaatgaactgagcattcctttgggcttatcaacaacctttttggctggatcctgtttggagtctttggtctcatat

SEQ ID NO: 48486 - DNA, 526 bp, Glycine max
  unsure (1)..(526): unsure at all n locations
  Clone ID: PAT_MRT3847_1478C.1
aataaattttagttaataataaaaaagtacattaaagactcttgttagcatttctcttttatatacacatatatgattcatgctaaagtactcaaagattaattatcntggagtatacatatactaattttctggtttatgcaacaggtatcggtgctggcccctaacatccccgcgatgtatgagatgcattttgcagtgcccatggctggtgctgttctcaacaccatcaacactcgtcttgatgccaagaacatagccaccattctgcgccactctgaagccaaagtcttctttgttgactacgagtacgtttccaaggccaaagacgcccttagattactcatggacaacaacaacaacaacaacaacaagggtgttccaaaaccaaccaccataaatcaacaaaactctacattttctctcccactagtcattgtcatagatgacataaacacccccacaggaatccgtcttggtgagctagaatacgagcaaatggttcatcatggtaatccaaattacg

SEQ ID NO: 48487 - DNA, 295 bp, Glycine max
  Clone ID: PAT_MRT3847_14790C.1
cccagctcaattattctacttcaacagagagcagagtgagagagacccagagtgtgcaccaactcattagcagcgcacctacatcgcttcatggggacgcacctccacaaagcccactccagcacgtggcgtttgcatgccagcttctgcattgtctataagaaagacggctgcccgaagaacattggcagggggcacgtgctctatctacattagcacccctgtggtatccggaacgcaaacgcacccgagtacctcggtgatagcctagcaggacactacgtattgtacccat

SEQ ID NO: 48488 - DNA, 258 bp, Glycine max
  Clone ID: PAT_MRT3847_14791C.1
ccgggaccggccggaattcggtcgacccgcgtcgacaaacctgcacgacacaacgactaacctgcgcgccgcgtgtgttgaccacccaatccctttttaccctccattgaccctcaattgactatatcgcgcccgcctatggaatccgcatcgcgtgcgctcgcgcgcaaaccatcctcactgaccccaactctttacggagcacttgtttcttcctcacgactattctaccttttccgatcctcctcgcgcgccaac

SEQ ID NO: 48489 - DNA, 502 bp, Glycine max
  Clone ID: PAT_MRT3847_14792C.1
ccccgtcgacccacgcgtccggctgtgtggagaaagacgaggctccgaggagcggaggaggaaaaagaagaacgcggggagcgggcggaagagacaacggggaaagaaaagcggccggcgcaaaaggcgaagggaaagacgaggagggcgcgaggaagccaagccaggagaggcaccagacgaaacacgaggaccccgcagccgcgatgggggggaacacacttattagccattctcaatttctccatatggacttcccagagaaagccacacttcttgcgtgctgatattcttaatgaacttgtgtgaggctgctgaaaatcaagccttgtgccattgattttgcatccttttaccgcggtgcacaagcttgtatgcacaaggttcttcagagaattagtggcaactctgaagctcataatacggatgactaccatatagtcagagactgaatttctggctatatctatgatacaagcccagctgatcctaccagggattt

SEQ ID NO: 48490 - DNA, 263 bp, Glycine max
  Clone ID: PAT_MRT3847_14793C.1
actattactaataatctctttttatatatatggccttttcttatcgcatcacatatgcctcgtcttacaaacattttgtagtatattttttccctaggtgtctacatgacactcacacgaagtgtgtaccaaacattgtgcatgttcaagacaatccacaagtcactcctgcaaactgggtcaagtggtaccatggctcagactattgaggaacacccacattcgaggccaaaggatataaaaatatattgtatatatatata

SEQ ID NO: 48491 - DNA, 541 bp, Glycine max
  Clone ID: PAT_MRT3847_14794C.1
cccttacgcaattcacataaagaaatttgaaaagtcatataagcttaaattgataaatgaaaaataattgaagaagcatttttgaacttatcctattttattattccactactttatttgtcactcaatgcatgaactctaattggttgttgcatttcttcatttccattcttccaaaatagaggcttcacaaactaagatataactaataattttgttttacaaggcattttatctatttataaatattacattgaacaccatgtatcatctatgtgatatatttaaaactatttttcgttgtcttagaatgttacgattcaatacaaattatgattaaaattagctcaacaattcacgtttcacgatttgagtctcaattcaattgcctatttggtttagcattggagtaaagacaaaatagaattaattttgaaaaagctgaaagaggaattgcactgaaaattttattatcattggaaagtgggaaaactgattcgatactggttatgcctatagggcattagtcactcaaaatcac

SEQ ID NO: 48492 - DNA, 315 bp, Glycine max
  Clone ID: PAT_MRT3847_14795C.1
tatggggaggttgaattaggtttttaggtattgagacctaggggacacactattacgcatcattcatatttctcaaaactgaactatgctcatcaagtgatgccaagatcttcccagctaaggacatcacttttgctagtattgattctcatgctctgatgtaatcagtatctttacgcactttgtaaagcttcatactcttgttgtcataactgctctcgttgccatcaatctactgcgatgttctgaattgggacattggctaatgatttcactgtgttcacattcggtcttaagaactatcctacaacatat

SEQ ID NO: 48493 - DNA, 460 bp, Glycine max
  Clone ID: PAT_MRT3847_14796C.1
tccacgcgtccgcacacaccctgtaccgtacagttgtacaaagtccttatctgtacatatcctcccctcatcccccgcccccgtcaacgtccagcaccgccgaaaacacaattcagggacacgactccccgtcggcaactcccgaaaccccctcccccgcttccccaacacacggacacaacggccccccccccttcactatccctaacggggtactgaacgccacgacgactacgtttacgacgaagtcccaccgagtccttacacgccttttttctctcccgaaagggagacgaggcaaaaccgaagaaggatactggcagctgctacggcaaaagtgatcttagcccctctgattgcgaaggaatcccatacccgccatgtctcttcagggcgagttccggaagttcgttttcggtgacccagacaggttccgggaaatctcggacttcagcctcag

SEQ ID NO: 48494 - DNA, 259 bp, Glycine max
  Clone ID: PAT_MRT3847_14797C.1
caaagggactcgttgttcttctcccaggttattcagaaaagcagagtggtgaagatttgctgcattggtgctggatatgtggggagtcctactatggcagtcattgcacttaagtgcccatccatcgaagacgcatgtggtgatatctataaatcccagattgcaaactggaacagtgaccagatttgtatctatgaacctggccttgaaggtgttgtgaaggaatgccaagtcaagaacctctttttcatcactgatg

SEQ ID NO: 48495 - DNA, 639 bp, Glycine max
  Clone ID: PAT_MRT3847_14798C.1
gtttccacgcgtccgatcttcttccactgttttctctctcaactcaatacaaatcgcaaggcacttcttactcgctgtttgattcgagtttgctctctcgctcccgctctaaaccctagagcacgctctttctagggtttagatttcgattcctcgttgatttcggaattcgtgttttacacgttgatcggagaattttttttttctatcgaattttcggggtcatggatcttcctagtctcgctgttatactccaagccgctctcagtcccaatccggatgaacggaaaacagctgagcagagcttgaatcagtttcagtatgcgcctcagcatctggtgaggctgttgcaaatcattgtagacaacaacgttgacatgggtgtacgacaagtggcgagtattcatttcaagaactttattgccaaaaattggtctcctcttgatgttgactatgtaatacccaactgaagatctcacagagtgataaggatgtggtgagggatcacattcttgtgtttgtaacccacgttcctcctttgttgagggtacagcttggtgaatgccttaaaacagatatacattctgattatcctgagcaggggcctcatcttcttgactgggtgaagcataacttaca

SEQ ID NO: 48496 - DNA, 313 bp, Glycine max
  Clone ID: PAT_MRT3847_14799C.1
tcgttctttttttttgcacgcaaacagggcgatctattactccattcgatgatcaaatggtgattgaaaccctcaagggatagatgccccaagggtttttatccgtcgctccccaagacaccaacgaactacttagctgatctggatacctcactcttttcacagggactgacatataggcgacacttaaggaatccactcttcctacactaccttattgcatcacgtttagaggcagatctatggaaaccacggtgactcatcttaccgaatttttgtaagacacctgaaccactcattacaagcccttcat

SEQ ID NO: 48497 - DNA, 467 bp, Glycine max
  Clone ID: PAT_MRT3847_1479C.1
gggtaacccattaaagaagcatgtgattagcatttttttttcaagtttgtatatactatatcttgcgtcctaacgcttcataaattcgaaggtactcatattgcatttaaactactatacactcacagaagcctctgcgccacagtctgcatgcctcagcaaaatgcacttgtcactgagggaaattgcattgacacttcattgataacttctagccaaagctcttttatgagaaaatgatttaacgtctttaattttctccaaacaaagtaagaaaggcacttgtttgcaaaagctaagttagcacaaatggaaagttattaaatttctgcagctgctatatattgttgcatttaaattcacaagtcacattagctagcctctccctttctctttcactataatatttctattcacactttgctaaagctaccgttccacttaccttcaaaaggaaacttgaatta

SEQ ID NO: 48498 - DNA, 2507 bp, Glycine max
  Clone ID: PAT_MRT3847_147C.1
taatgattggggaccgtagacaactacctatttggcctaaacgccttatctggtctggatatgaccatacgaggcattttttcattttcatcaacatggttttatatctggtgtgtcattgatatatgtaagaaatcttgacctgcatgtgcacttgcacacacattaaatcttaggatctaagaaaccaaagtctggctaagtatataatgtagacaggaaatccttagaatagaggtgcatactatcccagctttctttcacaagcagaatgatggatatgttggtttggaagtttaccttcttgaactaccttgtctgctagcgttctctagtgttttgattccgcacacatgggttgcttaaacattgtttgctctcatttgattattggtttcttggatataagagatactaaccacgcgtccgttcaattcttgtgaaattcttaaaacacaacataacaataataataataattaaaaaaaaatcgaaaaaagtactttacttgcgccgcactttgacttattaaaaagtcgcgtccaaacaggcccttaagggggaagtgaggtggtgattgaaacgaaacgcacagggccatcggcacggctcgagcctatccccttgcgatcgaacagaacagaagagagatgggggacggaagtgggagccggtggagcagggcggagtgggtgcagcagtacgatctcttaggaaaaatcggcgaaggcacttacggcctcgtcttcctcgcccgaaccaaatcccccgttggcactccctccaaatccattgccataaaaaagttcaagcaatccaaggacggcgacggcgtctcccccaccgccatccgcgaaatcatgttgctgagggagattacgcacgagaacgtcgtcaagctcgtcaacgtacacatcaaccacgccgacatgtctctctacctcgccttcgattaacgccgagcacgatctctatgaaattattaggcatcacagggacaaactcaaccattccattaaccagtacactgttaagtctttgctctggcagttgctcaatggactaagctatctgcacagtaattggatgatacatcgtgatttgaagccatcgaatatattggttatgggtgaaggagaggaacatggagttgttaagattgctgactttggacttgcgaggatatatcaagctcctctgaagccgttatctgataatggggttgttgtaaccatttggtatcgtgcacccgagttgcttcttggagcaaaacattatactagtgctgttgatatgtgggctgtgggatgcatttttgctgagttgttgaccttgaagccgctatttcaaggggcagaagtcaaagctacatcaaatccctttcagctcgaccaacttgacaagatatttaaggttttaggccatcccacattagaaaagtggccttccttagcaagtcttccacattggcaacaagatgtgcaacatatacaaggacacaaatatgataatgctggtctctataatgttgtacacctgtctccaaaaagccccgcatatgacctcttgtcaaagatgcttgaatatgatcctcgtaagcgtttaacagcagcacaagctttggagcatgagtatttcaaaattgaaccattacctggacggaatgcacttgtaccctgccaacttggagagaaaattgtaaattatcccactcgtccagtggacaccactactgatcttgaaggaacaaccaatctgccaccttcacaaacggtaaatgcagtttctggcagcatgcctggtcctcatgggtcaaatagatctgttcctcggccagtgaatgttgttggaatgcaaagaatgccccctcaagcaatggcagcttataatctctcatctcaggcagccatgggagacggaatgaatcctgggggtatctcaaagcaacgaggtgttccacaggcccatcagccgcaacagttgagaaggaaggagcaaatggggatgccgggataccctgcacaacagaagtcaagacgattataaggtttctgctggaagagagactaagtgaagatagatttggggtcaatacttcagtacctgaactcatgcaggacatttctggacagtgtttgccttcaatacttgcaagcctcactttattgcaatcaaagattgggtgcattcttctctggaattttgatgctaaaatgccaaatgtatgctggaacaccaatgaagccataaaagggaataaacgtatgaaagggttaagctactgtaagcacatgtatatcatgattataacaatgcaattctattgtatttcttagcttttgggcaagatcaatgtcagtaaaccaaatgttgatcatccattaggttttcataatggaacttttcttgattaaatctataacatgctactttgtatttgtagaatattttgcctcacatgattgaagatagttcaaatatcacttgcctttggtttaacaaggtaa

SEQ ID NO: 48499 - DNA, 786 bp, Glycine max
  unsure (1)..(786): unsure at all n locations
  Clone ID: PAT_MRT3847_14800C.1
agtatgtagttgttttcagcaaaggtgatatatatattgatatgagtaccagaggtactgaatagtaaataaaaggaccatacaaatggttccacaatcagacattcatattctaaaaggggtgcaatctttaatttgagataacatatgaaatagacatgaagtaggctcataactatgtaatgttctgctgatacataaccttttgtgtaaagctgcttgcccattgattaaaatggactgtgaaatctttctcgaaacttataagccaagaccaaagtaggaatgttgcatcttcaaacaatgaattagcattaaaagttgcattagagaacactatactgtttctaagcttccaaatggaccaagtttaggctaaccaccagtattgccatctgttaatccttactccatcaacttgaacacccaaatgttgaagaaaatgctgctttgggcttaatgggaaagcacctttaatgtgcagccatgacatagtgtcccaccagatgggttgtattttactgcagtggaagaataaatgggatgcgccctcctcttcaattctacagaaaggacatagcatatttgtgatttgtacttgtctcctccgcaaattcaatgctgtcagcaatctgtctcttatcaacctcgagccaccaaaatccccaatcaacgttggtattttaaccaacaccccaaaccaataccaaaatccgtatccaacccngtatcctacttaatcaacattcaaacccaatatcccacaaaatcttccaatttatatcc

SEQ ID NO: 48500 - DNA, 387 bp, Glycine max
  Clone ID: PAT_MRT3847_14801C.1
actacattgctttttttcttttttttttttattttgtttactaaagaggagataaagttcgaatagagtgcaatttctgaacacgaggtgaaaataaggtatattctagcagacgcactgcttttgaaaactgatacactggccagttaaccacatattacatgactacctacaggtggtcgtacagcgaatccccataccgtggtctgaatgatcgctcattgtctgcacagaggccctcatgttaagacctcatagacaaacagaacttcacttgaacctgtagcaatggctggccaatctgggatcacttacacacatagtacccaactagcgtgaactgacatggacccaattaaaggcttctcataaccatgatacatgggg

SEQ ID NO: 48501 - DNA, 498 bp, Glycine max
  Clone ID: PAT_MRT3847_14802C.1
aaacttgggacaaaggtgaggaaggtaccctgaccataccttccaaccttcatattttaaacaaactcccatgagagtcccgtcaaccacccctattaatcagctaccaacccctttaaaggttaatgtcctaacaacaagtattatttctagttccaagcaccgctattaaaacttaaatttgttgcaacattaattaagtggcggcaatctcaccagatttcggaacaaccaggacaagctaaagatgaacgtgttctactgaattcaaagcactgggttgccccaatgtatatcaaatccatatgggctgctttttgctctgaaattattattgcatctaatgtttgaaccgtcctagcagcaccaacaatttcaggagcttctattccagtagcaattttgtcagaggcaacctggctagtgagcttgacatgacctcctctgacttgtttatggcaacggctttttttcctggcacactatcaattaacccaa

SEQ ID NO: 48502 - DNA, 433 bp, Glycine max
  unsure (1)..(433): unsure at all n locations
  Clone ID: PAT_MRT3847_14803C.1
gggggaaaangtaagaaaatggaccgggaaaggagggtttttttaaaaaaaaaaagaatttgtttttttttggaaaaaaaaaatttaaattatccccctttttttttttaataaggccccccctcccctgggcaaaaaaaaaaaaaaaataacccccctcaccgggggacccggagggctcgccggccgcccttttgttccttggggggggggcccccgagcctttgatgggggtgaaggaaaacccttcttcgggggcgccggggcctttaatgggcgcaacctggtcctttttgttgggggcccccggggccccaatgggggaaaaagaaaaagaggctgtaggggccccaaaagaaaaacaggggctgggggggccccagcctttaagggcccccctgggggacccatacctggggggggggggggcttt

SEQ ID NO: 48503 - DNA, 139 bp, Glycine max
  Clone ID: PAT_MRT3847_14804C.1
taaagagatgtcattatattcagatcatcactgtggaaaaactcagataccttactgtgacatcacagatattagagagcactcgatgatagtagtttggtatgtaacaattttcggatattggtgcttattaaggtac

SEQ ID NO: 48504 - DNA, 168 bp, Glycine max
  Clone ID: PAT_MRT3847_14805C.1
atatttataacacactcatggcacatagcggtgcggtttttttataaggggtggcccaccattccttagccacattggaacttctgaaatatatattttctcaaatgtctgtctccttcaggtctcaagaagtcatttttgcttatggttccttccctttcgccccta

SEQ ID NO: 48505 - DNA, 886 bp, Glycine max
  Clone ID: PAT_MRT3847_14806C.1
gacatcgattcttcatgtcaacacagtatgagtaacattagcagtccacaagtctccaactttactccttcaccaatgcagaggccaagtttgaacagagaccatttcaaccccatgtatcaacaaccatcgggaaatcagtctccttcgtcaggtaaaggaattgaagggaacataaatccagttcacgacaatgtggcacgtgcaccaatgagaagcaacaccttaggtgtttcagataatagaagatcgtctgtgttttgggatcaagaagctggacgctttgtctcatcctcatcaagaggtcccggcagttctcagattcccggaacagagttattgtacacgggccgttctatattttttggcagccccgttgtgaatgaacagccaagtacgggaacaagaagtagcagttcagtagtagctggtattccggatagagattcttctacattaagggattttcagcaaggtagatcacataggggtggccagcttcctgtgtttgttcctggctatgcccagcaaaacaagttcccttagattgcttccttgaccattaatttgttacggcaactgtttcttatccttttttaattttttaaaaattcctaaactttttctaaatgtccatctttttacttcttcgtttctcccgtatgacggtatgagtgcattcccctttccatctgtataggctaatggatcacgacctttatctgtacaaaattatttaccactagctttgcattttaagtttgaatatgtacgtcagagagttgatgtagctttgcgtactgagtagttttgtaagtttatttgatttaaattaaagtctttgtaattttttttcttactattttagtacatttcctttttattt

SEQ ID NO: 48506 - DNA, 2688 bp, Glycine max
  Clone ID: PAT_MRT3847_14807C.1
ctcgagccgattcggctcgagtacggctgcgagaagacgacagaagggggagtgccctcatctgacctcactctttattctctcatcctttctcactctcacatcacccaacaacctcttacattacttctctctctctctcttgggttgaatttgacttggcaaaccctagcctgggaattcttcagagaacccgttgttctgctattctgaatctgtttcatagtttgcagcattcagagcaaagtttggaagggtgaagcggaaatgcttctgatttggtagtagtccgttggagattcggtcatggctaggcgtcatggatgggagctcccctttcacacttttcaggtcgtggctataactgtatttttcttgctatctatagcatattatgctttctttgctccttttcttggaaaggacatctatgaatatgtggctattggtgtttactctgtattggctctctctgtgttctttctttatgttcgatgcactgccattgatcccgccgaccagggagtcatggttgattgtgacaagacatcaaagaatagatcaaaacttgatgaagagttggcagaacccagcaagatgggactaaagggtgaaggaatgtctgatcgtcacaattcaagttggtgctctaaagttgggtgtttcttctgtagtttccttgttagagaagattgccgcagtaatgaagatattagtctacagcaacaatctggagaagaggaggctttgttctgcactttgtgcaatgctgaggctcggaaagttcaggtttcttctgtggtttccttgttagagaagattgctgtagtaatgaagaaattagtctacagcaacagtctggggaagaggaggctttgttctgcactttgtgcaatgctgaggtgcagaagtttagtaagcattgtcgaagttgtgacaaatgtgttgatggatttgatcaccattgtcggtggttgaacaattgtgttggaaagaagaattacatcacgtttgtgtgtcttatggcagtgagcctagtttggcttatagttgaatgtggagttgggattgcagtacttgtcagatgtttcgttgataagaaaggtacagagaatcagatagctgaaaaacttggagctggcttctctcgagtcccatttgctattattattgccatatgcacagcagtttcattccttgcaactgtacctttgggagaattattctttttccatatgatcctgatacgaaagggtatcacaacttacgagtatgttgttgccatgagaactctaagtgaaccacctgggccttcagttgatgggggtgaacagcagagtctaccatcgtctcctactagttcagctgtcactgcaatgagtggaagaagctccgttggaatgagtatacagtacaaaggtgcctggtgtacaccgccaaggatctttatggaccacccggatgaaattataccacatttggagccgggacgcctaccatccactgttgatccagatgccgtacaaccacctgacaaagggagaaaaatgaaccagcgccctgtgcgtataagtgcatggaaacttgcaaaattggattctaatgaggcaactaaggcagctgctaaggccagagcatcatcgtctgtgcttcgtccaattagttctcgacctcatgcgtatgatgttgatcatgtatccagtagcaatgtgagtggaagaagcagcccaatcagcaatcaaggatttcatataaaaaatgatacagtggggacatcaaggttatctccttccaagagctcgtaccctcctagtcaagcaagcaaggatgacatagatgcatcatgtcaacacagtatgagtaactttagcagtccacgagtctccaaccttactccttcaccaatgcagaggccaggtttgaacagagaccatttcaaccccatgtatcaacaaccatcgggaaaccagtctccttcgtcagctaaaggaagtgaagggaacataaatccagttcacgacaatgtgccacgtgtaccaatgagaagcaacaccttagctgtttcagataatagaagatcgtcagtgttttgggatcaagcagctggacgctttgtctcgtcctcatcaagaggtcccggaacagaattattgtacacgggccgttctatattttttggcagccccgttgtgaatgaacagccaagtacaggaacaagaagtagcagttcagtagtagctggtattccggatagagattcttctacattaagggattttcagcaaggtagatcacataggggtggccagcttcctgtgtttgttcctggttgtggttatgcccagcaaaacaagtttccttagattgcctccttgttacggcaactgttttttatccttttttattttattttttttaaatttcctaaactttttaaatgtccgtctttttacttcatcgtttcccccttatgacggtatgagtgcattcgcctttccatctgtataggctaatgaatggatcacgaccttttactgtacaaaattattgaccactatctttgcattttaagtttgaatatgaacgtgaatattcagagaaaagtagttaacatgtagctttgagtactgagtagtttataagtttatattattaacttaaagtggttgtaatccacttcccatagta

SEQ ID NO: 48507 - DNA, 970 bp, Glycine max
  Clone ID: PAT_MRT3847_14808C.1
ggccgcgtccgcgttttctcgtttttattttctcattttcttcaattttctgatcttcgcactttcgatccacgcctgatccgactctgcatctccggaagacaatgacggaggagcaggtggtgaatgtgcgcggcgaagaaagcgattccggcaacgatcacggcagcgtcaaagccaatggagttgctcacggtgtcggtggcgattcggatctcgccgccgacaacaacggtgccgcgtcgtcggggaaaaattgtaacgatgcagtgtctaacggtacggcagaggaaggcaccgaaacggcgacagttgacgtcgtttcgcgggaggatgaattaaaaagtgcggatagtcaaaacggcatgggatccgttcaaaacggcgtcgtggataatgatgataagagtgctaatgctgttgcagaggagttggttacggatcacgaggagtacgttgttgtcggtgattcggatgttcagaacggtgatgatgtgactgctaacggagttgaggagtgtgaaatgctggacggtgcggaggcttcaggagacgaaaacggtgtcgttgtggagggagaagaagatgtgtgtcaaagtgatcgcgagttcgaatgtgttgatgttcacgatgatgtaactgctactactgatgagaacggtggaaatggaaatgacgttcagggaagaagtgagtctgtctctgataaagatgtcaataaaagaggggaaagtgagaatgttgttagtgcagatgtttcagatgagaaggacattgtaacggatggtgatcatgatgtggaagaagtcgttgagaagaatgaggttcctgttgttgttgatggtggctcagcttctacagatgtgaaggagtgtgaacctgaagatgctcaaaacagtttaaagaaggggcaggttgagtctgtctctggtttggcagagccagtgctggagccaagtgaatgcactga

SEQ ID NO: 48508 - DNA, 273 bp, Glycine max
  Clone ID: PAT_MRT3847_14809C.1
ttcgaaccttcgggctgatttatgtgcttgtataagctcacgaaacataactttacgctactcacgtctactacagaacggtactcctagcgagctatacatatcacctgcgaagtttgcgacgtcgttcatgacagagaccagtaatgtttcgcgaatagtaccttaagttattagttccttcgtcgacagagatttcgatacgggttaaagatagtctacgaaaacgtcctcctacggcgttatccgatcttaccccgtcagatcgtccac

SEQ ID NO: 48509 - DNA, 333 bp, Glycine max
  Clone ID: PAT_MRT3847_1480C.1
aaagtggtaggtgaatgtttgaaaacttgattttgaacttgcccctaataaggtggtaggtgaatgtttggatggttgattttgattgaaattgtttttaaagtgaagtgatttataactcttaatagttattaattgtgaaatccaaggattaaattttttgtccaacatataagttaaattgcttccaagtaaataatcgattgtggatccaagactcgtcttttcaacctgagatcaaacaggtgaacaactaaagtcaagttagctgatattttaagggattctgaatcatctaaagtgagcccaaagatgcgatattatgaaattctt

SEQ ID NO: 48510 - DNA, 788 bp, Glycine max
  Clone ID: PAT_MRT3847_14810C.1
cttgcactctttgtctcagggcattcgcatcgacacctcatctctgccattcgattcaacaacagcaaccccgacttcgcaaatcccgagaaattattgttctctttggatgatctgaaagaagcgcggcggtgaaggggtcccgatggtcttggggccatgagagttcttcttctattagtcggtcaaatcggtgtctcttccttcacggtggaggagggacggcgatgcagcagacggtgctatcgaaaccgcgaaacttcatggctccggcttcttactgcagcgccgggaaactcttttacatcttttaagtcttaccaatttcttacacatctttgtcttcattaatcaggctcaattcaacctgaaattccaatgccagctcatattttttctaaatgctttaaaggaatctgtgttatagcgcacttcaatgtatactatttatcaggtaccaacttaattgggccagtcacaagttttgtattcatatgtcactgataatatgtcttatcagtttttatattgttaagactgaagacattttcatctgtggggatgtttcttatctttttgatgaatgaatttgagtcttaaattatattctttattagattcagcttgaggctacaagtctatgactacacattggtttgtctggtaacaatttttggaagactttgtgtaattgactcgggggaatttatatgtttcaaaaatacaaaatactattaatggagcccgctatgacacaaacactaaattgggagcaatatccatcaatg

SEQ ID NO: 48511 - DNA, 497 bp, Glycine max
  unsure (1)..(497): unsure at all n locations
  Clone ID: PAT_MRT3847_14811C.1
cccaccttgttttttcccttgttttttgttacaaaaaaagcagttatccaacaaattagctccgggtttacaggaccggaaacgaccaaacgggcacgtggaaagacccaaaaataacggctccggagaccggtaagaccccaacaatttccctatgatgtaagctttttaagctggaaaccctaaaagaccccaaaaccctccagggggaaaccctgttcggtgccaacccctgaaaacaaaaccccctgaaaaaggattggtgaaacctttgtttgaactaaatgcggccaaccaatcttaatttacagatctttattttccctttgcaaccaatgacactttgttgacactgctggataatgaaagacacatcaaatccgggcgaggccaaattgcttataaacacacttgtaagaacacctttatacgccaatgaggtgaattggaccgtctccttcaaacacaggncatgttagacaccattagaaacaacc

SEQ ID NO: 48512 - DNA, 149 bp, Glycine max
  Clone ID: PAT_MRT3847_14812C.1
tagcccaaatcgagcaaggagaacaaataatcctttgccctatgctcctacctcaatgcactaccctataaatcatccttctcactgatattgccatcttccttgaaattccccccgcctatacccccttcctattcatgcactatcat

SEQ ID NO: 48513 - DNA, 1321 bp, Glycine max
  unsure (1)..(1321): unsure at all n locations
  Clone ID: PAT_MRT3847_14813C.1
gtcttgtttaatggccatttagatgtaactcggggaataagtaggaaaattttgtacaatattaagtcttgctattttatttgaatgattgccctcaacatttgcagatatgtccaaattggcaatggtaaccagcttatcagagacccaaagaaacgaactcgaaaattggcaaatgaaaaagttagatggagcttgcacactgccagcacagcgattgacgcgaaagcagaagtattgtcagttttttactagatttgggaaatgtaacaaggatggagggaagggtccttgcactcaggatccctcaaaaatcgctgtctgtactaagttcctcaatggtttatgttctactcccaactgcaaattgacacatggaagtgtccttatattcatgatccctcaaaaatcgctgtctgtactaagttcctgaatggtttatgttctactcccaactgcaaattgacacataaggttattccagagagaatgccagattgttcttatttcttgcaaggcttatgctcaaatagaaattgtccatatagacatgtcaatgtgaaccccaaggcatctatttgtgaaggatttctcaaggggtattgtgctgatgggaatgagtgtcggaagaagcacagctatgtctgtcctacttttgaagcaacaggaacctgtactcaaggaaccggatgcaaacttcatcaccccaaaaaacaaagcaagggaaagaaaaggaagagaactgcagatcaaaacaacagtagagggcgttattttggttctattcctgctgatgtttctgaatctgggatgatggtggctccaaagcgacatagacagagtggtgaacttgaagaggaactttctgactacatcagccttgatgatgtgaatgaagaagttgtagatgtggtcgatcaatcatttgagccagcaactttctgtgacaatgactccttggatttacagttggacgattttgatgaacttattaaaccagttcttctgttgaaaacaaagttcacaatgcaatcacctcagtctagtagcctccaagcttttaggcaagtagcggagagttaggtgtttgtaaatgaggtaatttaggtagtgcgaaacccttccccccacccccaatccttttttttttactcgtttattttgaatgcatagcttaaatgtaaacaggtcatcctccccctccncttcatttnttttttttttttttttnttttggggatttacaattgtacattgacatctggaataataattaagaaaaaagtttctttctttnnaaaaanaannaaaaaaaaaaaga

SEQ ID NO: 48514 - DNA, 174 bp, Glycine max
  Clone ID: PAT_MRT3847_14814C.1
cccacgcgtccggaaagcctccccctcctccaacctttcctgttagatcgatttcaagattgaagcaatggctgatttaagagttaagaaaggaagcaacaagaagcatggatctgtgtctgtcaccaccatcaaatctttttccgaggagttgccagtggagaattttggcca

SEQ ID NO: 48515 - DNA, 136 bp, Glycine max
  unsure (1)..(136): unsure at all n locations
  Clone ID: PAT_MRT3847_14815C.1
cgngaatcccnacnccnaaacaggaaagnnntnantttagatgggangggggaaggnagccaggatgtgtccgctnagggancgnaacaagtttcccgagacgagtacagctcgattngggnacgtgcgagcgcca

SEQ ID NO: 48516 - DNA, 488 bp, Glycine max
  Clone ID: PAT_MRT3847_14816C.1
ttcaatgtagggttcccgtcatcactgtatgacgtcctccatctttggggggggggggggggggggcaaagctaatgacaatagagaggccccatatgagagaggagtacaatagataatagaggggaaggtgcagctagaatataaaaaacaacaaaaaaaacgcggggccggggtggcgcgccccacaccacccagaacaatattgaaaggtataacgatgatgacgaaggcccggaataggaagcgataaaatgatatttatagtgcgaaaagatttaccgttgagaagtagccaaagaattaatcacgtagacgcacgggtggggtgtaatctttgttgccaggttgaggttagcataaagagcacccaagtgttaagggcgttgccatggcataaaagagataagccgaaaacttaacgttaaaaacaactataagttgttaatacgcacagacgtaagcttaaccaacgtaggtggtttatt

SEQ ID NO: 48517 - DNA, 258 bp, Glycine max
  Clone ID: PAT_MRT3847_14817C.1
atgcagctcagagttcaatatatgaacatcttcttgagtttttgttagctttgttcccctgtaatgtgatggtcacttgaataaaattcttcttattttgactcatgtgcctgattacatgaggatacagcttcttgattttatacggaattggtaatttccctttcaaagcaaaactacaaaacatgcgcgccatagaatcctagaaaacaaaattgtgaaatcgtcgaccaccttctttctagccacaccgccatg

SEQ ID NO: 48518 - DNA, 763 bp, Glycine max
  unsure (1)..(763): unsure at all n locations
  Clone ID: PAT_MRT3847_14818C.1
ggtttcgggttatgctgtgtggggggacatggaatcgggtgctgagttgtttagtcagatgcctaaaagcgattcctgttcatggacatctttgattagaggttatgcaagaaatggtatgggttatgaagcaggctcgaggtttagacaaatgatcaggcatcaagttagacctgatcaatttacactcagtacttgcctctttgcttgcgccactattgcttcactgaagcatggtagacaaatacatgcttttttggtgctgaataacatcaaacctaataatgttgtcgtttgtgctattgttaacatgtattcaaaatgtggaagcttggaaactgccatgcaagtctttaatttcattggaaataagcaggatgtagtgttgtggaacacgatgatattggcactggctcactatgggtatggtatagaagcaattatgatgctatataatatgctaaaattaggagtgaagccaaatagggccacttttgttggcattctaaatgcttgttgtcattctggtcttgttcaggaagggcttcagttatttaagtccatgactggtgggcatggtgtcgtccctgaccaagaacactatacacgcttagctaatcttttgggtcaagctagatcttttaataaatcagtgaaagatctgcagatgatggattgtaatccangtgaccatggttgtaattcttcgatgggtctatgtagaatgcatgggaatatagatcatgagacagaagtagctgca

SEQ ID NO: 48519 - DNA, 448 bp, Glycine max
  unsure (1)..(448): unsure at all n locations
  Clone ID: PAT_MRT3847_14819C.1
gagttcccggggggacccacccctgctgccttggagaattacggggagattaatggagctgggncgtctgcgattacccaaaatgatatactanctgcagctctgttctctgggaataagaactttgaggggccagtgcacccattaacaagacgtaattatcttgcgttctcctcctcttngggtggcctatncccttgctggggcagtgggcattgagtttnacactgaacccattgggataggggagggtggagcananatcttcttcangggatttggggctccaggggnaaaancaaatgggggcaatcaagtgggcgngctggtatgggtangggcacatataancgatccccagggggggggtggggaaaatttatctgtggcaacggggactctttatggttgggaccctacatcgacttatattcatgaggcaccttat

SEQ ID NO: 48520 - DNA, 274 bp, Glycine max
  Clone ID: PAT_MRT3847_1481C.1
tgtgaatgaaattataaatttcaggagttctcattggtagcatcttagagtttaggatgaggactaacactgcgccgaaggattccaatttctgatgctgctgccacacttttgtgcattgatctttccacctgctttgttcccttgcaaatgaaatgataatattttcaatggtcacaacttacaagacttgcagtgttgatctgatactttattgacttgcttgaacatttactatgacaaacccacgtcctacctaaatgacaaatatccg

SEQ ID NO: 48521 - DNA, 472 bp, Glycine max
  Clone ID: PAT_MRT3847_14820C.1
ctttcaggtgtatttgtgttctaattatctattttagaagaacatggaactacaaggtatgggtccaagtaggtaaatttgaaatcttatttctttgtactgatacttgtggtttgcataataatgtttcattgttttgcaaatgatgtaattcaataatcaaaataatcatacttccaaagacatatagtatcatttttaggggaatttagtttatacaagatattcatcttggtaataagatgccgtgacactgatgctttggtaattaactatattttgttattctttacgagacccacacaattattctagaaacagaatattaaaactagtagagcgtgtgtgctataacagttaacagaatttaatgctttctaatttgtttttgctccttttctttagacaaccatgctggcctgcgactaaatataacgaataagactgaggatttcacccctgttaattaatt

SEQ ID NO: 48522 - DNA, 155 bp, Glycine max
  Clone ID: PAT_MRT3847_14821C.1
ggtggctgtctttagccgcatgacgaggtgcccattcaggcggcgaaggatgtcatgttttaaatgctatcccgcactgccctgaatggtggtctttattctgacgaggctggcttcttattacaccaaaacagtgtaggccttcgccaagggtt

SEQ ID NO: 48523 - DNA, 700 bp, Glycine max
  Clone ID: PAT_MRT3847_14822C.1
ctatggtgtgaatcatggtgtggtaatgctacaaaatccaaggcaaaaaccattgatctgtgcaacaatcccatgacaaaagaacccaaactgcagggtgctagacgaatagtttctgagtggccagacctggattttgaggcaagaagattcacagcacgaatcttgggtgatgatcaagaatcagaatcaatacaaccccctaatcaatccaaggacttgaatagtgaaggttcatcgaatgaggacagggaatccagggctgagttatgaactagagacagatgttgtgcaagttgaaatttatccaagaaatctatgatccttgcagcagttagtcactgtctaatatatcggcatccatatccaaacacgtatatgataacttctgcgagtgcaatgaagatttgtagtctcagctggccaattccaaggtctcaaaaggagatcttgattagaggaaaattttagtgaatttgaatcctaccttaaaattttttactgtggacatagtaacctatcaggtcatctaaattcattaatgttatataccagcaatcaacccctcacctttttttttcaggacaattgtttaatacaatggggaagaatgctggattttgtgaatgtcaaatattacagtgatagtgttaacttgttacaagttttctttcagcatcaacataatttttggtgatta

SEQ ID NO: 48524 - DNA, 478 bp, Glycine max
  Clone ID: PAT_MRT3847_14823C.1
gcacgcgtgcgcgcgctcgtaagctcggtatggccatcgcaacaccgatagaatctcctcaccttttcgactctacacgctctcatctcgtcaccatgcagatcttcgtcaagactctcaccggcaagaccatcaccctcgaggtcgagtcgtcggacaccatcgacaacgtcaagagcaagatccaggacaaggaaggcattcccccggatcagcagcgcctcatcttcgctggcaagcagcttgaggatggccgcactctcagcgactacaacatccagaaggagtcgacccttcacctcgtcctccgcctgcgtggtggtatgcaaatcttcgtcaagaccttgactggcaagaccatcaccctcgaggtcgagtcgagcgacaccatcgacaacgtcaagagcaagatccaggacaaggagggcattcccccggaccagcagcgcctgattttcgccggcaagcagctcgagga

SEQ ID NO: 48525 - DNA, 376 bp, Glycine max
  Clone ID: PAT_MRT3847_14824C.1
gcacgcatgccaagcccggaattcggctcgagctcggtcactatctgtttgtagtaacattttaatgattttagcgtaatgaaacttccactatgtccatgggcagcactacactcgcggcgattaacattacttccattcaccaatgaagaatgacatgatagtccccctaggactgagccaggctcagtttgaatctgacatacgaaaagatctaccgctcagcacacgcaacttcctttatagtgaacgtcagggcagtggtggggcctttgcctcgcgtatgattctgagcgtatggaacatccattgggcgtcattatacgcaatggatggcttgaccgtgagatagaagtacaagatcggggcggctcgg

SEQ ID NO: 48526 - DNA, 413 bp, Glycine max
  Clone ID: PAT_MRT3847_14825C.1
caaaataatacttttattctaaagccactttttatacctttacaacaacaaacagaatcggggaaaatacacaaacataaacatcgacatcaaacaggcctgatcacgcaactcacccagccatcttagcacgcagctctggctaatcccgctcctaaatcttctcctaccctacgcacactctaatctcggtgaagcactacctactctaattatcctctaaccatccagtccactccggcctcaatcttcgacgtcattgcacatgcatattgagcactccacgctcgttcctgataccctcgcatctactgtggactcctactcctaacctctctgttccgccaagctcgaagaaatcgcttccgtctgcctcgacggccatgatctcggtttgttcctctacattcaat

SEQ ID NO: 48527 - DNA, 415 bp, Glycine max
  Clone ID: PAT_MRT3847_14826C.1
accagttaagggctatgcttgcggagaaagatctgagattcttatttctttgtgtacagtgtacacaggttttggttttctgtttgacttatggttagtaagtgatttagtatatagtatatgtatactagatgtgacatggcatttagcacaaatattgcatttatttacatctgagattcttttgtattgcataataaattatttctagtaatttataatattttctctagatgtttgaacaatgtacatcttcaaacatatatctggtgaatgaaaaaggaaaaaattgaaagcaaatgcagtttttaaaagcagcttatgctttttgtcagaaataattccacagaaagcagctgtatgtgtactgaaaatatcaaattttgtcttttctgaaaggcaagaaacaccaatt

SEQ ID NO: 48528 - DNA, 1433 bp, Glycine max
  Clone ID: PAT_MRT3847_14827C.1
taagaaaaataatatattatcctttatttcaagtaatcgtatttaaaataatagaataaattccaccgaacctttataaaagttacagcaatctatatctacatctagttagttgttagcaaactgatgtgtctaattttcctttgtaaaaagaatgccgcctccaacgagtacattggtagagcatccctcgttattagctccggaactccctgttgataaaatataaatccgttcttttccttggctttctacataatacaccatagtctatatcattaaaatggttagatcctagtttcagacaagagtcagtctccctactactactactgttgctactaatcctactatctaactttctatgctgtaaagttgtgttagaagacaaacgagaaacatctatccctcgcgagccttctgcatcaggagaaactgaatcatacctgtccatatcagataggggtgaatgtcgcaaattcaagggagaagatgaggatgatgaagatgtgtcagaatcagaattcctcccacactactccaaccattccctgaatcaccaaaaagatattgggagaagtcatctgtgttggttgaatcacgggtgctatctgtactacaagaaccttcatcagagttgctgctaataagggatgaattatcacttgacgagtcttcttccaaaatccttttcaggtggtgaaactttgaatagaaagaggctaaggcaggtgagtcatctgaagaaatggaactattggcatgttcagaaacaccagaatttgtagatatatatcttgcttttgttgtaagagtctttccactgactttacgttttgaatctggggacagtattctgttcctaattaatcttggggcccttggcgagcaccttgcatagaaaagcatatatgctccttttgtcaagactctatccaattcaacagctgtcaccacactgtcatcaaccttgaaccacttgttttggatattcttcacatagcacacatagtgacccgaaaaggcagcattcatgatatctaagtgaacaactaccccatacaatctgtatatgggtgatttatcactagtcccgctcatgaaaggtgccaagttaagtatttcaggaaattgaataggcttgttgagcttcccaaatttcccagactgaaatctctttaatgcaactgtaagaacattcggtgcctctgaaacccacgcgtccgtcttggccttctcatatgatttacatctgacacagtggtacttgttttccccatctaaagtctcagtgcttgtaaatcgtcgaagggcctccaccagggttgttatctcgccttctatctcaacagtcagatccatcatcctttcctgacgctcagacttccctccacatctcatgcattttatctttgatagaaggtaacctccaa

SEQ ID NO: 48529 - DNA, 492 bp, Glycine max
  Clone ID: PAT_MRT3847_14828C.1
tcaaaatgagccttgctagctagaggtccggccctgcttccaggaaacatcaaaggtggagatttcaaaatttttaaccacattattgcataaatttccttaagagattcagtctaaatgatatatgttcatagcctcatcactcatgtatagcatgacattgtactgaaggataatgcatttattgcttggtagatcaaattacccttacagtactttcttcgtcttttttttatttgttgaagttgttgacagcaaggtccaactacctatttagtcatttgtttgtgagttttatgttatgatcataatctgttagttattttcactggtgacttcatggttgaaattaattggtatattatattatattacaaacaaatatattttttttatctataattttccattcataagaacaatgccaataatatgctcaattttatgctacaagtttcctaatattagacattttgattttttttcgtttaa

SEQ ID NO: 48530 - DNA, 202 bp, Glycine max
  Clone ID: PAT_MRT3847_14829C.1
cgacgcagctcactaggacaggcggcctgtcctggcattttttgcactactttatgctactctcaatttcttctccttcactctcagagaactcatatggccgtcacactcactcttaaaaagctctctaaccttactaacaggggattactgccactcccatcaaccgcaggaccttaaccaggggctttttttgataggg

SEQ ID NO: 48531 - DNA, 2215 bp, Glycine max
  Clone ID: PAT_MRT3847_1482C.1
accagactcctggggatagcaacagagacacggcacgcggtacagctcaagcgggagagcggcatcttgccctgaaccaagaaacccacgacgcgcatctccatctaggcggtgtcccgctcagatcaatcccacaacatttcaaatgtgccttgggccagtaattctctagtcccacctcctgcttcatcggcagacaatcaatcccagagcattggaaatgtgcctaggtccgcaaatccatcagtgcctcctcctgcttcatcagctgattcagagtatgaaaagttcatggcagagatgaaatgattttgttcaattttggttcagtgttccaaaaggcctgatgtttcttggagctcttgtgaacctgatttctaacctcttgccatgtctttcttcgaagtttgggactcacttctttaaccttgctgtactgttatgaaatttgcagagattcgggctagaagttggtagcagtcttcatacagcagaagtcaaaagcatattatagttatgattattattaatcatttcttgtcgtgtaggacttaatactgtctgaattattttctgtggcattttattgatttacacagtaatgtctggttgctaatgtttcctttggaagtttgtttgaactttatggcagctggttcctggtgtttcatgttaatacaattctgttggtacaattgaataagtctgttaattcatgcactgcttttccaccacaacctacatatcctgcatcttatggatatccaccttactataatgcagttcctccctcacctcccccttctgcccccatgcctgtctcaacttcagatcaaacccacaacattgcaaatgtgccttgggccagtaattctctcgtcccaccttgtgcttcatcagcagacaatcaatcccatagcattggaaatgtgcctagggccacaaatccatcagtgcctcctcctgcttcatcagctgattcagagtatgagaagttcatggcagagatgaaatgattttgatcaattttggttcagtgttccaaaaggcctgatgtttcttggagctcttgtgaacctgatttcttaacctcttgccatgtctttcttcgaagtttgggactcacttctttaaccttgctgtactgttatgaaatttgcagagattcgggatagaagttgatagcagtcttcatatggcagaagtcaaaaaagcatattatagttatgattgttattaatcatttcttgtcatgtaggacttaatgtctggtcgctaatgtttccttttgaaagtttgtttggtctcttatggcagctggttcctggtgtttcatgttgatacttttctgttgtcacattcagttgttttagacttttagttcattcacaactgattctaacttgtttatagttttggtgatgagcttaattttttttggtttgaggactctagttctcttaatcacttggtgctgaagctgcgttttagatgcctttaatcatacatctctcatcacaaaggtaatcaagccttgccatttgcttttggcattctgggttggtagtagagattttttttaaggatggtttgatcatgcaactataaaatgtacttaacagttcagtgtgacaggtaaaagggttgaaacgtttctctgttcctggcatgataaatgtcagactttggtggcatttttacattttgcctcaaattaaaagtttggctgacatggtgttatgaacaccaagttcttgtatcatgatacaggcaattatcaagtttctcatttgtttctgaagtgatcatgtggcccagttgacatggccaatgttatttggcataaggtgaaggctgaggtgaaaatgatagtgtttgagttgtctgctcatgcttcgtttagctctgttgctgggcgaagatagagtaaatgatcaaagaattggagttgtagaaattttctttattttcctgcttcatatccgcctttttgaattaatacagctttgtattgttgtgactagggatatataaagttttataattcaaccatgcaatattaggtcatggttatcaaaccccacgagtgtgcttggttttttttctggctccgtctgccaaaaagtagtatgccctttgtttaagtactttaagatgtgaagaatttgaaagtatatgttgtttttttcatggtttgaaaaaaaaaaaagaagaa

SEQ ID NO: 48532 - DNA, 487 bp, Glycine max
  Clone ID: PAT_MRT3847_14830C.1
tgcgggtactgacacaacacacacggccttggagtggacaatgtcagagctgttaaagcacccaatggttatgcataaattgcaagacgaggtgagaagtgtggttggtaacaggactcatgtaactgaggatgatttgggccaaatgaactacttgaaagctgtgatcaaagaaagtcttcgtcttcatcctccacttccattaatagtccctaggaaatgcatggaagatatcaaagtgaagggctatgacattgcagctggcactcaggtattagtgaatgcttgggtaattgcaagagacccttcatcttggaaccaacctctagagtttaaaccagaaaggttcctcagcagttcagtagacttcaaaggacatgattttgagcttattccgtttggtgctggaagaagaggttgtcccggaataacgtttgccacatatataattgaggtggtatttagcaaccttgttcaccaatttgat

SEQ ID NO: 48533 - DNA, 382 bp, Glycine max
  unsure (1)..(382): unsure at all n locations
  Clone ID: PAT_MRT3847_14831C.1
gtccgnagtccgggtcgccacgcgtccgcggacggtgggtcgcccacgcgtccgcgaacgcgtgggtgaaccatggctgtgagactcatggtaacagtcttggcgctgatagctggggcaacagtttctctcacaaacctgatcttcatgagtggtgtaaattatcgacgcaaacatcacttaccacaagatcgaaattgattccaagacctattggccgtactgtagatcggtacatgctgttttaagagagttgaacagatcttacgtgctgatgacatcgtctagagaaacgagggcttactaggactatgtagctcatgagtaaacttgttgcgagccgaacagtgccgcgtgtcaccattaatggagaacgctttgg

SEQ ID NO: 48534 - DNA, 219 bp, Glycine max
  Clone ID: PAT_MRT3847_14832C.1
cggggaggaagccacatagagacacattacagagtgagttgttgctccttcgccaaaactctctgggaggatgggtaccttacgagattcgatgcacaagaggcgtgccactggtggcaagaagaaggcctggaggaaaaagagaaagtatcgagcttggtcgccagcctgctaagcactaaactgtcaagcaacaagacagttatgaggatgcgtgtt

SEQ ID NO: 48535 - DNA, 361 bp, Glycine max
  Clone ID: PAT_MRT3847_14833C.1
ggacattcctgaagtggcctgttacaatgatagagttagacgaaagcaggatactacaaagtgtgcacatgacaagagccagtggagaattttgaaagagaaaaaagaattacaaacaggttcctatagacacaaattagatgacaatgtattgttccacaaggatttgtctcctacaaatcttgaaagatccttgtctgctcctgcatcaggaacatcatttgggaggcttcttctagaggaccgccacattttaacgggcgcccttattcagaggaagcttgaagctgttgaagcaatgcctgtggatgtcaaagtaaagaagaaagatgggtttaatactaaagaaaaactttccaat

SEQ ID NO: 48536 - DNA, 351 bp, Glycine max
  Clone ID: PAT_MRT3847_14834C.1
cgtatcttcgcctcggcgcaatgctgaccatctctcagatgtgatgggagaggacacacaggttcaacgcagagaagagctacaaacgtcatatctagcgctcgtgcacgagaacatgaactagctgaactccttcaccggagcgctatctgcacctctcagacgctgtccgactttgaaccctagccaatattcagcctgcgacccagctcgtaaaggcagatcttgagacgagacacatggtgatggagatagtccgagctccaggcaacaacatgggctgtgctcaccctacggatagagctctgagctcataaagtccccattcgactggccgcgaggctaggccaa

SEQ ID NO: 48537 - DNA, 409 bp, Glycine max
  Clone ID: PAT_MRT3847_14835C.1
ggctcgagctgttagctcacatacctacctcacctataaagatgcaggagagcggtcaagaccgtcacggtattgaccatcacctttgaggacgacagctctgacctctttgacgacactaggacaaggaccatgacaaggaaggaatacctccggatcagcaacatgttatttggggcggacactagataaaggacggtcgaacccttgacaactacgacatccagaaggagacaacccttcaccttgtacttcgcatgggtgactgcaagcagcacatcagtatgactctcactgatggaaccattgccctccaagaagaacgctgtgacaccataggcatcgttgaagccaagatgcatgacagggcacgcactgctgcataacttgctcagctcatcaataccgg

SEQ ID NO: 48538 - DNA, 269 bp, Glycine max
  Clone ID: PAT_MRT3847_14836C.1
cctcgaaccgaatcggctgattaaccctccaaaatacaacaccataacgaaacactacagtgcacttagcagctttacaactctcatagtagcagtagtactactacttcacacactctctctctgagtgcctcacacgaccgattctagtgacatatataccaatggaggatcccaaagctgctggcttgacggctctatctatgctctgtaatgcacaaacaacaagaagtcaacatccttctagatctgtatgcgaagtgtcaaac

SEQ ID NO: 48539 - DNA, 274 bp, Glycine max
  Clone ID: PAT_MRT3847_14837C.1
aaaaaacaaatcctttatagtatttcttgtaataaatgttgttattttttctaatgcagacattttcagaccggtggtagtgtgcctgagacaaattatcttcttaagggacacttctttgatcgatggttactttagtttttcagtttttaccattctgctcctctatacatagctagttctccaggttatattgctctatttcacggatatcatgacagtagacgatcaacccatcgcctatggattctatgatgagatgccactggaagta

SEQ ID NO: 48540 - DNA, 267 bp, Glycine max
  unsure (1)..(267): unsure at all n locations
  Clone ID: PAT_MRT3847_14838C.1
cttcgatcttaggacgcgaaacagcgattgcttgtgttatacttgnngacgtgtgaatgatggactagctatgtatgcttgattagngagaagagctgtgtaactttgcgtttcgatttcagttatcgaatgttttggtattgcaagtggatgcacaaaagtgtttatagcggtgttggtctcattactgatgatttatctggcaatttgttctgtatgtgactgcngtgtctgctcgaatgtttcttgatntaaccagagtttggc

SEQ ID NO: 48541 - DNA, 633 bp, Glycine max
  Clone ID: PAT_MRT3847_14839C.1
cttgtttcagtttcattgatcagttttcgagatgtctctatgttgaatacaagaggagtggaattgacgttcagtgtcaggtattgtgctgttcttttgagtagttagcttcttgcttgcttagcactcttttattggatagaaagtatcatttttccccttttttcttcttcttaattccacatatcaagtttcagccatttagtttagttattgatctgtattcgagctgaatagctctagtctcaagtgttttaaattgcggttgtggtcgtggtttttgttgtaattcttaagataaaggttttaaattacggttgcaatttcgtcccggtgcttgatatcgcgggaaattgactgcagtcaatgtggctacaattgtggttatgctactgaggcagtcttgcaaaggagacccaaaaactttggtctttgcagttgaaattgcaatcatggactgttttttaaaacctttgttaatattgtagaaattatggacatccgctgatatggccatgggagacccaaaaatctttacgttacggctgaaatttctgtcactgaccctttttttatatttatataaaaccttttcaaacttaagtcaattggaagtttttcggtggatgaaaa

SEQ ID NO: 48542 - DNA, 462 bp, Glycine max
  Clone ID: PAT_MRT3847_1483C.1
tttgacgcgtgggcggacgcgtgggcggacgcgtgggggcctgatgtttcttggagctcttgtgaacctgatttctaacctcttgccatgtctttcttcgaagtttgggactcacttctttaaccttgctctgctgttatgaaatttgcagagattcgggctagaagttggtagcagtcttcatacagcagaagtcaaaagcatattatagttatgattattattaatcatttcttgtcgtgtaggacttaatactgtctgaattattttctgtggcattttattgatttacacagtaatgtctggttgctaatgtttcctatggaagtttgtttgaactttatggcagctggttcctggtgtttcatgttgatacttttctgttgtcacagttgttttagacttttacttcattcactgattctaacttatttatagttttggtgatgagcttaatatttt

SEQ ID NO: 48543 - DNA, 410 bp, Glycine max
  Clone ID: PAT_MRT3847_14840C.1
ttttcccttatcttctatcctctcctctcttgctaataattaataatatctttggtcacggtcttgccttgcttcattaacaacttgtgtgtttagattatacttatctcactcaaatcatggttcagagggggcaaatttgattttattttcaattaccatgtttggcataattttatttgggatatgtgctacgagattttggtgtcgaattatgtttaaactgaggtaagaaatagttatgttttagcaccgcattagctttgtaaaggaaatactaatactaataaacaatatgtttccggtgaaagcatttatagtatgctcatgattgtttttcctttttttatagacgcaacactagaaaccaaaacataaagggaaatcatgtacataccatttgaattaac

SEQ ID NO: 48544 - DNA, 276 bp, Glycine max
  Clone ID: PAT_MRT3847_14841C.1
atttagcaagtggaggtgaagatggtgttgtttgcatatggcgtgttacatcactggataagtccagtatttgttccaccacagaagacagtaattctaatagtaaagtggaatgtgacaactcttctcctcggaacaaacactcaagtcaacccttcattttccttccaaatagtatttttcaaattgaggaatcaccactgccacaattctttggtcattccagtgatgtcttggatttggcttggtctaattcagatattctcctttcatctt

SEQ ID NO: 48545 - DNA, 2006 bp, Glycine max
  Clone ID: PAT_MRT3847_14842C.1
tctggacaaggtttccggctgaaggatctaagattacgccgccgcatcaatcagtggagttccgctggaaggactactgccctatggtttttagacaattgaggaagctatttcaggtggatcctgcggattacatgttagctatatgtgggaatgatgccctcagggagctttcctctccagggaaaagtggaagcttcttctacttgacccaggacgacagatttatgatcaagacggtgaagaaatccgaagttaaggtgcttcttcggatgcttcgaagctactaccaacatgtttcgaaatatgagaattctcttgtgacaaaattttatggagtacactgtgtcaaaccaattggaggccaaaagacgcgctttattgtgatgggcaatcttttctgctcagaatatcaaatccatagacgatttgacttgaagggatcttcacatggccggacaacagataagaccaaggagattgatgaaactaccaccctcaaggacctggatctcaactttgtgtttcgtctacaaagaaattggttccaggatttcatcaaacaaattgagcgggattgtgagttcttggaagctgagggaattatggattacagtcttttagttggccttcattttcgtgatgataatacatatgaaaaaatgggattgtcaccttttcttttgcgcacaggaaagtgggattcttatcagagtgaaaagttcatgcgtggttatcgctttcttgaagcagagctgcaggatagagatcgagttaaatctggccggaaatcattgattaggttaggagccaatatgcctgcgagagcagagcgcatggctcggaggagtgattttgatcaatacaccccttgttgcagtggggaaacctacgatgttgttatatattgtgggattattgacattttgcaagattacgatatcagcaagaaactggagcatgcttacaagtctttacaggttgacccttcatcaatctcagctgttgatccaaagctttactcaaaaaggttccgggattttgtgggtagaatattcattgaagactggtaatagtaaaatggaaaaagaggctcaaatattaactgatgggagggttttgatatgaatatccaggaaatagctgaaagatgaatccattgttggaattggagagcttgcggttgacggtttgattcactggccactgcttctgtggctataaccaagagagctcacctgaatgcagggtttctttttgtggctgaattttgaatgtacacagccatgataatgaaggcagggagatctttgtacatggaggatgatagaaatgatctctgtctttttttctctagttttttttcccgtgaatggggggcttgtggattcttttttgtggtcacaaataggatataaatatgatgtgaaaaatgatagatagaggagacatgaaaatgtttctctcagagattggattcaagatgcgtggatagttttttgttaataaaagaaagtgtacagttgatttagaaaaggatagatggtaaatttctctttttttttcctcgggaagttggcaatttcttgtttaatttgagatattttggagacaaggttgtgaaatggagggccaatggggcattgggatttctcccacagaacccaagtcgtctactttttcaatataaataaatgagttttaatgtgactctgcactatagggtgccgaggaacattaaaattgaaggggtcgttggctaaacttttgcagtgaaagtgaagtcattaggtggggaggtatgaaaagcagagaaagcacgagaaagattcgcaagcgtttcttgttttttcctctcattttgtttactttctcacttttcactgtttctagtttttgtactatttttcttttaatttgtaaaattttcgatgttgacccccgattccacaacttattttttttgttgttctgtagaaagatgaattgttttttagcatattgtc

SEQ ID NO: 48546 - DNA, 396 bp, Glycine max
  Clone ID: PAT_MRT3847_14843C.1
ttttttttttttttttttttttttttttttttttttttttttttttttttttttttttttttttttttttttttttttttttgaaaataaaaaaggttcccgaattgaacagcccattggtttgcccgtttttaaattttacacaaaggggggtcaaacttttttttaaaaaggttttcttttattggcgggttattcttgttttattcaaaaacaaaatgaccttttaagactggtcaagcaaaaaaaaaaaccttcccaaagggggaaggaaaaagcctaaggtttttctcgggggaaaaagatttttttaaagcccccaagaaagggagggttatcccgctccccccccaggggagggaggaatgggctaaaaaaaggtgggggggtgatccc

SEQ ID NO: 48547 - DNA, 235 bp, Glycine max
  Clone ID: PAT_MRT3847_14844C.1
gtcttgctgccgctgtaactgtgtttgcgtaagcgcctgcaagtgcgataacgtatgtgcaggctgcaagatgtacccagacttgagctacaccgagtgaaccaccaccgagatcttggtcctggcagtggcaccaactaaggctcaattctagagtgctgaaatgtgtgtttccgctgagaactatggctgcacatgtgaggctaactgcacctgtaacccctgcacttgcaag

SEQ ID NO: 48548 - DNA, 861 bp, Glycine max
  Clone ID: PAT_MRT3847_14845C.1
aattcggctcgagctcgagccgaattcggctcgagactgattaggccttgatcatgtgctacatgcttacatgtttacccacatgtggagaaagaggagatcctttgttattattttcttattcttttgggatttgcgttggtcttcttaatggttattttagttgtatagaaacaaagtaaaactattaattactaagttgcagtataaaatatgttggttttgtagagattcgtatttcaggtttgttttctggtggacttggccaagtgaataaaaattgtgtcaaatgtgtcctattttctattcccctttaccatttcaagttgcttagagatatgtgcttttatgtattgttttgattggtcaatgttagttgttactttttgtttccgagaagaattggaaccaacgactttttcctctccccttcagtcttcaaccacgaagccaaccttataactccaaagatatatgtgtttttggcttcacaaatatcctctttttggtatttgcaggaaaatgaagactgtggaagaggtcttgaaaattgacatcaaacctggttggaaaagaggcacaaaaataacatttcctggaaaaggcaaccaagaagcagaaagtaaaactccggatgacctaatctttgtggtggatgaaaaaccacatgcttttttcaaaagggatggaaatgatttggttgtcacacagaaaatcttacttgtggaggctctagtgggaaagacactcaacttaaccaccttggatggaagagagctcacaattcaagtcacagaagtagtgaaaccaaaatatgtgctggtggtcccaaatgaaggaatgccaatttcaaaggacctg

SEQ ID NO: 48549 - DNA, 283 bp, Glycine max
  Clone ID: PAT_MRT3847_14846C.1
attcgggggggaaccaacactgaatacataaattttaacatgaagtttgttttttccatgctaatctacaaaaaaggggggccccacgtttttttttttgggggctaaaaaggctctttccatttaatatgtgggtggctttcaagggtaactaaaatcaaactttttggattccattttttccccactgttttttttttaaagatcagtttcagcttcaatttcaaattccaaggtataaattggttcctccataaactgggcaaaaaaataggtcccaact

SEQ ID NO: 48550 - DNA, 206 bp, Glycine max
  Clone ID: PAT_MRT3847_14847C.1
cccacgcgttcgattgcccaaactctatttcatccaaaccctaacacacacccatgggagtaattttccatggctggcgtcactgttgcattttaggttgcacctgctctgcatggtgtggtcagtttacctcttatacacgcatttatcacaaacattttatttaccagctttcttttacgcatcaatcccttactttaacaaat

SEQ ID NO: 48551 - DNA, 180 bp, Glycine max
  unsure (1)..(180): unsure at all n locations
  Clone ID: PAT_MRT3847_14848C.1
gggatccacagatcaggcaaaacagagacacatcttcatanatgataaagtgacgcagcaattgtgctgtagaattatagatcagacaatgtaagagtgcacttgtttgatgacttactatatgttcacttcatctcccctttctcttcatcttctcccttcactctccacacaacatag

SEQ ID NO: 48552 - DNA, 181 bp, Glycine max
  Clone ID: PAT_MRT3847_14849C.1
gtcttattggatagatttataatatttaaagcgagttcgcttgtgactctgttggttcatggtttcatcttgatcatggtcacgatggaaccataacaagaaaaccccgttttttttcacaaaacaactccatgccctctctttgtcagggggggcttctctgcaaaaaaatctatcccaa

SEQ ID NO: 48553 - DNA, 378 bp, Glycine max
  Clone ID: PAT_MRT3847_1484C.1
aaacaagctcgggcgagaattctttcactggtttctcatttatactagcttaggtcaatgaccaccaccgctttagatacaatcaaaatgctaaaagccgggatccctccaaaagctcgagatttctcaattaagctaagcttctcataaagaacatagtgattgttttgttggacttactcaccaaattacctaaaaaacatgggtgcttaagtgactattagtattcggtaaccaggtttttattaccttagggttttatgatattggggtggccctcaacaacaaagcatgctcaagctccacctccacttccccagattgttggccgcccatttggctcactactcaagcctctctaggatcaatctcttccgt

SEQ ID NO: 48554 - DNA, 284 bp, Glycine max
  Clone ID: PAT_MRT3847_14850C.1
aaggaaccaacccaccttctatgtctcttttttccatatgctaatcacattcacgcgggtaaactacacaaccggcggaagctaaataaaaatttaatcaccttctaatattaaaatcatatctcaaatttttatcgcaagcttttcactttatattttcttcaattcttccatctcacattaaattctaccaaataaaatgcttttataatcacacaatctaaccttctatgttttcttcaatactataacaacttttatactaccatctactttttttttta

SEQ ID NO: 48555 - DNA, 361 bp, Glycine max
  Clone ID: PAT_MRT3847_14851C.1
atctacttgaagaatcaaaccactgaatcactattactagcaggtcttatacatatttttggactactatggctcatttgattgggaccataattatgttagtatatggggtccaaaacccttatcatcttttccagaaattgcaggttagtgttgcaatgtgtaatctatcggatgtatttataatcttcagtccttgatatatcccagctcctttgcttgtcacagagacactggaatgtgatcatggtgaattcttgctccagaaagagtttctcagaaattataggaatatgtgctcttttccatcaagggcaaccaagactatgacccatgaatttcccgttaagttcatgaacat

SEQ ID NO: 48556 - DNA, 222 bp, Glycine max
  Clone ID: PAT_MRT3847_14852C.1
ccacgcgtccgctgataatcactctttacagctatcactcttgctcattccttgaccgttctacaaagcactttgacgcgaaagacgcataatgatgactagcgttacaccgacttttaccatgtgatgaccgcactggggccactgtacgtggccatgatactcgactacgggtccgtataatggtgaaaaattttcttcccggaccaatgctctggcatc

SEQ ID NO: 48557 - DNA, 319 bp, Glycine max
  Clone ID: PAT_MRT3847_14853C.1
tcgttttgctgaagaagacacagagggggaccagcgaatcagagagtgatgacagggagtgatcggagaacactagagctggtcatcatcgtcaccgacagtggaagaagatgccgatcagaaacatctccgtcggaaggtctgaagaggcgactcaccccgacacgttgaaggcggatctggctgagttcatgtcaaccttaatctacttgttcgcccgctcaggatgcggcatcggctacaacaagctcaccgacaacggcgctgccacccctgtcaggctcatgtgcggcttcatcgaccatgcattccccctgtt

SEQ ID NO: 48558 - DNA, 279 bp, Glycine max
  Clone ID: PAT_MRT3847_14854C.1
attatggtattaccaaattaattgtgttaatttttgtccgaggacccggaagttccgaatgatacgaaccgtggggagcaacctaactgttacattgaagcgtcactcaaagtcaacagattggaccacactaactgacaaaactactggggaacccatgcgtgctccacacaatatacatatgactcaatagcccgttcaactggagggacatgatgtacagaggcccactacattagcacgtatcgagaatactaccaatgaaagaggggaaaggaa

SEQ ID NO: 48559 - DNA, 373 bp, Glycine max
  Clone ID: PAT_MRT3847_14855C.1
acccataaattagaaaggcgaaacccctaaacaaacccaattgttttgggggaaatttgcccccggcgataaaaaggacaacccgatttggggaagggggggcaattttttaaactttttttttaatttcggaaatctcggaaagaaaaaaaattggggccccaaccaacgccttattaaggggggggtacactgggaccctgaatggggttttcccaataaaaaaactttgaaccgggggctttttttgcatttgggcttccatgttgttgggttcacccgggtaaacaacgcagggtcggtccaaccaactccctttggccttaaaggcacaaacctttttttttggggtatggggcaaaaacacatttaa

SEQ ID NO: 48560 - DNA, 591 bp, Glycine max
  Clone ID: PAT_MRT3847_14856C.1
cctacccccccccccccccccccccccccccccccccccccccccccttttttttttaaaaaaaaaaaacaataatttattcaataatgtatttcactttaaatacaatcatcggaaaaaatgggggaaacagtaacacaaactttaccataccatgatccttattttaaggggggaaaaatcctttggccaaataaaacctaaattttatttacatcaataaaaaaaaactgaattaatacccagtccgttttgaaaaaaaaattggttgaatgaaaccaaaagtaatgcagcgcttattttcaaaaaaaaggttcatgcctcatttgcattctggaaggggggaggtgtaccaaaaagccaaccccacaccccacctgaactttgcctttgttttgcattaaaggcaatttgttttgatgcaaccttttgccgttaaaaaaactttacctccttttgaaatgccccaatcgtttggagcttttgacctaattaaacaacctccacctccgagtttgaaacacctcaattgctcaaatgcaagctgaccccaaactgattggagctccttgtaaaggtcaaagttacaaa

SEQ ID NO: 48561 - DNA, 471 bp, Glycine max
  Clone ID: PAT_MRT3847_14857C.1
ttccgttccaggaaggtttcccgtcatcactgtatgacgtcctccttctttgggggggggggggggggggggacacctacgtaaaaacgggtcgacaaaagaaacgagatccgggatttggtaggggtgatcaaccctgtaataggagtaaaaaagacaaaaaggcggtccaacgatgtcgtgaagtcaaatggtcaagattagagctaagttatgtaagtagaaagacaaaaggggcgccatacatgttttaagttaagacaccatggtcgaacgaggaaaaccagaagaaagggaacaatgtccgataaacacaatgtttaaaaacgtgttcgtaagaaagtacgttataaaagcggtaatccgtaggttccaacagcattaacgcaacagcattggcaattgttattacaattaaagcgtccggtgttcagtagtatggtcttattgcgtattagtgccttcgtgctg

SEQ ID NO: 48562 - DNA, 419 bp, Glycine max
  Clone ID: PAT_MRT3847_14858C.1
cccacgcgtccgcccactcttccgatctctctctttcgatctgtgtactaaccctaacccgcttctaaccatgtcttccttactctctcataacctatctttaataaaacttacttctttctctttcttcttaatcatatcatattatattttttctactctattttatacatttctttattcctatcctaatctattctctcttttcatcttttattttatctattttatattatttattcctttcttctttatattttataataatattatatcctatttataaatattctataaattttctacatctaatatctctatttatattttatatattttcttattatattctaatcattttatttccttttctcatttatttctatctttatttttactcttatcttcttttcattatt

SEQ ID NO: 48563 - DNA, 714 bp, Glycine max
  Clone ID: PAT_MRT3847_14859C.1
agatatggttggtatattcaagaaaaggggaaagtgggaaacgtaaagttgtagggggagaggcgattatgctgagtgaaaattgggtggggctcaaagcagtagaagatgggaggtggttatgaagagtgcaggatcgtagctgagggaaggggagagcaagttggtttatcagccgtaggcttgggcaggaagttggcatccatcttctcgtgatcttcatagccctgttttgattaacttcttaataaacacttataaaagaagaaatgacataatgaattaagcttttttaagttaaaatcaactttttggataagttaaatgtgacagtttctatagaagttgaagtgtataagttaattttaacttacagaagtttaattcatcttcttattttcttctactttaaatgcttattgagaaatttatccaaacatgaccttattttttctctcttcttgaatattctgcttaatttcattttcaactgatatactttgtgtttatcaatttgagttcaatataatctcctctatatcactatttttttgggttcgtattaggcttatactgaatatcatggactcaaaatcatcttgcagtgtaatattcaaactggttggggcatctttttcccttcatgtgggtagtgtaaatctggcacattgaaacagtgaaacctatgacctaaaaatcatgcaatccccttgc

SEQ ID NO: 48564 - DNA, 636 bp, Glycine max
  unsure (1)..(636): unsure at all n locations
  Clone ID: PAT_MRT3847_1485C.1
aatgggaacccctcgggccggccgggggtatatttttcatttatattataagaatcagtataaaaacttttgaggtaccattattcatttaagattgtgttcaacaaaatattttagttatttttaaattttttttattagttaaaaagtttatttaacggtctggtaaataagttttttttgcatttttttaaataatttctaacattttttaaaacattatttgaactaatattttttaaaatcttaacttctattttttatattttttctattttttattcttaatatatttatcaaattttctgattattctttttaaataaatctttgttttattatttttttatattttacactttttgattactttaaccgttagttttataaaatatttataatttaataagttaattttcaactaattttgtctcatctaacctaaatttatatattaaacttttgtcacaaccctcagtatgtgtgtgaaataggttaagatgtttaaatccaaattgaaaataaataaaaattgaaacattgattttttaaaattttattggagtgacatttggtttttttgggtatttagactttgggggtcaagattaagagtgtgtttagaacancgggttg

SEQ ID NO: 48565 - DNA, 175 bp, Glycine max
  Clone ID: PAT_MRT3847_14860C.1
caaatggcaacagtgataacaccattgaaatttgattctagcatggggagctattgacagtgggctatcgaccccctcggtggaggaatcttagtggacaacactggagactggttcacacttctacaaaattctccaattagtaacctgttgcgagttgttgcttgtatgaaag

SEQ ID NO: 48566 - DNA, 200 bp, Glycine max
  Clone ID: PAT_MRT3847_14861C.1
cagaatataggccctttccttcatacatccttccctttcacacagtacgcacaacttatctcaactatccgtagctcacatgccacttaatcacaacctcaactcgtaaagtttctcactttcatttctcgcacttcaccgtcgtcccccaccttacactgctcttgatgtcttggttatagctcatgatactacacagt

SEQ ID NO: 48567 - DNA, 388 bp, Glycine max
  Clone ID: PAT_MRT3847_14862C.1
tattcatcattttccaaacgggcatttgcgtacttttttaattcaatataacaacttaatttctgcttcaatggctttaagtcatgaagatgtcatcctttttgtgtttattgtaagcccatttcttcactatatgcatattgctctcaactttaatgcatttcaatacaaatatttttaatattattttaacaacaatatttatttgctcctcaagtataacccactttataaaatgattccatctcttccttacaattaaaagtccatatcctattcccttgttatttttgattacatctattacacatgtaaaaacaaccccatcttgccttctcatccttaccatataaccttttctcctttctttcccaatttcatttattac

SEQ ID NO: 48568 - DNA, 239 bp, Glycine max
  Clone ID: PAT_MRT3847_14863C.1
ctcgagccgctcgagccgattcggctcgagcatgaatgtgtagaattgcttaaagatataccaccaaacacgtttattagacatgactaaggtttatcatgctaagttttttaacatctgcaagaaacgaaaggctgtcaaagaagcttttgatttcattaggctcattccaaatccaatgctgagtacatttaatatgcttatgtcagtgtgtgcaagctcccaagattcagaaggta

SEQ ID NO: 48569 - DNA, 337 bp, Glycine max
  Clone ID: PAT_MRT3847_14864C.1
ttccttgtttgagaccaacatctttcatcactttggggaccaacaaaatcgccctgggcatcatgaagaacaacacccttctcttccttgcacttgttgcatgcttcgagactgccacgtctctgcctgttgcaaatgagaactctcagtcgatcactgatcgtctgctgaaatatggcgacgctgagaagcgtgataactctattgcggaccgcctcctcaagtacggcgatgcatataagcgcgaggagtctattgccgaccgtctcctgaactacagtgacaagattcaaaagcgcgaggagtccattgccgaccgccttctaaagtatggcga

SEQ ID NO: 48570 - DNA, 381 bp, Glycine max
  unsure (1)..(381): unsure at all n locations
  Clone ID: PAT_MRT3847_14865C.1
cccaaataacgcggacgcgcgggaaaaacccggacaagggaagaagagcaccaacgaaacagaagccacacgacggccagcaccacagaaaaccaccactggaaccaacccggcaacaaacaggggaacaacccccnggaaacccacccccccacacagagacgcaggcaacgggggagccaccgccggcaacggcgccacagcaaccacaacccccaagcgcgcccgaggcccaaagcagaaagcccaacagaaangaaggcacccaaaacagaaagcgcaacgggccaacaaagcgccagagcaaggggggaaggcccgaagcccaccgaacggcccgcccgagcacacacggccaaacgcaaagcccagacgagaaag

SEQ ID NO: 48571 - DNA, 316 bp, Glycine max
  Clone ID: PAT_MRT3847_14866C.1
ccactgcgtccgaaaaatatataaaaaaaaaaaaaaaaaaaaaatgggacggacgatatagagaggtaccaaagcttacaaacggaaaacaatgcaaagggagagactattttatagagaaaagtatattgaattgcggtggccgaagttttacacacttcttagactgggaaaaacctggagtttcccaacttagtggccttacaaaacatactggtttcgccatgtggcgccctatcgaaaagggccggaccgacagccctttctaaaaggtgggcagtctgaaaggggagtgggacccgatctgtattggcaa

SEQ ID NO: 48572 - DNA, 324 bp, Glycine max
  Clone ID: PAT_MRT3847_14867C.1
ggataggacacagctaactaatttcggtcttcgataccttcccaattgtggagagcaccagtcttctttgctcgctttctcttttgtgccgtcagcatctcatgcctaccttcagccatcgctgatttcgtgcacttaaatgattgtaaccctcttgaacatggtggcacatattatatcttgtccgacatgataccatctggtggaataagagcagccccaacgggaactggaagatgttctctcactgtggtgtaatcgcgcgttgttctccaaaatcggattggaaaaatcatctcgtctccatatcgtaaccgttttatc

SEQ ID NO: 48573 - DNA, 2218 bp, Glycine max
  Clone ID: PAT_MRT3847_14868C.1
gcgctttggttcagcagagtgtcttcagtcttggctcctaacactgtttgcaaccgtcctctgtttcttcactcactacctcgaacacgttgatgtctgtccgaatacgggaacacacaaactcgtaggaatgtctgtgtctttctcttcaacgcggtgttctcggaatcctcatttgcattccaaagacctcagcacatctttgctcaaattcactcaccgttgcatccaacaactttcattcggtaccaggtggtctcggtcgtcttgtgctgaatgttagaagcaccagcttgtgtcgaaggtttcgtggcttgaaactgtgggtacttgagagactcaacttccaattccagccaccaaagcaacctaagaatagaaatcatcacttcaaaaataatttggaaaatgaaaagggatcggtttctgattcatcttcaaatcttcatgttcctgatgataaggtcactcccatggagtctccatctttgctgcagacaggtttgtctggtgctcccatggatgttagcagaaagccctctctttgtattgcagtcataggggccactggcgagctggcaaagaggaagattttccctgctttatttgccctctactacagtggcttccttcccgagaatgtaggcatttttggttattcaaggaaggatataactgatgaagacctgcaatctattatagcttcaacgttaacatgccgagttgatcatcaagaaaactgtgacgacaaattaaatgctttccttagtagaacatattacattaatggaggctatgacaataaatatgggatgtccatgctgaatgctcgaatggagcaaattgagggaggatccaaaaccaacaggatattctacctttctgtgccacaagaagcacttttggatgttgcgtcatgtcttgcaagcagtgctcagacccagaagggatggaatcgcataatatttgagaagccatttggctttgatgcactttcttcccataggctgacacaatatcttctttcaaactttcaggaaaagcaaatatatagaattgatcatctactaggaaggaatctcattgaaaatcttacagttttaaggttttcaaatctagtttttgagccactttggagtcgtacttatatagataatgtacaggtcattttatcagaggacttggctgtgcatcctggaagatatttcagtggctatggaattatccgtgatattgtacacagtcatgtgctccaaacaattgcattgcttgccatggaaccaccaataagccttgatggagaagatattcgaaatgaaaagcttaaggttttgaggtcaattcgcaaattggagccaaaggatgtcattctcggccaatataaaacaagtggtggagccaaagttgatgcgtgcctaaatggtctgacacctacttattttgctgctgcactatacattgacaatgcacgatgggatggcgtgccatttctgattaaaacaggcttggggctcatcaaacaccaaatggagatacggattcaatttcgcaatgtaccggggaatgtgtaccacgagtgcatcgggcataatatggaccgcgctgtaaatgagctcattcttcgcgatgttcctgatgaagctattttagtgagagtcaacaataaggttccaggactaggcctacaactggactcttcagaattaaatttgctttacaaggacaagtacaacatggaggtgccggattcatacgagcatcttcttctcgatgtcattgatggggacagccatttgtttatgagaagtgatgagttggcagcagcgtggaatattctgactccaattctgaatgagatagacaaagacaatatgtcagtggagctttatgagatggggggtcgcggtcctgttggggcatactacctctgggcgaaacatggtgtccgatgggtggaggattagaacttccatccttgtatgtctttcttctatatcacgttacttctgtgtttatactgtgttacctaccccccttaaggactacctaggctctgtgttaagtattctgcaataaacttcaactgctgattagcctcgtttttgtcttgttgacaattgcatatattcttgaaaactgtagctttttttattattattgaatttaggtggaaaagaagaattaaagaaatccaagaaaaataaagagatgggaaccc

SEQ ID NO: 48574 - DNA, 244 bp, Glycine max
  unsure (1)..(244): unsure at all n locations
  Clone ID: PAT_MRT3847_14869C.1
attatgtgcagttcatgtatcacatgttaaaatgcctttagtattcataggatttaatatttaggaaattgcacttatttaatctttgcctagtatctatatatggatatttgantattgcatgatggaggtactgaataagaaagctttcattcagatcttactctctagaatatcctatctanattctctgttcctccccctctaaattcaactgaaacttggtatcngattgttctggata

SEQ ID NO: 48575 - DNA, 296 bp, Glycine max
  Clone ID: PAT_MRT3847_1486C.1
tggtgagaggtgttgtgcccgcgtaagacaagagccttgtgaaaagtgtcgtagtagaagaacaagaagaagagcgtagttagtcaagttaataatcacttgaaagactcgtgctccgtaattggtttttcatgacttcttgcactcttcttatgttgaggagagagtgagggagagatagttggatcattggttcatcactgggtgtgaggaatggagaatgattaatggggatgatgagtgtgagcattgcggtgttggattcccaggtggctgcagggagagctgtggatgtg

SEQ ID NO: 48576 - DNA, 975 bp, Glycine max
  Clone ID: PAT_MRT3847_14870C.1
ttcttcactcactacctcggacacgttgatgtctgtccgaatacgggaacacacaaactcgtaggaatgtctgtgtctttctcttcaacctcattcgcattccaaagaccagcacatctttgctcaaattcactcaccgttgcatccaacaactttgattcggtaccaggtggactcggtcgtcttgtgctgaatgttagaagcaccagcttgtgtcgaaggtttcgtggcttgaaactgtgggtacttgagagactcaacttccaattccagccaccaaagcaacctaagaatagaaatcatcacttcaaaaataatttggaaaatgaaaagggatcggtttctgattcatcctcaattcttcatgttcctgatgataaggtcactcccatggagtctccatctttgctgcagacaggtttgtctggtgctcccatggatgttagcagaaagccctctctttgtattgcagtcataggggccactggcgagctggcaaagaggaagattttccctgctttatttgccctctactacagtggcttccttcccgaattaaaactgtgacgataaattaaatgctttcatttgtagaacatattacattaatggagactatgacaataaatagttgatgttttccctgaatgctcgaatggagctaattgagcttattatctactggctaatgtgaaatacaccaactttcagagaaaattgtgacaacaaattagatgctttccttagtaaaacatattacattaatggaggctatgacaataaatatggaatgtccatgctgaattctcgaatggagcaaattgaggtaactttggaaaaatctcaccagaatatatgaagttctttttgtctcacatgagtacctgtaaactcgttcactagctgtattccctttggtatctgattctatcacagcttattatctacctcagggaggatcccaaacccacagga

SEQ ID NO: 48577 - DNA, 1076 bp, Glycine max
  Clone ID: PAT_MRT3847_14871C.1
tgagaagtcaaaaaatgttacaggtgttcttcttcttgttgctaaattttgtgttataaattactgcatatacatgccatgtaaagtgtaattcctgctgtgttgaatacttcaatatatatatgtgaataaaagaagctggatgatatgtatagaatcctatttcacggtctactttgctgtgtgattttatatataatctttagactttcattatcagttctgattttacataggaacggcacagcacctcaaagaaagcattcatctatcgtgactctaagaataattttcagcattttgggtgttgtcatgcttggaactttggtgtacactcttatccagatccgatggttctcctttccgtatagagcttataactccgtggttggcagcaacattagttgacttctacttcaacgttgtggctctagcagtctgggttgcctacaaagaatctagttggatttctgcaatcttttggataattctcttgatatgttttggcagcattactacttgcttctacattacatggcagctgttccagatatctcgtgaagatcctgcttaccttgttttagtgcatcatggagacagaaaacagatataaggggatatctggtgaggcaacatagcaatggtgttcatgaatcaaaggcatgtaaaacagtaaaaggatcaagtgttgcaggaaataaaaaaggggatcagataatccctgagcagatattgtaacaccagaagacaaaattaacatactagcgcaatagatgtagtttggagatcgttatctctgcaaacactgctagtggatggacgatgtcgttccccaagcagtaattcttctactttcttgtgttataaatgctcaattttttcctctgtatagcactaccactgtaattgattatgaagtttaaacttccgaatcagagaaaatgttcagatcataagtatctattcatttgttacttgcatgaaaatttttaatattcaccgctagacctttctcaggacgttttagctgtaagtgcttcatacttttttatttttagcattatttgacgttatta

SEQ ID NO: 48578 - DNA, 449 bp, Glycine max
  Clone ID: PAT_MRT3847_14872C.1
tttttgcaccattaatacaatacatgcacacattacttgtccataggaaaaatattttgacctttaactcttcattggtgtggccacgtgctaacacacaaaataccccagccatgtgagagcgtatagttgtacaactgcagagcttatctcatccttaggacccgacaaaggaatgcgcttcctagtctgttcctagctagcgtatttgtacatagaacagcatacacgtcttatacgagctgacttaagctaacattctttatatgacccatctgccagagaaagaatgaactggtctgaatgctgtacatcgaccgatcattacttaaactgaattttggtctctcttcgctccactaaaaaatacttttcgcttatggagatgctttaacaccacttttacgttgcagtcccttcaccagggacacgtccaagtggcgcactgc

SEQ ID NO: 48579 - DNA, 205 bp, Glycine max
  Clone ID: PAT_MRT3847_14873C.1
agccctgatgcctctgaagaagaaatctggggatcaagaaattttctgttgcaacaatattctgggcacgagaggagtgaagaatcaatacaagcagagatgatcataagggccccacagaagcttcaattttgtgaccaaaaaaattgtaaaaaaaaaaaaattttttgaccccaaattttttttttaaaagaaataaaggaat

SEQ ID NO: 48580 - DNA, 189 bp, Glycine max
  Clone ID: PAT_MRT3847_14874C.1
attatcccctttctaatgaggttgctgaataccgggcagttgagattcttacatatgaacgaaagccttgccttcatgtatccgagaatcaatcaagttgttcctacttcgttgtgtccaaccgcgttagggatagaaaaatactctccttgctggtcccacacttacgtgcttcactctctgttccac

SEQ ID NO: 48581 - DNA, 839 bp, Glycine max
  Clone ID: PAT_MRT3847_14875C.1
ccttgcgtccgcccacgcgtccgggcttggggggagcttattttttggttgcaaacagagggagagagagaaaagagggagcgtgtttcgttccaaacagcactgaagaaatgactaaagaagaagactttaagctccttaaaatccagacttgtgttctcaaagtgaacattcactgtgacgggtgtaagcagaaagtgaagaaactccttcagagaattgaaggtgtttaccaagttcaaatagatgcagaacagcagaaagtaacggtttcaggtagtgtggattccgctactttgatcaagaaactggtcagagctggtaaacatgctgaactttggtctcagaaaataaatcagaaccagaagcagaagaacaacaatgccaaggatgacaagaacaaagggcaaaagcaagcactggtcaagggacttgaggccttcaaaaaccagcagaaatttcctgcttttagttctgaagaagatgaatactactacgatgatgaggacgacgaggaggacgaagatgaagagatgcggtttctcagggagaaagccaatcaacttcaaatgctcaagcagcaaacagctaatgcaaataatgtcagaaaaggcatgggagccattgcagcgggtgctaacaatggtaagacgaacaatggtgacaatgccaatagtggcaaaaagggaggcccaaatcatcagaatatggggatgaaggatagtcctaatggggggctttgatcagaaaaccatggcagctcttaaatttaacaatggccacctggggtgggtgatggtctcaacctcaaccttgggtgaggccaaaagggccaatga

SEQ ID NO: 48582 - DNA, 185 bp, Glycine max
  Clone ID: PAT_MRT3847_14876C.1
ggctaaagtgagtccccctaacgcaaaaaggcggggatcccctatggacaaaatactccatgtaaggaaaaaataacaccttcctgcagattcaaagaaattgtttacaagggttaatgccaggatggttttttatttaaaatcccctttctagaaaaatcaaaagccaacgcaagcaaataaaa

SEQ ID NO: 48583 - DNA, 303 bp, Glycine max
  unsure (1)..(303): unsure at all n locations
  Clone ID: PAT_MRT3847_14877C.1
tggtacgcctgcaggtaggggggcggaggtcccggggggaccacgcgggcggtggatttctactggcgagcgttcaagggggggtggggggcgagactacgtncgccttncgccttccggtgagccctccctttctgcgtgcgccttncggagagccctccctctctttaagatggaggggctaccccttcttgcattgggggggcttcactttggcttccattnagactcctacgggggggggggctnnganctccttcacctcttccacttcatgggtccaactggggggggaggtattca

SEQ ID NO: 48584 - DNA, 422 bp, Glycine max
  Clone ID: PAT_MRT3847_14879C.1
acggctgcgagaagacgacagaagggtcatactatgattcatagagactaggtgactttgtttaaaatttgatagagttgatttcgaatcattgaacatgattgaaatgtgtgtccaaattaattacagtcacaagttttgttacatcaagcgttaaggcaggaaaaattgatttttccctaaatgaattatgtgctaaaacatatagcaaaacttaggacatgaaattattagatcagtcaagggcttacggccattgaattctcctgtcagaaggccattgtaaaatatggttatagtgaaggaaccaagctaacagaaagtttgaatctaactttgtgacattcagatcagatggcagcaacaatgatattaagtttaaaactatttatcaacctaaagtggagccactgcaactgggg

SEQ ID NO: 48585 - DNA, 219 bp, Glycine max
  Clone ID: PAT_MRT3847_1487C.1
acggctcgagacagacatgaactagaactatcgagaatttttggctatcgatgatcaagatcaacagggatagggaaacacagagcgatgataaaagacgatggctaaacttgagcaaatatgaagaaacacctgctcaagagcaaaaaggaaagagaggaaccaaaagtgaaaacagactattgaaaatgtcccacaaagtgagaaacttggaccagg

SEQ ID NO: 48586 - DNA, 450 bp, Glycine max
  Clone ID: PAT_MRT3847_14880C.1
cattctttttgtttttttttttttttttttatttttttttttttttgggagaaaaaaaaaattattttgttgggcagcaacatccttggtggcaaccggcctgctctggaggggggtgtttgccaccaggtaaccaacactcccccctaaagctgctataacaaggggggctgctgattaaccaccaaaatggttcggccgccaaaaacaacgttgccttcttacaccaggggggaacatccgcccgccgggggggaccccccaataattgaccgccgcctcctggcggcccaccagttcttattatggggagtattataacagcggggaataatgggggtcactgctgcctccggggaaaagttgtgaaccccccacaacaccccacaaactacccgcaagaataaaaaggagagcctgcgggggcgcataaggggggaacctccccac

SEQ ID NO: 48587 - DNA, 304 bp, Glycine max
  Clone ID: PAT_MRT3847_14881C.1
cccaaacacatcctttctctctctaactttcccactctctttatccagcaaccaagctcgttgaagacaagcgcgtcaaaacgctcattattcacagcagaagaagaagaagaagaagaaccaaacaaacaaggaacatagaaacccaacctccttcttctcttctctcgtgattcgcgtcctcccaaccaatatcttcaccgaatctccttcatttataccaaaggcggcgaccatttatttcctatttctgacgccatttttctctgtgcaccactctcccaaattactaaattttaccgtc

SEQ ID NO: 48588 - DNA, 454 bp, Glycine max
  Clone ID: PAT_MRT3847_14882C.1
gctcggaattcggctcgagcgcagagaggacccaatagaggagagtaggaagaataaacactggagaaccttctcccttccggttcggatgcttagagcaatccatctctcaccgatactgcatctgacgggaccacgacccgatcgcacgccaagctatgatcgtcagcctgacacgtcctgcgagtcggcactgatcttcctggcagaacctctccggacgtctctgactgtaccatgaggttcgcgcagggcgaccatcaccgccaccacgaccagtaccaccactaggcgtaggtgtccgggtccgtcgacacctttcgggcgcagatcgccgcggatcgcgtcgagcgattctgcgtcaagcacgagccggctgaactgaatcttatgccgttgcgccgtcatgagtctagtgaagtggatgagcatgtgcacttggctctcgcacatc

SEQ ID NO: 48589 - DNA, 360 bp, Glycine max
  unsure (1)..(360): unsure at all n locations
  Clone ID: PAT_MRT3847_14883C.1
ctcgagcgaagcttgtgaagtgcccnccttactctcatttctctaccccnctcttggtgaggaacggctcttctcacgagaaagcatcctctctctactttatcattagcttttatttcagtgtttgactttttgcgttgctgcttcgttgagtgtgcactcgtctctgtttggcgtctgtacaaataacatgtgggaagaagatgaagaagaagtgagcgtcaccgctttgcatcatccaaacatctgaatcgatgatcatagcctctaattcgatatatattcttttgagcagttactattttcgatccaaagattcttttccctccaaagacctcaccttaatttatccgagttctc

SEQ ID NO: 48590 - DNA, 266 bp, Glycine max
  unsure (1)..(266): unsure at all n locations
  Clone ID: PAT_MRT3847_14884C.1
ctccttncaacgcggtacggtnnagctcgggaatttcggggttccctntttnnagaaaaaagtgctgggattaacaagcaaacnaacggancaanaaaatcncttnatccccnaaccataaannggnggcnccgcccctcatagaaagacaggcattgngcnncncggtttnctccttgggcagncaccgccatnctgnngtgganatnnatnncccccgnncncctncatnnagtaaaggttgtnaggttgnganncttgtgcat

SEQ ID NO: 48591 - DNA, 178 bp, Glycine max
  Clone ID: PAT_MRT3847_14885C.1
gaagaagtactgctacaaaggatgggaatgtaagggctggtcaattcactgttgtcacctcactattactgattatctccagacctaccacgtcgagaatcacttctacaagcggaactcgacgctggcgcacaccgctgaattttgggactaccgctcgctcatagacgctgccggc

SEQ ID NO: 48592 - DNA, 401 bp, Glycine max
  Clone ID: PAT_MRT3847_14886C.1
ggggtgagtatggggctatgtgatgaaggggatcttgcaaactatgccagacataaccttgtttttcttttcttttgaaaaacacattatacaaataaagataattacaaaaatgttatcgggggtgcccaaaagaattctatagcagattatttaacttttactcctaacaggactatcaattctggacctgagctgatgaaaatggattttttactattaaaagtgtacgtccaggcgactataaccttttttcttaggttcctggttttgttggggactacaaatttggtgatttgatgaagataacatcaggttccttagcttggtcaaagttgaatttgttttccgtcttgcaaaataatctgtttgataaacttgtaatgcaggttcttacattg

SEQ ID NO: 48593 - DNA, 395 bp, Glycine max
  Clone ID: PAT_MRT3847_14887C.1
cgcatctaacccctaattaatgtttttttccaaactaaataaacctcgaatcacaggatcatccaaagaggctaataaaacaagccataagaattttcaaattggccatgaaagttaactttccataattgcattccaggctactactctggggcttgtgtctgtccgttcccactgtacactaaccaatattattatcccctacatataaaataaaaaaaggaaaacagcttcctttttttttttcctgctcccttgatcataccccttgataaacctgattgtgcgaaaaccctttttacggcataatgataatactattaataataatcacgattccaccctggtaatccgagttcccttaaccggccttttcttaagcccttccgttattt

SEQ ID NO: 48594 - DNA, 171 bp, Glycine max
  Clone ID: PAT_MRT3847_14888C.1
ggcatccaattgatactgatcggctttcatagcagataaaagtgaggcaatcgaaaggacccctcttcaacgtatgaataagactataaacacatgttatacaaccggcggttcctgggatgacactggtactcgacatcacttttaaaccccgcccaggattagcctaga

SEQ ID NO: 48595 - DNA, 300 bp, Glycine max
  Clone ID: PAT_MRT3847_14889C.1
acccgaggcattgggtgactcaacgatgaacccttacgtgcgcttaccatcaatcacatagcaccgctatatgctgctggtaaccctgagatgccggtcgtcaactgcggatatggaccttctggccatcgcatctctatcgaggagcacatcacgaaagattagctgattgccctactacgctcgatgcgcgaacaaatgagccttgataacagcctgacagccacgatggacgaactgacgctccctgtggcagagctaaaagacgagctggatgacacgaggcctaacattgtgact

SEQ ID NO: 48596 - DNA, 511 bp, Glycine max
  Clone ID: PAT_MRT3847_1488C.1
gaatagcggatgcaagaggagatgattcaaagttggatttggaggaaacagtgagtgagatcatgattcatgaaggcactaggatagctcccgacgcagttcgattttctcatgcaaaaggctcagagctaccagaattaccaagtttctcagggaagaaccccgaaggctggatcttcaaggcagagaaatatttttccccacaccatattggacttcattttctcctgttataccctttccccacaccaggcgaatttcagccatcaactcctcaactacaatatataattgtttgtccttgtgcagtagcatgggagcttaaaacaaaatcaggcaatcaactaacaactgttcctagttcctcgatcgagtcatgttgcatcaggtacgtacaatatgtaatgtttccagtagtagcaaattttcaaattggattcttgagacaggagcaacagatcatatacgtcacaccttatcagaatttcaattctatagaaagattaatcct

SEQ ID NO: 48597 - DNA, 282 bp, Glycine max
  Clone ID: PAT_MRT3847_14890C.1
ctcaaacattaattatttgtggtgcaagtgcaacttacaactctcattgataatttcttcagtcttcttaatcttacttttattcttcacttaaaatggaaacccttattggaaaaacattcctcacactcttatttccatcttcagttttctcaatagtctcgtcaagtagtggaccagctccatccagcaacatagattggtggtgcaactaaccccacaccctgtgccatgcaaacactacaccattactcaaatgaagagccatcatttccaaatcaa

SEQ ID NO: 48598 - DNA, 242 bp, Glycine max
  Clone ID: PAT_MRT3847_14891C.1
tttatttatagatacaaatgattatttaaaaaaaaaaaaaaaacttctccacgggaaccctggacgtccacctcctttgtctttctctttgccgctaaaccatcccatcccaactcaaacaccagcaccaccaccctgaaccacccctaaccaccggtgcggcacccgttcggcgtgccaacctcacaaccggatcaccatggtgaccaatcaatacaccaagggaccatcggtaggcggtg

SEQ ID NO: 48599 - DNA, 344 bp, Glycine max
  Clone ID: PAT_MRT3847_14892C.1
gggcacgaaggaatggctattgacgttgaggttgctgagcgtggctccttgtctgggaaggactaccaagaccctgcaacagcacctctcattgatgctgaggagctcacaaagtggagcgtccacagggctcatattaggtgagtcattgccaccttgctcttcctttacattactgtgctcacagcaatatggtacaagcaccagacggatcatgctgatgcgtgtggtggagctggcattctaagcattgcatgggcctttggtggcatgatcttcatccttgtctactgcactgcttggatttcaggaggtgacattatcccaggagagacatttgggct

SEQ ID NO: 48600 - DNA, 2040 bp, Glycine max
  Clone ID: PAT_MRT3847_14893C.1
gcgcttgtgttgtttttgtgtctcataaacctcacactctccctcactattctccagcctccactcgctgaaagagactcctactcgtcaatcattgtgaagaaaagaagtgaacactgactctgttattgttctgaatttcctcaccctatacaactagttttaacgaacatggaaactgaaaagtctaatgtttcaaaggctgaagaatttaaactccttgccaatgaagcattcaatgctcgaaaattctcccaagccattgatctatatacacaagcaattgagctgaacagtcaaaatgcagtttacttttctaatcgtgcctttgcccatcttcggcttgaggaatatggtagcgcaatacaagatgccacaaaggctattgaaattgatcctaaatattcaaagggttattacaggcgaggtgctgctcatcttgggctggggaaattcaaggaagctctgaaagattttcagcaggtcaagaaaatgtgtccaaatgatcctgatgcaacaaagaaattgaaggaatgtgaaaaagcagtaatgaaacttaaatttgaagaagcgattgctgcaccagagtctgaaaggcgttcaatagctgaatccatagatttccgaacaatagatgttgagccacaatattcaggagcaagaatagagggggatgctgttactttggattttgtgaaaaaaatgatagaagatttcaagaatcagaaattcttacataaacggtatgcattccagattgtattgcaaaccaagagaggcattgcaagctttgccttctcttgttgacatacatgttcctgatggaaaacattttactgtttgtggtgatgtgcatggtcagtactatgatcttctgaatatttttgagcttaatgggcttccttcagaagagaatccgtatctatttaatggtgactttgtggataggggatccttttcattggaagttatcctcactttgtttgcatttaagtgcatgtctccatcagccatatatttagccagaggaaatcatgagagcaagagcatgaacaagatatatggttttgagggtgaggtgcgctcgaagttgaatgaaacatttgtcgaactatttgcagaagtattctgctgtttgcctttggctcatgtgataaatgagaaagttttcgtagtacatggtggtctttttagtgttgatggagtcaaagtctctgacatccgatcaattaatcgattttgtgagcctcctgaagaagggttgatgtgtgaattgctctggagtgatccacaacctctccctggaaggggcccaagcaagcgtggtgtaggcctttcttttggtgcagatgttacaaaaaggtttttgcaggaaaataatttagatttagttgtgcgatctcatgaagtaaaggacgagggttatgagattgaacatgatggtaaactcataactgtgttttctgctccaaattactgtgaccagatgggtaacaagggtgcctttattcgatttgaagcgcctgatttgaaacctaacattgtcacattctcagcggtgccacaccctgatgtcaaacctatggcttatgcaaacaacttcctccggatgttctcataatttatacagctgactagaagaagcccagaactgccaatggcttatgctgttttgcaatgactgtgttatgccctaagggcaagtttaaggtggtggctagcgaagatttagtacatgttggccactgttgttatgtataatatttttggcttaaaattttattaaaattcattttttctcccccctaatgttacccctttagcttgtgccttttgtcattcggcgaacgagtgtcagtaaaatttgcatcttctttagctttgtgaaactctagtgataatgctttacttaaaactgaacatggacactgcatagatggatgcaagaccatttactttgtgtttctgctagtgtctagctgttgattagacttggatcccaagtttcaattgaatgagatatttgttttatgcaagacc

SEQ ID NO: 48601 - DNA, 1775 bp, Glycine max
  Clone ID: PAT_MRT3847_14894C.1
gagaactagtctcgtcggctcctgcgcggccgctcgagcttttctttttttccgttaaacacttaaattttaaattattgtcggagagaaaaaaaaggagcaataaagtcacatggcttaaattatcggaagcagtcaaaaaataatataagtaacaaaattcatatcaagaaatagtaaactatgattggaaccatttcctaagctgttttgaatgtcttttctctccatcattctctagggaacccttgtgtgagaacttggatttatattgttctacaagcatgtcaagcttgtctactacgtccttccctactgaacctttattcttcttaagccgtttctttaaaaccttttggccagcttcttgctcttggttttgcatctttctttttctaaaccccacatcatctttattccctgattttcttctattagagtcagtggcagtgttttgaccttcaagtgatgcaccaccattgttatggccattttcgttattctttggcttcatggacaaggctgcttctcgattttctttcagtgcctttttactcttattgttgcccttttgtcttttggatttgtgtccttgtggggattttccatttgccactgcaacacccgattcaccatttgtattcagtactgattcctttgctggttcgtcatgctctcgagattttcgttttctgtcctttacaggcttgcaaccttctactgtgccaggtttgtcattatccatggcattgttgtcatcttgaggagcctgctgctgagattgtagctttgccttccgaagtttaagtgtttgaacattatcaagagcaaactccacgatcggccgatgctcgggaccaaaagtttcaggattattgttaagaactctcagagccacaagggcatgctgatgctccgaaaattcaacaaaggcaactccccgtgaatagcgttcttgagcaacatttcctttcttttcatttttcaaaaactttatctgccgaattacaggtttttgcttggtagctctagagataactgcatcaatgcaaagcttcttgagttctttctcattcattgacttgggtaagttgtagataatgagtctagttcttgaaacatgaaaattgggagattgaagctttgtcttctttttcttttccaactcttggcgttttaacatatcactggctgaaaccccttcagcagctgtagttccctcaagaataagtccctccttagccaagtaaagattgcggtggtcatgaacctcattttttgctttctccagttccttgtcatgtgctgatttcttatccaaagccttcaaaacttttaatggtctacctttcaataaaatacccatcccagaagcagcactggcagttgaaattgcagtattagctgcttctacagttttaaattttagaaaaccagtccctctcggtcgcttggtaacttggtggagaacaggaacaaagtattctacttccccaaatccagaaaaacgctgtttcacttcttcgttatcacattcaaagggaagattacatataaaaactgttccctgcaaatcatcttcttctgttctcttaggaattgataagttgtttctgctggaaatttcaggcttagaaacacctgaaacctttccagactcatttttttcatctgcatccttaacaatttcatcagatcttgactccttgttttctttgatcagcatagaatcattgtttgcagatgttcctttactcgaggatgtaagcaagttg

SEQ ID NO: 48602 - DNA, 422 bp, Glycine max
  unsure (1)..(422): unsure at all n locations
  Clone ID: PAT_MRT3847_14895C.1
gccacgcgccgcccacgcggcggagcaggnacccgaaggcaagccaacacaagggcaccggcgcttaaactctagaagctcccaagggcctctctgcctgggaaccanacctaaacagancttcggnaaggagggggnnnnnncnnnggagggacatggaagaaaaaaagccccccgaggggggggggggggggggccacaatgtttccttcattgggaggcttgaaaccccagtcacatccagaccctagattgcaggggacttaccgaacctgcccgcatacaggaccgcagggagccgactactaagagggatcgaggcggggccagcccatgagcaccttgtggagagcccatgcnagaaggccgggcctgggaggaacaccgagagcgccgagcaagcgggctctctcgccgggggg

SEQ ID NO: 48603 - DNA, 394 bp, Glycine max
  Clone ID: PAT_MRT3847_14896C.1
gattatttccgcaaagcagccattacccggctaggtcgacgattgactccgacaaacaccaaaacgcgatagcgttcgaaaccatagtcccgttctcaccgcacagggttccctattgcaaggactctcaatatggctaccaggtatggctcttactggcaactcctgagtgctgggacgcatacgccccggcgaacgaacgctctagggactcccgaaataccacagacagcgaaagtaaccgcaatgcaaaaccctaagccatggaccacgacgacgaccctcctgcactcgactggctttgggtgaatgaaaccgtcgctacttccaaagaaatcaccactaccactgtgcaggatgtcatcgatgctaaagctgccggacatcatctatt

SEQ ID NO: 48604 - DNA, 137 bp, Glycine max
  Clone ID: PAT_MRT3847_14897C.1
cctcaacataagcaggctgtcttgacaaataaggggattataaaagcataaacagggacccgaaatcccaagtgggaaatttccagttcaacaagaattccatcacgtaaactaggcaagatgaatcattaaaacaa

SEQ ID NO: 48605 - DNA, 217 bp, Glycine max
  unsure (1)..(217): unsure at all n locations
  Clone ID: PAT_MRT3847_14898C.1
gtttgctctatcttgttgttcttcttcatctccaattgagtttaattaaagagaagaaagctagctagctanaaggnntgtttgtagctgncttcattgattatgactatgatcnnctcgctgagacanagagacatntagtctgcancactctcnaagcgcnnntgaagagananatcgncantagannatacccanagtggnaagcnnanagtna

SEQ ID NO: 48606 - DNA, 855 bp, Glycine max
  Clone ID: PAT_MRT3847_14899C.1
tccgggtacgcctccgggtacgggtccggcgccccgcgtcctcccacgcgtccgcctccttctcacctcctcctcctctttctctctcttcgcctttctttctctaaaatctcagagctgttgttgttatctgctccttcgattccaggtgttataagaggagtgttagtgaaatagtgcttgatcagggaatggctgggatttcgagcgaggaatctggagtgggaaagtctgcggagggaactttcagtgggcagcgttgtcaatctggggaagcattggcagaatggcggtcttccgagcaggtggagaatggaaccccatcgacttcccccccttattgggacactgacgacgacgacgatggaccaaaaccttcagaattgtatggaagatatacatggaagattgaaaatttttctcagattaccaaaagggaacttcgtagtaatgcgtttgaggttggcagctacaagtggtatattttaatttatccacaaggctgtgatgtctgcaatcatctctctctgtttctttgtgttgctaatcatgacaaacttcttccaggatggagtcattttgcgcaattcacaatagctgtggtcaataaagatccaaagaaatcaaaatattctgatacattacaccgattttggaagaaggagcatgactggggttggaaaaaatttatggagctctcaaaagtgtatgatggctttgttgacgcatctgacaatctgataataaaagctcaagttcaagtcattaaggaaaaagctgacaggccttttcgttgcctggattgtcagtataagagagaacttgttagaatatatttgacaaatgtagaacaaa

SEQ ID NO: 48607 - DNA, 169 bp, Glycine max
  unsure (1)..(169): unsure at all n locations
  Clone ID: PAT_MRT3847_1489C.1
agctattgcggcccgttagaacaccacaccgcacctacctngttggacacgccgttgccagaacacaccggcgggaacagnggcagcacagcggccggacgccacacggngctcataacagccaccagacccaagagaacgacgcgtggacgggaaacttccgctaagg

SEQ ID NO: 48608 - DNA, 567 bp, Glycine max
  Clone ID: PAT_MRT3847_148C.1
ggaattataaaaattttaagttcatctttaattaaacttccatctcctaagaatatttctttgttttgaaattttggatcaattttaggaatttgtttaataacgcaaattttatcgggacttttccttgcaatacactatgttcctaatactgaaatagcttttcaaagggtagttcatatttgtcgagatgtaaatataggatgatttatacggattattcatgctaacggagcttcattcttttttatttctatatttattcatattgggcgaggaatttactatgaatctttctacttaattcaaacgtgaaacttaggggtaataatctttttattaactatagcttcagctttcttgggatatgttttaccttgaggtcaaatatctttttgaggagcaacagttattacgaatttgttatcagccattccatatttaggaaccactctagtttactgaatttgaggaggattttcagttgataacgcgacacttaatcgattctttgtttttcattttatttgcccattcattgttcttgcattagtaattcttcattta

SEQ ID NO: 48609 - DNA, 402 bp, Glycine max
  Clone ID: PAT_MRT3847_14900C.1
cgaggcgatcgcgtcgctgaaggagaggaccggatcgagccagtacgcgatctcgaagttgatggaagacaagcacaaggctcacctcccggccaacttcaagaagctcctcctcgttcagcttcggaaacttaccgccgccggcaaactcaccaaggtcaagaactcttataagatctctgccaagcccgccactgctgtgaagccgaagtccgctgctgccgccccgaaggcgaagccgaagtccgcaactgctgcagctaaggcgaagctaaagccgaaatctgctgcagcgaagctgaagaaggctgctgtgaagccgaaacggaaatcctctgctgtgaagcctaaatctaaggctgcggtcgtgaaatctaaagctgttgcccctaagcctaaagc

SEQ ID NO: 48610 - DNA, 248 bp, Glycine max
  Clone ID: PAT_MRT3847_14901C.1
cccacgcgttcgcccacgcgtccgcccacgcgtccgcttattgtttcataaacttgtcaagaatgtgtggtaattgtcaacatgtttgtgattattgatgcaatggtgtatctgctgtaaaaactgaaatggaaaaaagttctgtgaaatgtatattagtatataccttgaatagttttcctaatgaaagctaatcaaaatcttgggggtttttttccttaggggctaagaatacccaccgttttttt

SEQ ID NO: 48611 - DNA, 384 bp, Glycine max
  Clone ID: PAT_MRT3847_14902C.1
aaaaaaaaaaaaaaaaaaaaaaaaaatttaaaaaaaaaaaaaaaagggaaaaaaaaagggaaaaaaaaaaaaaaaaaaaaaaaaaaaaaaaaaaaaaaaaaaaaaaaaaaaaaaaaaaaaaaaaaaaaaaaagggggggccgtttaaagggaccaaagctaacgaccgcgggaaggcaacgaaaaagcccttaaaaggggcccccaaaataaaataaaggggccgccgttaaaaaacgtcggaacgggaaaaacccgggggtacccaaactaaaccgcctggaaaaaaacccccctttcgcaagggggcgaaaaagcaaaaaggcccaaaccaaaggcccttccaaaaattggccaacccgaaagggcaaagggaaccccccct

SEQ ID NO: 48612 - DNA, 1063 bp, Glycine max
  unsure (1)..(1063): unsure at all n locations
  Clone ID: PAT_MRT3847_14903C.1
aaaaaaagagccagcaccacgggtctacccacgggcgccagcgggaagactgagtagaaaccctagagtgagaaagaaagagagagagagagagcgatgaggagaactctggtgagaaatggcagtctctacactcgcaaccttcttcatcactccgccctcgcacttgccgcttcatctcgtcctcaattcagactcttttcctccaatgaaaaccccccaccggttccccaaatcgacgacgtgaacaacaaagagctgaaagcgcagatcgagacctacttcaagggcgacgagaaggtgctcccgtcgatcatggaggcgattctgaagcggaagctgtcggggaatcacgaggacaccgacgacgagctcatggaggagctccgcatgcgccccctcgacgacgtcgacgaccgggactttgagtctgacttcgagaacattcacgataccgacgaggagatcgacgatttgtacaacgccagggacgtggtgatgaagaggatggtgaaggacgagtacttcaacatggatgataaaaagtgggatgacattgttgaggacgggatcaagcacgggcttcttagggacaccaaggagtgcgaggagattctcgaggatatgctcagctgggacaaactcctacctgatgagataaaacagaaggtggaagtaaaatttaatgagctaggggacatgtgtgaaaaaggtgaacttgaacctgaagaagcttatgaacagtttaagaagtttgaggatgagattgtggcagaatacctggacaaaatggaaaaggaggaggctccacagtttgatgatactactgtgccggataagaaaaaggacttggatgatccaccgggtgaaggtccaattctgcgctggcaaacccgggtagtctttgctcctggtggtgatgcttggcatccaaagaacaggaaagtaaaattgtctgttactgtgaaggagctagggctttcaaaataccaatttcgccgtctcagggaattggttggaaaacgttatcatcccaggagagatgagctacaantactagtga

SEQ ID NO: 48613 - DNA, 483 bp, Glycine max
  Clone ID: PAT_MRT3847_14904C.1
gcagaggccacaacgtttttcattagaaattttcagttccaccacattctctgaactgaagaaacctcttgcgctgtggacgcagcctccggcgttgggcattaccgccattgaagctcattcacgctttttttcaccgatcctcacaagactagtgcgatttgtaacactccgttgtaactttgacgcaaccaaactctcgtacaattaagaagaaaaaacgaaaggcatgttcgttggactgttggtggagactgagatagatacgaaggctgctggctgctgcacaagctcaatcctttttaaactttgacgcaaccaaaccctcgtccaattcatcttcactcagtactctctatgccaatgccccacattgtaaattttcggcttttcttacccttccacacactcaaaaccaaaaccaaagcccttactttctacaccctcgttgatatcctctgttcccatctccaccaaagcaat

SEQ ID NO: 48614 - DNA, 255 bp, Glycine max
  Clone ID: PAT_MRT3847_14905C.1
ggtcagtggcgattcttccggagagactgctttgaggatggcgatgcagactagggagcagcatatcaggaggtacatggccacgagcagcatttgcagtgctcaggcactgcgtgcaaacatggctgccatgtatgctgtgtagcatggacctgaaggcctcaagaacactgcacaccgggtccatggcctcgctggggcatttgctctgggaatacagaaacttggaactgtggacattcaggaccttccctt

SEQ ID NO: 48615 - DNA, 404 bp, Glycine max
  unsure (1)..(404): unsure at all n locations
  Clone ID: PAT_MRT3847_14906C.1
gatattggatagagcggnccatttggacggaaanaatatgccccanaagcctgaggatctttgtcagtcccatcatttccagaataataactgtatgattgttcaactgatgttgtaaccagagttctactgtttacatagtgagtcagtcttccttcattttctgaataaagtagctttaaattcccttttccaacttctatgcttttattagtacttccttctgatatgtatatctttgagatagttgaactatgacttgactgtttagagcttggcactatataggtgctgaaaccaaggggaggaacagacactggaaatgcaagccaagacttgagtgtgtcgcccccaggagctgttcctatatatgctctgacataatgttttctcatagtcaaagt

SEQ ID NO: 48616 - DNA, 239 bp, Glycine max
  Clone ID: PAT_MRT3847_14907C.1
ggtactgcttttctgctctgcattctgccatatatcttgagattcagtgcaccactgcactgccttgagatccctatctatctctcaccgtttataacaaaaccataataatattcaatcactatactagtactagtagagtagtagttgacaccttttgatggtgatggtttagtctctttcacatcacaagcaaggcacctcttctcattttacttgtttttggacctcactccata

SEQ ID NO: 48617 - DNA, 491 bp, Glycine max
  Clone ID: PAT_MRT3847_14908C.1
ctttgagtgtgtttgctatgatgaaggatgatgggtgtgaacccggggttataacttatgacttgttgatggggaaattgggtgcccacaatcgtattgataaggttaatgctctattcaatgaagcaaagagtagagggttgcctgtgatactcaaagagtatgctgttgacccgaggtatttgaagaagaagaagaaggttgtcaagggtgtgaagaagagggaaaccttgcctgagaaaatggctaggaagagaagccgcctgaaacagattcggctgagttatgtgaagaagcccaaacgagtgatgggtcgttgatcattttttgtactttaaaggttttggaatatatttccctatttaatcatcgttttctttgtctcattgttagttttgcatattcagagataaatctttgtatggaaatggctcctctctaggacatatatgccgccacatattcagaaataattttttgtacttgctgcg

SEQ ID NO: 48618 - DNA, 438 bp, Glycine max
  Clone ID: PAT_MRT3847_14909C.1
aattcggctcgagatttgtcgcacccactacctattcactcgaaccctagcctcttcacttcctttgcaccttgaccaaccggactcgaaccctagcctaccctcttcacttcctttgcaccttgacaggcacgttgttcttttaagcttgttttaatgggtcaatgttcccggccaacttgttttctacttctttcacgggtcgaagttggcggcttgaccgcacaacaccactccactgccactgcttctccggtgacgccgcaatctctcgaaaacgacaacgacaaagacgacaacgaggatttagcgctttatggtggcttattcgacaatgaacagaaaagaagattttggagattaaagagaaactcgaagagtctgaacaagtattggtctgtagaagattcgaagagtgaaaggggaattcagctattt

SEQ ID NO: 48619 - DNA, 335 bp, Glycine max
  Clone ID: PAT_MRT3847_1490C.1
ctcaatctacactaccataacttcaaaagagatctctcctcaaacatcattccacgtgttccgctgggggaccggagactccggacacttcatacaccataaaatccatacacaaggtgtcaataaaccggcacggaagactatgtaaagcgcaaagcctataaagcgggcccaaaaacgagcagctgatggaccctgaaactaacatagggaacctggagcagatgtaccgagactaaaccaaccgagagatggagcgggacaaacgaggccaatatgagggtgaccaccgggaaatgtacgaacaaaaaggcggggtggagactgcgcaatta

SEQ ID NO: 48620 - DNA, 421 bp, Glycine max
  unsure (1)..(421): unsure at all n locations
  Clone ID: PAT_MRT3847_14910C.1
ggggggggtagataatacacttatcccgctcattactccccacnngaagcgagaaaacatgaatttttttgttctgttcaaagccggttaaacggtctataagagacggaaatttttaattgttcccaactacagactcgtttttctagaaaactatacataaattaaagcagaaatcattatacttggggaagatttgagctggttggcgctaaaaaaccaccagaaacacgaccaaagccttgccttccggccggacccccaatagagggcctggtgttagtatgagctgctgccttgtatactaaaaagaatgagcaggttctcctgggagacctccacggtattcatcatgatcaggatcaaacctacttttgccttcatagagtgggggaccgttatggcgatcaccgtttgggtc

SEQ ID NO: 48621 - DNA, 377 bp, Glycine max
  Clone ID: PAT_MRT3847_14911C.1
caaaacccagggagcaggaagggacccattaatatcgtacaaaatccctacttgacgcgacctttttgggtttgcgaaattggaaaccccctaggctttgaacgtggaagggtgaaaaccacgcccattttcttggccaaacgcacatgtgcggggcaccgggcattaaacctgccgccttggtaacaacaaaggcatttgcgtgaccaggggggcccagccccgaccgaaatccacactcgggccgatgcgaccacccggtggaagagggtcattcacgcgaccgggccgggactaaatggcgattctgtgttcagcttcaaacccaagggtgctaccagccaagttttcggcgactccagaagtcgggctggcga

SEQ ID NO: 48622 - DNA, 219 bp, Glycine max
  unsure (1)..(219): unsure at all n locations
  Clone ID: PAT_MRT3847_14912C.1
cggacgcgngggcggacgcgngggcggacgcgngggcgagcangcaaaaaagcnngccncncgggcagancngnnngngaangaggcannnggnacngcncacagggcacangcancaacagagggngnnacnaaanacccgaagccancngnggccggnnnncnnnngcaaaaggaacnngannacccngnnggggcggnancaagccccaaaaggcc

SEQ ID NO: 48623 - DNA, 265 bp, Glycine max
  Clone ID: PAT_MRT3847_14913C.1
ctccctccccacttacatacacactctttttcttcttctacccagtctagttgtattttttagacatcgagcgggagcttaaccatcttcatctaatagcaccatttcgaatttaatgctctatccgtagcctccaagaacttattttatattgcctaaaccattcttataaacgtctacatcttcatcacagttcgctcctgctaagatgttttaagctattacttctattacttttatccacttatcattccatttgttactt

SEQ ID NO: 48624 - DNA, 804 bp, Glycine max
  Clone ID: PAT_MRT3847_14914C.1
gcttaaccctgcactttcaactacaaacactttatcttgcacttgcagcgtctctcacactcaactttgcaccaaccagccagctccatctcaacgtgaggttgaagatgctgtatcatctcttcaagaatttatgcaagcatttcaacagatctcaggcttttatgattcgaggggagtgatgtctcatggatataaaagactatatgatgcttttcagttgctgcaagctgatcccactattaagagattagtggtatcattatcatctgataaggctctttgggatgctgtcatgagcaatgtccggcatcaaaaaaagctcctagagttgcctgattcagttgattgcaggagacctcagatttttgaactaaatgaatttggcatacaaatacttagctggacattggatatcataaagggaaaaatattggaactaatagaaagtttccaatcacttgtgaatgatttatttcaatcccctaagatggggaatgccacaacaattgcaacagagagggatgaaaaagttaggtcatctttccttctctccatactaatcctcttgattataatagcggctcgatctcaaaggttttagttcatggagtgtagatatagcaagagtactccattgtatatttataattatatatgattcatgttcaaactatgagtcatttatgtaacttttatttttgtactagaaagataattggataagctatgttagctctttcatcattacaaaattatcatatttgaaatattttatatcagctcctacttctaactgacttc

SEQ ID NO: 48625 - DNA, 330 bp, Glycine max
  Clone ID: PAT_MRT3847_14915C.1
cccacgcgtccggttacatattccaagcctacacatatattaagaagggcgcattatgcactattgacataggatccatagcacttctacttctccatcatttcttctgaatctctatttcctcttattattcacgacaggcgtgtcttcactgcctttgaactcattatgataccaactgtcagtgaggattttgcataggaatacgatcgagctattgcagaattacagaaattgttcagggtgaagagtgtactcaaagtcacaactgctgagatagtgtagcatataacagcatctctgggatcatcatcatatgatggcattcta

SEQ ID NO: 48626 - DNA, 573 bp, Glycine max
  Clone ID: PAT_MRT3847_14916C.1
aaagggttacaaatattcaaattttattataaataaaatactgttttctttttaaacataaaaaaatgccaagtgttgcgctttattgccctccctgaggggggaaggctgtagagattaaggcaaacagctaaagtgaaggcacattgaaaagggccacagttggaatcaaaggaaaattccatgggcgggggcgggggagggataaaacaatctgttctgtgcgggaccccgcattctacagcaaccattctgtccatttcattacataaaatacagattattggaactatacaataaagcaatggctgtgtcaaaggagcgtaataaggtatcatcttgtaaataactttcattttaaaaaataaaattctgtttaaaaatataccacaaaagctggagaaaacaaaccaaaacaccccacccaccagcgccttgggcctgctggagtggagttgacccaaaggatgctggtggtggtctgtttcagccattttcttgcaactgtgaccaaaatgttaaggtggtgagctcggaatagaggaactagccaatcagcactgaacttggtga

SEQ ID NO: 48627 - DNA, 1208 bp, Glycine max
  Clone ID: PAT_MRT3847_14917C.1
tacgctgcgagaagacgacagaagggagggtaatagaatcaaagtatggcgggtggaggaatttgagtgaagcaaggtcagccaataatgaatctacatggtggagggacttgaagattgtagatcagcatcctcaacagggtcaattgctaaataattcgatagcgtggaaagttggacgtggggataaatttaaattttgggaggacacttggataggggaagataacagattactagagaaataccctaggctctatagtatatctgttcagcaaaattatttcattcaacaaatgggagaattcaaagattcagggtgggaatgggacttcaaatggcggagaccgttgttcgacaatgagatagatatggcagtatcatttctacaagaacttgaggggaacagaattcggtcccacagggctgaccagtgggtttgggtggcagattctagtggccaatatacggttaggagtgcctacaatgtgcttagagaggacttattacaggaggaccaggacggagagttcaaggagctatggaaggtgaaggttccatctaaagtaattgtgtttgcatggaggttactcaaagataggctaccaacaagagacaatttgaggagaaagcatgtggagctacaagattttatgtgccctttctgcagaacaatagaggagagtgcaggtcatttgttttttcactgcagcaaagtgtttcctatatggtgtgaaatgctgtcctgggtaaatctggtgggtgtctttccacatcacccaagacatcattttcttcagcacatatatggagcatttgaaggaatacagctggacagatggaaggggtggtggctagcattaacatggactatttggaagcacagaaatagtatagttttctccaattctgccttcaacgcaaataaagtggtggatgatgcagtatttctgttatggacttggctcaaaaattttgagaaggatttcccaaccccctataatcagtggtcatcaaatctatctgaaggattcttccgcagaagaggatttgaatctaggttcaataattgtattagtcttataatatgaaccttattctggtctgcaaccaaattgttatggtgctgaactagactagaatcttagcttgtaattctagtacctctggtcctttgctaatatatatatacttattttggctgatca

SEQ ID NO: 48628 - DNA, 246 bp, Glycine max
  Clone ID: PAT_MRT3847_14918C.1
aacttagaatacttgtaactgagtataataattccttcaaatttcaagagactacacaattgtgaacatgtctttgacaacatacattgcacacaagaaaaacttaggcactcagctactatgaattactcctccattgtttttttttagaagcaacagggccctcaatatcatcatcagccaaaactggagcaagccggatgtattcttcttccttcttagaataagggattgcgacttgatcag

SEQ ID NO: 48629 - DNA, 349 bp, Glycine max
  Clone ID: PAT_MRT3847_14919C.1
ggcacaagtgagtttgttgttcaaaatacctagaaccattttgataaaattaaaggccctggtttcctccgtgccaaaaattttggaacaatggaatgccaatccttagataagttcccctcccgaatgaacactggctaaggtgcccgtactcccgaggtgaaatgcccaaattggaggcgtgctgtggaagcacacaacatctttggctttgagaccattcccgaaaagtgcgttgaagcaacaaaggaatacatccatggggaacaatatagattagactccaaaacaatttaccaacaagcttaattttatgccagagacctcgaagtccatcccaaggacacat

SEQ ID NO: 48630 - DNA, 339 bp, Glycine max
  unsure (1)..(339): unsure at all n locations
  Clone ID: PAT_MRT3847_1491C.1
ttctgtatagcggtcgccctttttttttttttcaacatacattcatttttttttttttcagtttttattttagggaacgggcgatagaactccccgaccatttaaagggctcccaaccactaataaaatgatggtagggactattctgtaggggactatctggccaatctttttccaccccaggacatacttttttttacaaatgggtcttctgaaggcattgccgtgccactcacaggagggctaacatatataacttcgaatatacgggaaaggttattgaaaccgcatgggaaggaccattnccctgccatgatcaaatcacccaagacatttggg

SEQ ID NO: 48631 - DNA, 2013 bp, Glycine max
  Clone ID: PAT_MRT3847_14920C.1
tacggctgcgagaagacgacagaaggggaagtaaagttacattggaagtgagagcgaagaagaagaagaaaccacgacacaagtccaaagtttgattccaaaatgcgatcctcaagcattcgcagcttcaccatcttcaccctctttctcattgcgatcctcccccacggacacgcaacaactccaacctccaaacttcgcctcaaacctctctcttctcccttttcaaccgccctcgaaaccctccagaaacaactcgggtacaccttcaagagcatcgatcttcttcgtcgcgccatgacacacgcttccttctccgaagaaaacaacaaagctttcgccattctcggcgccagcgtcatcgaaacctccgtctctttccatctgctctccagagacgttgatctttcttccaaagagctgaaccgtcgattgtcccaaatcaccaacgtcgattcctcctgcgccgtcgacggaacgcgattagggttgcacaaggtggttcgcgtctcgcccaagacaaattcctccgcccccgccgtcgtttgcggcgccttccgagcaatctttggcgctgttgctattgacaccggcaagtccgatgacgcaggcaacgttttctggaaccttcatggcggtggtgacctaggagttgccgtggctctttgaactctgactctgtgagttcagttatcaattttcttctgtttgtgtttgttgctcaagatacttcttaattactcttgttagtaatggaccactaattgtgaagtagcgaatgacagtgtagtgtgtgatgctataactatattaactactgttttatctttttatcggcaaatagttgttagtattgttagtgaagggattcgaacctgcaatctctctccggcttgcttcccttcgtcattcacccccagaccaatcttatatattcatattaactaccggtttgttacttcacagttgtataattttgctgaccttgatgttggattgcctaaagaagttgaaaccaaggagaaaattgttgaagctattgttgagcctccaccacaggtggataccaatgcagttccgaatttgtctgcatttcaaggaatgttacctccgatgccacctggctggaagccgggaatgcctgtgcaattgcctattgatttgccactgcccccgcctgggtggaaaccaggggatcctgtgccgttgcctcccatggactcgcttcaaataccgagatttgcagagcaacaaatacaacctcacattcctcagcccaagcaaccagaagttattcaagtgcagccagttaatttggaccttggaggaagtgatactagtgattatagtagtgatgatgccagctctgatgatgaagattgacaagtttgtgaaactgatcaatctcaaattaataactctacaggggctatagagagagaaaaggactaagaaggatgatcagctggggttggaattgaagcaatcctagacatctagctacaataatgaatttgagaaaataatccattgcccatcgaaaaccacccaagatttcatttctttcttcatttacttttttgtctaaactcagcctgtagaagctaaatttttaacaagtttgattctgatatttttgtgtatatattgttctcacttattattcctgtattttgtagaggtagctattgagttcaatgttttgattagaaacctctgaattaaaggaaaaataggttcgtggtttttctattttatgctgttagttttgaaattatttgtaattacagcataatgatgtatatgtaattacgatcctcattttatggtgtgtttggtagaaaggagaaaaataatattagagagggattttgcactttgattgttatgtcactgtcaagtgtcatgttatatatacttctgtccattgtttactaagcattgagctttaatatgatgttttcagcatcgataggcttagttgattgaagtaatgacatagcatttcatcaa

SEQ ID NO: 48632 - DNA, 439 bp, Glycine max
  Clone ID: PAT_MRT3847_14921C.1
gatcgagacggcacgggtgcgagaagacgacagaaggggtcctgcaagacatgaaagaaaaagacaaggttcacacttcagatactgtgttgcacaaaattttaaagtacatcaacagaagaggggctaatgaaaaggcaagacaaagaggtccatgaagacatgcctgccaatttaatatggtgaaacggtgatcaccatatggtcagtgcttaaatagaagaaaataaaggattacaaatatacagatgtaacattatatccaatttgcctcatggccaaaggtggtgatcgttggtaaaatgttgaactagataaacgtgagggaaaataaaatatgaaaagagaatgcagcaaatataagaacgttgcattaaacaagtggatataataagtgtgtgcatggtaactcattagagacgtgatttttttagtcaac

SEQ ID NO: 48633 - DNA, 569 bp, Glycine max
  Clone ID: PAT_MRT3847_14922C.1
cccgcgtccgaaaaaaaaaaaaaaaaaaaaaaaaaaaaaaaaaaaaaaaaaaaaaaaaaaaaaaaaaaaaaaaaaaaaaaaaaaaaaaaaaaaaaaaaaaaaaaagccataaaagggccacaaattctagtccctacccgaacacacaatctttttttttgtgctccaatatttatattctttcatgggcccccttttttagggttccaactttttggccccgccccttcccggccttttcttttttttcccccccccccctttttcccacttgggcgcggtttttaaccgggcccttgggggggaccccccgggcggtcccccatttttgagtggtggggggctccccctttttcccaccggcgcaattgccgggggggtcccccccagtcccctttttcccttttgtgcccccctggggggggaggggggccccccccttttggttttttttagggggggcggggtggggcccctcccccctggttccccgattctttccccggccttaagggcccggttttttggtttttttccctctctttccccccaaattggggggttttccc

SEQ ID NO: 48634 - DNA, 220 bp, Glycine max
  Clone ID: PAT_MRT3847_14923C.1
gcatgccttgcacatattagatgagaaggtacttgatttgttttttcatacactggctttactttctgattgaaaaataaaaaattccagttgagttaggctcaacctatgtatatataatcttgttatagataaagaatcaattaacaaggtgaagcaagagttcaaatcgaacctgaacaactattttaattgaaatagttgaaatattaatttttta

SEQ ID NO: 48635 - DNA, 683 bp, Glycine max
  Clone ID: PAT_MRT3847_14924C.1
ttcttgcgtccgcttaaatccaccacttcctgcgtcactttctctcttccccctggcctctctgccatttttgatccttcataaacacaccattcttcatttccttcatcaatgggcgccgacatgtccaacaataataatcctcctcccacttctcacgccaaagacttgtttgcttctccagctctctctctcagcctcgctggcatttttcgccatgctggggtggccgcggctgatgaggctgccacttctgtggaggagggcgccggagggagtggaggagctgctgataggttagaggagattagcagcgagaactccggccccacgagatccagatcagaggatgacttgtcaggaggagaagctgatcctgaagatgatgacgatgcccatggagacagcgaggacaagaagacgaagaagaagaagaagaagtatcacaggcacactgctgaacagatcagagaaatggaagcgcttttcaagagtcaccgcatcctgatgaaaagcagaggcaacaactcagcaaccaacttggccttgctccaaggctagttaagttttggttccaaaatcgtcgaacccaaatcaaggcaatacaagagcgccatgaatattcattggtgaagacagaattagacagacttagggaggaaaataaggccatgagagagacc

SEQ ID NO: 48636 - DNA, 1848 bp, Glycine max
  Clone ID: PAT_MRT3847_14925C.1
ggctcgagattacgacgagcaacttggcgtgcaggaaccggagtcgtgaactcgttctgcgatcgtcatcaccgaccatcatcgctttttcttctttactttctcatcagagtctctcactgtgccaaaacacgatttttgtattgtacctttcttttgagttctgcgcttttcgatcttaagaagacataaaaaggagcaacaacatgttggagaagatcgggttgccgtcaaagccttcgctgcgagggaacaattgggtggtcgacgcctcacactgccagggatgttcctctcagttcaccttcatcaatcgcaagcatcactgtaggaggtgtgggggaatcttttgcggcagttgtactcgacaaagaatggttttacgcggacaaggtgattcacctgtgcgtatttgtgaaccttgtaagaagctagaagaggcagcacggtttgaattgcgacatggacgcagacctgggagaggaagcttgaaatcagcacctagagatgaagatgaagttttgaaccagattcttggtcaaaccagtgacaaagttcctagtggacagagatctgttggcgttgcatcttcttcgagtaattccaattttgatgaagacatacaaaaaattgtctcaaatgacaagcctaatgttttgggaattgatttgggatccaccactcctgatgagttacgtaagcaagctttggaggagaaaaagaagcataaaattctgaaaggagaggggaaatctgacgaggcattgagagcttttaagagagggaaggagcttgagaggcaggctgatgctttggaaattcagttaagaaagtctcataagaagagtttgccttctggaaacttgtctgacgtgcttaacaaaggcattcctgcagagtctgacagaaaaacaaagtcactttctcatgttggtagagaaaagaatgatcttacttccgaacttagagatctgggatggtctgatatggatctacataaggaagacaaaaagtcatcaaacttgagtttggagggtgaactctcatcaataattggagaagtctttacaaaatctggtgaacaaaagggcagcaagattgataagtcccaagttgttgctctgaaaaaaaatgctctaatgctgaagcgtgagggtaagcttgcagaagccaaagaggaattaaaaagagctaaaattttagaaaagcaactggaagaacaggaactccttgctgaagctgaagattctgaggatgagctatcagcattaattcgtggcatggatgatggtaaagaattaccaaatctgcatgatcgtgggcatgattttgattttgaacgccttttggccatttctgatgaccttgatggtaattttgaagtgaccgaagaggatatgatggatcctgaaatagctggtgctttggaatcattaggttggactgaacctgaaaatacatcttccaagtctcaaacatttgacaaagaacatttgcttagtgaaattcgatttcttaaaagagaggctcttaatcaaaagcgagcaggtaatactgaagaagcaatggcattcctgaaaaaggcaaagttattagaaaggagtcttaacagctctgaacctgaagactataattccgtgtcacaaaaatccactgctataaggaaaagtgtgagttctgaagttgctggtaagggatcagattccattcatgagagaaatactagtgccactaataatgtttcttccacagtggctccaaaaagcagattgatgattcagagagaacttttgagtttgaaaaagaaggctctcacattgagaagggaagggaaaatgaatgaagcag

SEQ ID NO: 48637 - DNA, 240 bp, Glycine max
  Clone ID: PAT_MRT3847_14926C.1
ctataaccaacttcagggtttatgttatcaaaagattttgatacatgtggtatggctaaatatactctctgtggttctctgattacaaatacaacgactagaatactgtttcttttgtgacattgaacaaagttgttggatttcttcaacgtattgattttactctcaagtatgcatttcgaaagaaaccttgtgatatgatcagttccactatttattgttaatgggctgaagctttta

SEQ ID NO: 48638 - DNA, 378 bp, Glycine max
  Clone ID: PAT_MRT3847_14927C.1
tttacctagccaagccttttttttctttcgggttgccacaaaaataaaagccttcataccctggggataaattccccatcactcttatgcatccaaccagagcaacgttatctactagctccattaaagccacgctcattatttttagccactcattccaacacaactttttttacagaatcagacactgacaaacctttactttttttaatgaaggggaccaccttaccccataaaaagtggcttgggaagacatcaacattcatgagttgtggctcttcatccatgcttagggatttaggattgaaatctcatccccttttcttatttggctttgccaaggggggtgatatttgaatgaatccaaatttcttcctt

SEQ ID NO: 48639 - DNA, 331 bp, Glycine max
  Clone ID: PAT_MRT3847_14928C.1
aatagaaaagggttattcctttatatgaccagagcgaaaaaaggtctccacatttattataactacccttccaatggaggttttttttttaccataacttaaattctatttaaggtttaacaaggttccttcttaattgtgaggggtaggataaatcccaaccttattttgttggttgggggcaaaggcaccaccccaaccttggtgggcaacaggcccaccaccattgtccccacgcgagggatcataggaacaacggccaccaagatatgcaccacggcaggctctataggggccaaggaaacaaacaacaggggaaacacaatggtgg

SEQ ID NO: 48640 - DNA, 2066 bp, Glycine max
  unsure (1)..(2066): unsure at all n locations
  Clone ID: PAT_MRT3847_14929C.1
aagctgaagcgtttttttttttttttgttggtttcttttgttggatctagagaacccactcgtgcttgtgagtcccaggagatcgaggttaaactcagtttttatatatacagctgggaaatgaaaattcactgaagccactttttagcatgttgccacttctcagatttctgaatcacatgtaaagtgagcagcacactttacaaaacagacatattgaagatgcatatcaaggaagcagaaagggtggtcattgccaaaccagttgcatcaaggccaacttgttctactttcaaatctttctcagagctcctagcaggtgcaatcaatgcttctcccgctattccatcttctcaaacaacagtttctgccattagaccaaagacagtgaggttcaagccagcaatgaatcaacccccttctgggtttgttttttctcaggctgatacttttggagctgcacttgataattcctctgagatgagtcctaaacttgacaccaaacagtccctcatatacaagccaacggcaaaactcgtatcaaagacaactgtgtctcttttggcaaatatgggaaattgcagtactagtcggcaacaaacacagcaaccaatggaggccaattttcaacattccatccatgaaaaatttagaacccaaccgagctcaaatcttgatcagagtattaccccgcaaacagaaataaattatcagagcagtgaacctagtaagatggtgcagcagaacatagaggaggaccaaaaagttttaacatcctcagtcaattgtgatcgaccttcttatgatggatacaattggaggaaatatggtcagaagcaagtgaaagggagcgagtacccgcgaagttattacaagtgcacacatcctaattgtccagtgaaaaagaaggttgaaagatcatttgatgggaatattgcagaaattgtttataaaggtgaacacaaccattcgaagccacagcttcataagcgaaactcagcagcagggacacaaggatcaggggttatgtctgatggaatggttcaagatatgtggagtaatagtcacagtgagaggaacgaaggcaatgaagttagaattgagaacacaggattgtctatgcattcagattattatgtcaaagttccacagcctaatgattcttcattaaatattggtgcaactaatgctggtggaggaagcatggaaaactcttgtggtctaagtggggaatatgaggaaggaagcaagggatttgaggcacaggaagatgaacacagaagtaaaagaaggaaaaatgagaatcaatccaatgaagcagcattatcagaggaaggtttagtagagccgcggattgtgatgcaaagttttacggattctgaagttcttggagatggctttcgctggaggaaatatgggcagaaggtggtgaaaggcaatccataccccagaagttactttagatgtactaatatcatgtgtaacgttcgcaaacacgtggagagagcaatagatgacccgagatcatttgtgactacatatgagggaaagcacaatcatgagatgccactcaagaacacaggaactgtagcatctgaaagagattcacaggcttctcttagtaaagataaaccatgattgacacttcaattagttaacaagtatgattcaatagcattggcagacatctgaaataattcagaggatgcattccttttatatcctatagtatgctcagaataattgaagttgatcagaaagatcaagacattgacaatttcaaatgcagtacctacttagactaggatatttgttgataataaccgtattggtgctgataaattgtattatatatggaatcaagggcactggcttagaggactgcccttcaataactttccatctctgctagctgcctttgtataccaaaccggtatattctattctctatcatcatatataaattaatctggagtactatatatcatatgctaaaaaaaaaaaaaaaaaaaaaaaaaaaacgccacaagcccccccattagccccggctaccgggaatnnnnatg

SEQ ID NO: 48641 - DNA, 828 bp, Glycine max
  Clone ID: PAT_MRT3847_1492C.1
accgcttgcaggagacgacagaagggagtgagaagaaagaaaagctgcattgggtaggttaggcgttgcagaaccgaaacacgtcacctctgccagccattttttctttttttcttttttcggattatagagaacgtgagcgcgaagatcggatactcgcaccgatttccttcattatcacagtttcaaccgaacgaacgactcctctccaaccatttctcgcagaattccagttccagtttcaggttcactttgttgatggctaaagttggtaagttgcggagcaaggctcaaggtcagagggcaaccccgcatcttttgtcgtgtgcaagaaaaaatctgaaagatgttaatgtaaggaacaactcttctaaagcatcggagaagaaagattgggaagatgcaacctgctcagtctgtatggaggtcccccacaatgctatccttctcctttgttcatcttattacaagggttgtcgcccatacatgtgtgctactagtcatcgctattcaaactgttttgaacaatacaaaaaggcatatactaaagcaacatctgttcaaagtttgcagccagaagcaaacaattccaatattgatttaagcacaggtgaacctaaagacaatactgaaattcctgagcttctttgccccctttgtcgccggcaggtgaaaggttggacagtggttgaagcagcacggaagtctctgaatgccaagaaaagaagttgcatgcaagatgattgctcttttgtggggaattacaaggagcttaggaaacatgttaggtctaagcatccatttgcacgcccgcgagaagtggaccct

SEQ ID NO: 48642 - DNA, 610 bp, Glycine max
  Clone ID: PAT_MRT3847_14930C.1
tttttattggtcatgcctaattatatattagtttatcctatttcatttttttgatagtatagtctgcattagaaattttatatattaggaattgtgcttaataatcaactttatatatagttttgatgttaaatgtatgctgttcaaacactaatcacactaatcatacaacttaatcaattactagttcaatccaaaggcagaatgatctatttaaatagtgtacaaatgtgcattctttcaacattcatacaatcaatcaagcatcttaatttgtatatggtatgtttggttgtgcatctgttctgcttttaaattttaattgtagcacattataaattttataaattatttgctctataatttaacataaatgtctatgaaattttctctgttatatgtcccttatttgaagattaatatgatttcttttaattctatggtatttgcctcaatggtgatcaggattttgtcaagaacttttttcatcagaatattggtggagaggatgtcaaggttcttgtttttcttcatatcttctggacatctttaagtatgcgaggacttgtttgaggaaatgcatcttgttctgtttttcacagactttcat

SEQ ID NO: 48643 - DNA, 846 bp, Glycine max
  Clone ID: PAT_MRT3847_14931C.1
aggattagtagagccccggattgtgatgcaaagttttatggattctgaaatacttggagatggctttcgctggaggaaatatgggcagaaggtggtgaagggcaatccatatcccagaagttactatagatgtactaatatcaaatgtaacgttcgcaaacatgtggagagagccatagatgacccaagatcgtttgtgactacatatgagggaaagcacaatcatgagatgccactcaagaacacaggaactgtagcatctgaaagagattcacaggcttctcttagtaaagataaagcatgattgacacttcaattagttagcaagtatgattcaatttcaatggcattggctgtcatcagaaataattcagaggatccattccttttatatcctaaagtatgctcagaataattgaagttgatcagaaagatcaagacattgacaatttcgaatgcagtacctagctactgagactaggatatttacttctacaacaacttgttgataataacagtattggtgctgataatttgtattatatatggaatcaagggcactggctcagtggcactgcccttcaataactttccatctctgctagctgcctttgtataccaaaccggtatattctattgtctatcatcatatataaattaatctggagtacataatatcatatgctaataatttttgttgtaaatcactggcatcgccagaaagaaccccaaaagacctttataaactattagctatggacataattttgtttcttaatgtaatttaatctgatttagtttgtactttcttgttcaatacgttatgatcagcgagcaacgagccat

SEQ ID NO: 48644 - DNA, 516 bp, Glycine max
  Clone ID: PAT_MRT3847_14932C.1
tctcctaggcaaaaagaaagaaaaaaagagaatctacttcaatgataatactatgataaccagttcttgaacccaaagaagaccttgtaataattaatgctcactcttctgcttatttcggatgagggactcaaatggtcgggtgttgttttcttatgctgctaacataggatctggttcagttgttatagctgaactttgggcaattttgcttcgaaataaaatttcttggagattggagccgagggtacaagcatttttgtgttgaatctgattctcttgtgtctacatccttactaaacaatgaatgtcgttcctaccatccttgttttattatgatccaagatattaatattaaggagtatgccttgcagggaggttctttgaagtggaatcatacattgcgattttgtttttttttattactgttagtgctgatgtaatttctacttagttttcagttctggggattttcccctgcctttcaaaaaaaaaaaacctctttttttcctctcc

SEQ ID NO: 48645 - DNA, 252 bp, Glycine max
  Clone ID: PAT_MRT3847_14933C.1
gatgaaaaaaaaaatcaacaattaacattttgattttgatacatctatgatttgttttgcaaaattaacataaatcattaattttttcattgatgattgagactagttactttataaaacgagtttttcactttgaaggagttagatccattacaatgttacataaacatacaataaattgttgttatgacatagtgtttttcatgaaatcaggtatgggaagtgagattatggaagcttgatccttcaaac

SEQ ID NO: 48646 - DNA, 343 bp, Glycine max
  Clone ID: PAT_MRT3847_14934C.1
attccaaactataactagccaaacttttcttttaaatgttctttcctaaatactacaatggatcattcgtcatatacaaccgatgtccacgccctaatgcaacatccctgcaatgccttgtcaagccgggaacgtagctacttattgattgctgcactagccttagccgcccatcttgggaccgtacaacaggaaacggcgacccatgcgtttacacaaaatattgctggatacacaaacccttagtgctctataaactgtctcaccaataaaaaaattgataatttcttcctagcatgggggacatgcaacagaaaaatcgtccaagtactaccagcccatt

SEQ ID NO: 48647 - DNA, 973 bp, Glycine max
  Clone ID: PAT_MRT3847_14935C.1
ccacgcgtccgatctcaccaactttttctctattcaacaacaacaacctattatgcttgagcttatctcattttacactacaacagttccatcaactttgtcatatctcaatcccttcttctcgtccttctgatttccatctattttcttgttcaacatggctacccttttgaaaattttatctcttttggtgctccttttgatcccagtttcatgccaagttgaccaggttctctattctggattcaaggatgtaggtgccagtaacctaaccatgaatggggtgactacaatagagcgcaatggaatactcaaactgacaaatgaatccagcaggtcaataggtcatgctttttacccatcaccttttcaactaaagaactccacaagtggtaaagctctctccttttcttcctcttttgcttttgctattgtccctgaataccccaagctaggtggccatggcttggccttcacaatagcaacttctaaggatctcaaggctctaccaaatcagtaccttggcctccttaactcaagtgataatggtaacttctctaatcacatctttgctgttgagtttgacactgtgcaagactttgagtttggggacattaatgacaaccatgttggaatagacatcaatagcatgcagtccaatacttctgccaatgttagtttggtcggtctcactctcaaaagtgggaaaccaattctagcttgggttgattatgattctagattgaatcttataagtgttgcactttctccaaattcatccaagcccaaaactcctctcttaacctttaatgtggatctctcacccgtttttcatgatacgatgtatgttgggttctctgcatcaactggtttgcttgctagcttccattacatctagggttggagctttaaaatcaatggtccggcaccaccccttgatctctcttctctccacagcttccaaagccaaaga

SEQ ID NO: 48648 - DNA, 333 bp, Glycine max
  Clone ID: PAT_MRT3847_14936C.1
ggaatgaggttggtgtgaagtgaaattgtgaagccacatgtctgcacaagggcttttctataggatggttcttgttcatcgattctcaaactctggaactcaaatggggatgtaaatttcagagacaagaataagacaccattttggaaaagttctaagagaagggtagagacagagtgaactccaactctcaatatttctcagacattggagatgttggatgtgatgtctttgagttaccccttccaaacattgttattagtatgtgtaactactcctagtcgtagatacttgaacaagacaaggcggtgcctatttcaagccacaccccca

SEQ ID NO: 48649 - DNA, 319 bp, Glycine max
  unsure (1)..(319): unsure at all n locations
  Clone ID: PAT_MRT3847_14937C.1
cnncgcatgcacgcgtacgtaagctcggaattcggctcgaggtaaatagaccagtcttgggctttagaccagggaaaaagagaactctgagcatctaccaagcctcaccctaaaaggtctgagggcaagtctccagtgagggagaggggaggaaatgcttcatgtttgaactgcagtgaattactatggctcctgtttcaccaccggaacccatggcaactcacacattcctcttgtctataactgccaaaggttgggtttatgtcacttcagttccactcaagcattgaaaaggttctcatggagtctggggtgtgcc

SEQ ID NO: 48650 - DNA, 310 bp, Glycine max
  Clone ID: PAT_MRT3847_14938C.1
attttagattattgatacaggagtctagtatttattattgataattggttggatcgagatgatcgctttggtaaatcattacaacgattggagcttaaagcttctgtacgatagaataaaagcccataacgtatcagctcatgcatagctatatgaaacttgacttaagctattccattctatatatacttttgaaccatgattgtttatattcatataatttcaatctattcgatggtctgaatgttatacctgatgtggtgattgcctattaagaaaaggaacatatattattgttctaataattttt

SEQ ID NO: 48651 - DNA, 254 bp, Glycine max
  Clone ID: PAT_MRT3847_14939C.1
gctaaataattacattggtaaaaaaaaagccaaaaatttacaccctttccataaaaaggggggaattataccccctcccctttgtaatgactggggccctcaaagggaatattccttttgagcttaccatgaaggggaatcatcattcataaatctgtttcaggggcaggggcaggaaaaaaccatgcagggggcctgcccatggtaaaaaaaagctaaggggatggggaataaggcataatagcttgctcctt

SEQ ID NO: 48652 - DNA, 202 bp, Glycine max
  Clone ID: PAT_MRT3847_1493C.1
cccactcgtccggcaaacatgtccacctcaacaactcttttttttgcttatcccttccctacctccgggcactgtatccctctcttatacttcaccaaaaccctaatctctacctttatccatattacctttcttttcacaccctacaacgaatccttacttccaaaaaactattccccttttctccaaactcttcttcttc

SEQ ID NO: 48653 - DNA, 167 bp, Glycine max
  Clone ID: PAT_MRT3847_14940C.1
ataggggagacaaacatatactggctgccctagagggttaaaagaaactattattttacgtctctaaatgcccaccactctacttttagattctctaatggtataacaaaattttctgaagtacgaaatagcacacggggctcttccatatgtaatcatgcttaagg

SEQ ID NO: 48654 - DNA, 135 bp, Glycine max
  Clone ID: PAT_MRT3847_14941C.1
tctggttttgaccacaaatttacttcaaaataattgagggacggggtcactgtagaggaatcaagcttacttacgcgtgcatactacgtcatatattttcgatagagatacctaaattcaattgactggccgttg

SEQ ID NO: 48655 - DNA, 335 bp, Glycine max
  Clone ID: PAT_MRT3847_14942C.1
gttctctttctccaacttgtggcatgaacatccacaaatgcaaactgaaccatgagttgaactgttgcggcatttaccaggactcagcccatgcatcttattacattgaaacaaggagcaccgccttatacaacaaacatatactagcgtcagcagcggtcaaagaacccagcgggaggaagagtcttctaagagacaaggcaccccgtctaccaaggagagcgtcgcatgaacatgagcaggcgtgacatcgagatgcaattccccaacatcaactgaaggttgtgtctcgaaacacacccaactcactagaatggtcgcacgtgcgcacgact

SEQ ID NO: 48656 - DNA, 149 bp, Glycine max
  Clone ID: PAT_MRT3847_14943C.1
actggaatcaagaagagtgccaagtcaaattacacaacaaatgcatgaaaatctgaggagccatcaaagagatgaaatattgtattcttcagtattctccaatggctatactggtgatgagagttcattcaacaaatcagatcatgaat

SEQ ID NO: 48657 - DNA, 809 bp, Glycine max
  Clone ID: PAT_MRT3847_14944C.1
tctacgcgtccgcttatctgaggaggaatctgagtccgagtcattggatgatgatgatgatgactatgagacgcttgtcaattctagaaggagggacatggagttctttgatgccttaattaaggtgaagaagcaagatcctattcttaagcaaaaagatgttaggctctttgggtctgatgatagcagtgacgacgaaagtgatgagaaggagaaagttaaatcaaaagacaagaagggtgaaaagccaatgtatttgaaggatgtggtggcaaagcatttgattgaggagggggcagattttggtgatgaagaggaggagatagatgaaaaggaaaaacgtaagggtaagaaggtaatgcctttgaaagataaagactttgttattaaggatgggaagaagacttatggtgatgagcaagaggagttgaaaaaggcttttctgcaagcagtagaaagggagggtttggaagatggtgaagaggagtttttcagtgtgaaggagaaggtaggtgaggaagacaaagtagatagtgatgacaaggaacttgaggagaagctggatgagtattttggtggagatgtagaatcaaatgaaaattccaagtttctaagaagctatttcatgaacaaattgtggattgacaagagtgggaagaatttgaatgttggagaggatgaattgcaagagatttcagagggtgagatagagctccagagacaaggaggattagggttccggattccaggaaattccaggggatagggtgttgggtcaggcccggaaggtgaagggatcattgaggaag

SEQ ID NO: 48658 - DNA, 566 bp, Glycine max
  Clone ID: PAT_MRT3847_14945C.1
tcgggataaggatgacgggacgatgtctctcattccctctattcgccctttccatctcgaattaatgaacgacctgaagctgttgagcttttgcctgatcgttatggagcctacagctcacttatccttattgttctactcatctctggtggctgctgtatatgatgatgacgatgatgataactatcgtatgttgatccatgtgatacatcctgcaggagaaaaacatattctcttgcagcccctcgctactcgaaagtacccttgtcctcaacacaagtctgtatcgctgtttttttagtcctctggtagatacatgtctttttcgatacaactgtctcatttcaaaaaggaatgacactttttgtctgtagatgtaaaccgaactgaggacgcaaatgaatagaatgatactagggactcgtcaaagactatgtttatgataggggatacctctgtatctgtggatatctgaaaaaacttgggtgacgagggcaccgtactaccgaaaaatatgggatacctggttatgtgcgaatcctgtatcaatattatctacaccgact

SEQ ID NO: 48659 - DNA, 499 bp, Glycine max
  unsure (1)..(499): unsure at all n locations
  Clone ID: PAT_MRT3847_14946C.1
cccactcgttcgcggacgcgtgggcaaacaggccatcatcctgattgtcttagctcaaaagattgcaacccgatagtggaagggttggttgaactaagagagagtgaaagaccttggctaggcctttcgttggtttcacaaggaaacacacaccttagagaagaatcgtcaaatctgttgttgttgttgtcttttgagctaagacaaacaggccatcatcctgattttgtttcgtcgagttccagagaagggttctttggaaaaccagtttctcttcaacagcaacagatgttgtcacaagatgggtatgtgagttctaattctaaagttgcaagtgtttatcaacaaggacatttcctggtgaagaactccaagttcttggttcctgcacaggaccttctcaacgagttttgtagcctttgtgcaaagcaaagcgacttgtgaaagccaacaaaatcgttgaagaagcagtgggaagatcnaggaaataacggtgtcg

SEQ ID NO: 48660 - DNA, 457 bp, Glycine max
  unsure (1)..(457): unsure at all n locations
  Clone ID: PAT_MRT3847_14947C.1
ttctcgagcactcctntaattaaacctatcctcaagccacttttttttatacaaactcttaataanntttagagctntttttatagagagcggtggcgcaantatattcanatatttttttacattcaatcctaaccctattatttattacaaatacaccaacacttgttgcccttttagaaaacattttgataaatcatctcattatccaaaatcttttattaccacatattattggaatcacaatcatcatgttccaactacaaagaatattttccattacatttcaataccatcattttcaaattgacatacaataaatattcccgaataaatttataccatcatcctttaccttttaattgaattaacccaattttttaaaacacaccaaacagtcaaggttaaataattcttttttaaatttttggatattcaaacttaccccaacaatttc

SEQ ID NO: 48661 - DNA, 260 bp, Glycine max
  Clone ID: PAT_MRT3847_14948C.1
aaaaaagcacaatcaatgtattaatttatatagtaatgcaaactggaagacttgttttcctctaacaatatctcacttcaacttgttgtcattattaaatgagtgcatagtgttggtgttctggagttggtcatggaatttattcaattcacatcccatttgctactatatatgctctcagtgccatattaaatgatgaaattcttattagtctagtttgattttactcgtaaaaacaattcatgcagacagagaaaata

SEQ ID NO: 48662 - DNA, 666 bp, Glycine max
  Clone ID: PAT_MRT3847_14949C.1
taccgttctgctgcgagaagagacagaaggggacatttcgtttgacaagcgaatcttatctcgaagatgtctaaaactggtgccaccgtgaaagatgctcccacccgcgaatttatcgtcgcattagccgctcacttcaaaaaatctggaaagatcgagcttccagcatggcatgatcttgtaaagacaggtgttgcaaaggaactctgcccacaagatcctgattggtactatgttcgtgctgcctccattgcccgtaaaatctacctccgtggtggtacaggggttggcggtctcatcaaggtctatggttcatgctatcgtcgtggtgtaaaaccctcccaccatcaagatgctgcccgtggtctcattcgtcatatgcttcaacaactcgaagaaattgatcttgttgcaaagaagaaagaccgaaagggacgtttcatcactcgcaacggtcaacgtgaacttgacaccattgccgctcagattgttgctggatccaaagctcattaaatcagtttcattgtgccctatggggatatgagaggaattagaagaagatgaatcagacatcttagccccacacctcatcatattctcacgcattaggcgtcgaacatctattccgtcaacatcgatcttgcttgtcccaaagaaattttggcc

SEQ ID NO: 48663 - DNA, 304 bp, Glycine max
  Clone ID: PAT_MRT3847_1494C.1
tactgctgcgagaagacgacagaaggtggctgtctctctctcataaaaacatttagggcgggcgagaaaagagcgagattgattacaactaccttcttcaatactaacagttataggagactcaacctaagatcctatctctcacttttccttattccccaaatgctttccctatttggagttatctcccttttcattcattatacaaagaattcttcacacattttcatatttagatttaatccaacaggattttttactcttattttacaatccacttaacatattctactaccatatcttt

SEQ ID NO: 48664 - DNA, 1869 bp, Glycine max
  Clone ID: PAT_MRT3847_14950C.1
gctcggtttgattttatattcttcacctaccgctgtggtagtttgaacgtccgtacggctgcgagaagattgaaaaagaaaatctagagtttgtgaggaaggaagatgagtttgagggcatcagagatagcgaagaagttgaatctgcaacctcacccagaaggtgggttttacgtggagacattccgagaccattccgtccagctttcgacctctcagctcccccccgaatacaaagtggatcgccctgtatcgacctccatctattttctcgttccttctgggagtgtgtctcgcctccatcgcataccctgcgccgaaacctggcatcattacatcggcgaccctctcaccgtagtggaattgaatgagaaagatgggagcgtaaaattcacttgccttggatcagatctgactcagaatcaggtgccgcagtacacggtgcctcccaacgtctggtttggctcttttcctaccaaggactttacctactctgcggacggggtattcggaagtgctgaagctgaagctgaagctgaagctagagatagtgagaggaactacactcttgtaggatgcacttgtgcccctgcgtttcagtaccaggacttcgagctcgctaagccttcttatctcctcgctcgttttccccaattccaccctctcgtcactgctctcacattccccgagtgactcacactatctatctgttctgcttttcggctttctaataatcatatagacgccttccttctatttctaattaatgcctctttcaacgcgagaaataaacattactatgttgttgttgttgttgttgttgttgttcttttcgacggaaaacttatcttattactagttttgattttaggtattggtccctgcctctttagagcgttgaaatgttttacttgtcaactagtattctgtttcctgtcttagcagtagtacttattcttccattcactttcctaatgagataattattgggtaggaatttgttttaacccaaatggaggattggagattgtagatcatttactgcatccagagtcattaattattgaatcagttagaaagctgatatgtggacaatttgcatcaaatatttaacttaattcctctgctatttataattctgccaagcgtgattttactggtgaaaaattaaggcaagtatctggaagaaaagtgaagctgagctagagccccaacattttgaactcttaggcagttcatttggcactgagactcccgggcaaatgaaggcagctcgtagctctatgcttctggttcttcaacttcttattgtcccaagcatatggttattttattttataggacatgtggggttttttatttgtaggatacctacctaccaataataatctgtatggggttggtggcatgtcatgcaaattctgtgtgtcttgcaaatacttgtatcatagaattagtaatcttagtgaatactaatctagatgcttgtttctaaagttgtacaaatactactcgcttgttcaagacagctatatatacaggaaaacagccatgaaataatcaaacgcaaaagtgcaaaacattattatttagaaaatttcgagtcaacggagttgtacatcatcagataatgaaatgccagaaggaacatccaatgaaccccaaagaggggagaaaaaagtttctttgagcacaaacaccaagctccaagtttctaagattttgggattttcttgacacatgttcaacttactaaacacagaaacaacaacacaacttaaccgtattcttatcacggaaaagaaaggggaaacgacgatcgagcctcaccgcaccacatgtgcatttcctttcattttctcagtcctg

SEQ ID NO: 48665 - DNA, 876 bp, Glycine max
  Clone ID: PAT_MRT3847_14951C.1
ccacgcgtccgatttgattcttcacctaccgctgttgtagtttgaaaattatataatgaaatgacccacgcgtccgcccacgcgtccgcccacgcgtccgggaagatgagtttgagggcatcagagatagcgaagaagttgaatctgcaacctcacccagaaggtgggttttacgtggagacattccgagaccattccgtccagctttcgacctctcagctcccccccgaatacaaagtggatcgccctgtatcgacctccatctattttctcgttccttctgggagtgtgtctcgcctccatcgcataccctgcgccgaaacctggcatcattacatcggcgaccctctcaccgtatgtatatcttcatctctctctttcttttttaacctaatctgatatgaattgtattgcaggtagtggaattgaatgagaaagatgggagcgtaaaattcacttgccttggatcagatctgactcagaatcaggtgccgcagtacacggtgcctcccaacgtctggtttggctcttttcctaccaaggactttacctactctgcggacggggtattcggaagtgctgaagctgaagctgaagctgaagctagagatagtgagaggaactacactcttgtaggatgcacttgtgcccctgcgtttcagtaccaggacttcgagctcgctaagccttcttatctcctcgctcgttttccccaattccaccctctcgtcactgctctcacattccccgagtgactcacactatctatctgttctgcttttcggctttctaataatcatatagacgccttccttctatttctaattaatgcctctttcaacgcgagaaataaacattactatgttgttgttgttg

SEQ ID NO: 48666 - DNA, 303 bp, Glycine max
  Clone ID: PAT_MRT3847_14952C.1
ggctcgagtctagatcgcgagcggccgccctttttttttttaatttttttttttctatttatttatggtttttttcactttttaattcccatgacttcccattaccaccttaatcaatacagccaatataatccttattcgtgaccctcgtaaatcccatacttatcggccccagtatctgtttaagattcacaaggatgaacattaaaaaaattccctattattggggggaactaaaaagcatttttgcctttcactggattaaaaagggggacttccccaaaaaatatacccttaaggaaa

SEQ ID NO: 48667 - DNA, 479 bp, Glycine max
  Clone ID: PAT_MRT3847_14953C.1
acttgaaagattgctagttcatgaaattctctacctactgactttcttaaaaaaattcactgtcaagagcgcgccataggagaacattgctaaatcatgaaatacatcttacgagagatcaaaaggtcaaggtagcaatataattgggctgcttcaaaacttttgtcttaaaacaactaacattactcaaaacccgtactttacatttcaaacctgtccctgtggccaatccaacaacactctaagatgcaaccaacattttcacacacaattcacttgattttgttattacgccttaactgggtactatgaccgcacttttttttgcggcacgtcacaggcgtacaatgcatacggccctagccctcgcggaaacacatcttgacctggttggatgtgcgagccaaagccattacggaaggctcaatgatgccaccacgacacctgatgaccagatgaaaggatgcttccttctggaa

SEQ ID NO: 48668 - DNA, 274 bp, Glycine max
  Clone ID: PAT_MRT3847_14954C.1
ttggggtttttttttttttttttttttttggcactaaaacaacttgcaagattatcatatctagcggccaagatgaccagcaaaactgagatgaagtccatttggggatacgacttagaccaaagctgcaaaacactaactagcatactacttagtacttaacaggagcaaggattgcaattggggaaccaagcttggtctttgaaaccttcttatctatctacataaatttggaaggctgatccttccttgtggaacacaatagggctctatc

SEQ ID NO: 48669 - DNA, 755 bp, Glycine max
  unsure (1)..(755): unsure at all n locations
  Clone ID: PAT_MRT3847_14955C.1
acttccctaaactccaacctcatccaaccgaagtaatcgagccatatcagcaattcctggctcttcaacatggcttccgccgatccttatgactctgccctcgacctactccgtcgtctcaacccgaaacacaccaccgaacacctcaatgccatcatctcgctcgttccagacctgaccgaagatctcctctcgtccgtcgaccagccactgacagtcaagcgttgccgacaaactggtcgcgagtacctgctgtgcgactacaaccgtgacggcgacagctaccgatcgccatggtccaacgagtttgatcctcccctcgacgagggcggcgtgggtggcgtaggcgccgatggaagcgaaggagccggagagggtgccatcccgagcgaacgcgttcgaaggatggagatcaaggccaacgaggctttcgacgtgtaccgagagctgtactacgagggaggtgtcagcagcgtctacttctggaacctcgacgatggtttcgccggggttgtcctgctcaagaagtctgccacgccaggaggcggcacggagggtgtgtgggattcgatccatgtattcgaggcaatcgagaggggccgcacgacccattacaaactcacatccactgtcatcctggcgctgtcaacggcggcgagcagcctgggcgacatggacctgagcggcaacatgacacgtcagggtggagcaggatctccccgtcgacaacgacgacagncacactgcaaacgttg

SEQ ID NO: 48670 - DNA, 825 bp, Glycine max
  Clone ID: PAT_MRT3847_14956C.1
cttgcatgcctgcagatattggctctattatataagtggtgaatagatcaaagccctttttcatgcacgagcatccatcgcagactggcctcttaaacaaagaaggaagaaagtcttgtacgcatttgagaattgtctttttccttttgctaactcatttgtaagtgctagtttcaggttccacctaacccataatcaaatagaattcaatcgcttgccctgggctgagggctctatccaatagatttaaagtggggatcaagccccgctctattggttactaggccggtccacttttcggttttttctaatcacaatggtgtaaagagggctcttcctcccgacgaagataggtcttcccgaaggcggctgggcttaatctttttgttctgttttcttctcttagtctggtgaattcatttattattggtactcgttgaagaatctagtgcttgcatccgctcaaaagctctatcaacggaattaattaaataaagaaaaaagggcatccaacttttgactttaccgctacatcagcaggagaagaaaactctgcaaaggagattcctatcctttctctagttgaagactaatctggatattcccgaagatgcttgacttcgagttcttggagtgacagctttgtaaacaagggtcccttactctataacttttcaacttcattgatctgaaagaagtgacagaataaagctacgggcatatacccccgccccggggaaacaagtgccacctcaacagctatattctaaatcgttaagcctcgcacccctttcctttgtatcggacctttcccgctttccttcc

SEQ ID NO: 48671 - DNA, 579 bp, Glycine max
  Clone ID: PAT_MRT3847_14957C.1
agctcaataactatctattatcaaaggccataaaaaaactcaagggacaaaggccaagatcaattctcaaagcttccttagcttggttatcacagctacctaaatttaaacggcattaataattgataatactagccctacacaaggtggggtttttttaggtgggggaccactccccaattttccagggggaaatggtcgcaacacaatgggggacattgacatttgattctcactacaagaggcttgggacctctacgggtttacccccgggtcgaataccaccaaccccgattgggaaaccggtggggggaacttattccccccctttcaggtggtttttcccccttcgaatcccaaaaaaaaaaaaaaaaaccccccccaaaccccccccggggtagattttttttttttaacgggggcacggcacggttatatttactacctttttgccccaaaaacaaagtgaagggggttgggcagccccggaataacggtttccggggggcttaactgggggaaatgaccatcagttgccacgacccccccgagggactcggccccaatgggggggggggg

SEQ ID NO: 48672 - DNA, 436 bp, Glycine max
  Clone ID: PAT_MRT3847_14958C.1
aggcaacaacatagaatagattattctcttttatggtagatctaatgtctgattttcggacagaaaatggtaaagaacaccacatacggaccaagcagtaacaggaaaccaacaaacgataattcacaaaatcctgcatttacaagctagtcattacataaaaacgattttaatttaagggaatcattttctcataaaaaataaatttgtaaaatatactgggcactacactatcacaggtcctcatgcatggtccaagccaatcatcacattgctttccaaatgggaggatataagccgtgagacaatcatgctagatcaaaatgtcaaaagatgggtcttctatgctgccacagatcctgaagcagccttcctttcctctataagacttgtcagtgcactatcaatttgagcaaatacttcctcctttgagaca

SEQ ID NO: 48673 - DNA, 1410 bp, Glycine max
  Clone ID: PAT_MRT3847_14959C.1
gcgctgttacggctgcgagaagacgacagaagggaaaataagaatgaatgaaaggcattagaaatcagtgaccggcgtgagagagcaaagatggtggttcttggcaccacctcaccttcaatttcctgcttgccgtcttcaactcaaaccgactacaaggcgcgtcgatactgttcttttccgcaacgcccacgcccacgcccacgcgcttcacgtttcttttgcggatcccctttcgctccaaatgccatccattctccttctctgtctgtgacgaatgaagcactgaatgttatgatttctggggctcctgcttctggtaaaggaacccagtgccacctcatcaccaacaagtacggtttggttcatattgctgctggagatttacttagggcagaaattgccactggaagtgataatggaaagcgagccaaacagtatatggagaagggacagttggtccctgacgaaattgttgtgatgatggttaaggagcgtctcttgaaaccagattcgaaagagaatggttggcttttggatggatatcccaggagcttatcacaggccactgcacttgaggctcttggctttcggcctcatatttttcttcttcttgaggtttctgaagatgttcttgtggagagagtagttggacggagattagatcctgttaccggcaagatatatcacttgaagtattctcctccagagacacaagaaatagccgcaaggcttacccaacgctttgatgatacagaagaaaaggtgaaattgcgattgaatacccatcatcaaaatgtggagtcagtcctttccatgtacaaagacataactgttaagattaacggaaatgtctcaaaggaggaagtatttgctcaaattgatagtgcactgacaagtcttatagaggaaaggaaggctgcttcaggatctgtggcagcatagaagacccatcttttgacattttgatctagcatggtgcgttgctggtggtagtggattttaaatgatttatttatagagttaaacaaaagagtcttcactcaaactaagctgcattttctcgtgaagattgtctcacggcttatatcctcccatttggaaagcaatgtgatgattggcttggaccatgcatgaggacctgtgatagtgtagtgcgcagtatattttacaaatttattttttatgagaaaatgattaccttaaattaaaatcgtttttatgtaatgactagcttgtaaatgcaggattttgtgaattatcgtttgttggtttcctgttactgcttggtccgtatgtggtgttctttaccattttttgtccgaaaatcagacattagatctaccataaaagagaataatttattttatgttgttggcttaaaaaaaaaaaaaaaaaaaaaacccaaaa

SEQ ID NO: 48674 - DNA, 766 bp, Glycine max
  Clone ID: PAT_MRT3847_1495C.1
tacggctgcaagaagacaacagaaggggattgcgcacgcgtccggttacggtaccggaacacgtcacctctgccagccattttcctttttttcttttttcttttttttgggaacgtgagcgccaagatcggacacttgctcccatttccttcattatcacagtttcatctaaccatttctcgcagaattccagttccagtttcaggttcagtttgttgatggctaaagttggtaagttgcggagcaaggctcgaggtcacagggcaagcccacatcttttgtcttgtggaagaaaaaatctgaaagatgttaatgttaggaagagctcttctaaagcattggagaagaaagattgggaagatgcaacctgctcagtctgtatggaggtcccccacaatgctatccttctcctttgttcatcttatgataagggttgtcgcccatacatgtgtgccactagtcatcgccattcaaactgttttgaacaatacaaaaagacatatacgaaagcaacttctgttcaaagcttgcagctagaagcaaacaattccaatattgatttaagcacaggtgaacctaaagacgatactgaagttcctgagcttctttgccccctttgtcgccggcaggtgaaaggttggacagtggttgaagtggcacggaagtgtctgaatgcgaagaaaagaagttgcatgcaagatgattgctcttttgtggggaattacaaggagcttaggaagcatgttaggtctaagcatccatttgc

SEQ ID NO: 48675 - DNA, 598 bp, Glycine max
  Clone ID: PAT_MRT3847_14960C.1
ctccgaagagaacgctttaaggaattcttttgtcaagctggcattcttattggctttcttcatcattgcatcagatctatgcatgaaattagaggcaagaggacccattgtgcgtttgcattgcactaacgactcacaatgccaatattcttgtccaacttgtggttgtagatgcgttaacacatggtgccagtgtccaaaacaacctttcgttgaggatattcgttttcaagcacctccaaattgagtaaacgggtcttctgttgttattatctagtatatggatggcaacaatcaaagattaatcgaaggcttgggttgcatccctctttggtgtaaccaaataacatctcatgaattttaataaaacttaagctttaaatacctttcgtaatcttttctcattgatacttacctttagtttcaagacatatagcatcgctgaagaagaataagaaatgttatttgtacaacaattgagacaatagtttgtacaatatattttgtgtgtatctttcttttgaaaatcatttattacatgtcatcacatggagaaaattaaaaaaaaaatagtgttgtatccattgttgtatggatt

SEQ ID NO: 48676 - DNA, 523 bp, Glycine max
  Clone ID: PAT_MRT3847_14961C.1
agagagagagagagagagagagagagagagagagagagagagagagagagagagagagagagagagagagagagagagagagagagagagagagagagagagagagagagagagacctagattgagaagcaccatcttctttgctctctttctcttttgtgccttcaccacctcatacctacctttagccatctctgatttcgtgctcgataatgaaggtaaccctcttgaaaatggtgtcacattttatatcttgttagacataactgtatttggtggaataagagcagcctcaacgtgatatgtatgatgccctctctctgtggtgcactctcgcattgtgctcgtcaaagggtttggatctatcatctcgtccctatatctgttcctttttatcgccgtatgccatgctttgagccttaagttcgattcatttgcagttatagtgctgtgtgttggaattcctaccgagtgatcttgtgtggatgatctacctagaggtcctgctgttataatttgtgag

SEQ ID NO: 48677 - DNA, 404 bp, Glycine max
  Clone ID: PAT_MRT3847_14962C.1
caaatgaaaataatttgtgaataaagccctgccatatagggaccatttaacatttttattgcactacaacggaagaaaactactagaatgatacatctcttgctcactgtcaagcaccatgatgaacataccgtacaacggttggcaccaaaccaagctaaacaaaaggatgaaaataagtttaacatgaatagatccttaacccatggaggtatactcctggctttaaggaaaacctagcatccccctggccactttatctcaggtacagtttctatggcctataacatacctgtgtccaagggatggtggacattcatcatactttggctaagcacattaaatttgttctaaggtgcttaaggaactcaccttggacccttgaatccaaacacttgacttcc

SEQ ID NO: 48678 - DNA, 622 bp, Glycine max
  Clone ID: PAT_MRT3847_14963C.1
acggtcgttctttttttttttttttttttttttttttttttttgttttttttttaaaccctaaatattgataactttattggggggaaaacccccaatatttgggaattttagggggggagaaaccccctctgtttggggagcccaacaaaaaaaggggacccctggggtaaacacgggccactaaaaatttggggatataggccacattcttgggggggaaagaggaaaggtctaaacaaaatatttttcggggggggggggcaagggattttcattttggggcccgggggggtacccccggaaaattaggagagggccttggaggggtgccaatttttcgtaataggggggttattgagggaaggggaaatccgggcacaagccgcccccggggggaaaggggaagcctaaaaagaaacccccggggtgcctagcgggagagataaagggaaaagcggggggggcccaaagggggggctaaccaacataaaaagggggggggccacgggcctttattaaaggggaaaaccggggggggaggcggttttaataaagggccccacggggggggaaaggggcaccagaaatagggcccacaggggtttttttttttccccctg

SEQ ID NO: 48679 - DNA, 1027 bp, Glycine max
  Clone ID: PAT_MRT3847_14964C.1
ttctgctccatgtaagacttttacttgtttctcatcacacgtggcacgtgcgacgcttcagtattatttttccgtcattgttatgttacggctttgaggattcgccatggctgctacggcttcagcttccgctgcttctctctcccttcgctcttctcccttcaaactcaaccctccaaaactcaactccgttacgctccgtttccctcaccttaatcgccgttataacagcgccttcagagtcgtcgccgcttccgtttccgtctccaaccccaacgtgcaaaccggccccgacgatctcgttgcttccattctctcaaaggtggtgcaaacggatggaggagtattgctgaaggaggaagagcataaagaggtggccgaagtggctcaggaactgcaaaagtattgcgtgagtgagccagtgaaatgccctttaatatttggagagtgggatgtggcatactgttcacggccaacatcaccaggtggtggctataggagtgcaattgggcgccttttcttcaacacaaagcaaatggttcaagttgttgaagctcctgatattgtgagaaacaaggtctcactttctgttttaagctttctggatgtggaggtttctctgcagggaaaactcaaggctctggatggtgaatggatccaagttatatttgaagcacctgaattgaaggtaggatcatggcaggtccagtatggtggccagagtgaagttaaactcagaatcacttatgttgatgagaaaatcagtggcaaaaataattctttttggggggtgcctttgtagctgaaatttggtcaggggatgaagaatgtgggatggtttccaacctctagccttggtggggctgtgaacactatctgagactcaacttaagtgtcaaggacattaaaattaagtttaattatactttcaggctctatttgaaaaaaaaactagtgtatggcagatagtggatgagtttatagttaatacttgataaattagctaattgaatttgtagtgtttgat

SEQ ID NO: 48680 - DNA, 231 bp, Glycine max
  unsure (1)..(231): unsure at all n locations
  Clone ID: PAT_MRT3847_14965C.1
ctcgagccgcgaaacgtcggaacataaggcggggaagagttagtttcttctctcttcgatgcaagcggggagaggtctccttcggcaccgcactccgcgcacggaatccacgcttcgctctccgtcgtgatcttgtcggtgtccgattcgctgtgctcggcgacgtcgtagcaactgaaatcancgctgattcagacgaaacacgatcagacatgacatgagatgacctcg

SEQ ID NO: 48681 - DNA, 306 bp, Glycine max
  Clone ID: PAT_MRT3847_14966C.1
gtgaactgataatggaaacacttgtattaaaactgcaaactacagcattcaagattatacaatacgctacacttttaaaaagccttatatctatatctatccactgcaaagctgtggccagatttaaagacttctgcaggcatatgtttgatacacgttaagcatatgacattctcccgcaattggactttgacaccgctctatataatccctggattgcagcaccacgtggagcagcttccataggtgaaatgttgagaattgctacgcccttgccgttgttctgggcttcatcggctgcaatgt

SEQ ID NO: 48682 - DNA, 297 bp, Glycine max
  Clone ID: PAT_MRT3847_14967C.1
ctgagagacctactttgaaacatcaaaggaaatggaaatcttacccttttttcactaaataatggtacaatcgaggtggggaaatctttcaggcggacgagtgtcgaaaaggagctattgaaaactgtgcatctataacacatgattctaaatcatgcatggaaagaccaatttgagtctgacttaaatctacaaacacactcattgctactgatgaaaagacagaaacttttgaacttgactataactgaaaacggcacatatggaatggctataatgcatcaacccacttcaatt

SEQ ID NO: 48683 - DNA, 1424 bp, Glycine max
  Clone ID: PAT_MRT3847_14968C.1
cccacgttttcacaattcccttccttgatacaaagccttccctgtttgcttttttcacaattcacttcttttccagagagttagggaagaggaatagagaaagagaaagagaaagagcgtgagagagagaaacagcacaaggatggagctttctcaacttggttttctggatgagctacttgctccaagaaaagacactacttggagtaatgctttgtcaactgggttgaatgagttactactccctagtggttggagctttgactcttttgatgagaaccaaggtttagctactttgaatccctcatttgctgcattttccactccactagaccacagatttgaatgcccttatggaagtgaagcagcatacccttttgttgatggcttcacattgcctgagcttgattcttcatacaccaggaatgatgagtcagcaccacttttgccacaagaggataacccatcattggaggatgaagagtttggctttctgggaagtgataaccagagcttggaacaagcaaaaattggctgcaaaattgaggaacaagtgacagagattccagtctttaacatgggcttgtgtggggagaaaaaacccaaatcaaagaaactagaagggcatccctcaaagaatctcatggcagaaagaaggagaagaaagcgtttgaatgaccgtctttccatgctaaggtcaatagtcccaaagattagcaagatggacaggacctccattcttggagacacaattgattacatgaaagagcttctagaaaggataggtaagttgcaagaagaagaaatagaggagggaacaaatcagataaacctcttaggcatttctaaggagctaaagcccaatgaagtaatggttagaaattcccccaagtttgatgttgagagaagagaccaggacacaaggattagcatctgctgtgccacaaagccaggattactactgtccacagtgaacaccttagaagcattaggccttgagattcaccagtgtgttataagcagcttcaatgatttttcaatgcaagcatcttgctcaggggcagcagagcagagaaattgtatgaaccaggaagagataaagcaagcactattcagaaatgcaggttatggtggtagatgtctctaggagaaagatggaaagctgaaataacaatttgctgatgttgaaaaacaagcaaagttttcctcttgtgtaattcaaggaattaggggtgttacgtttaatgagatttcccaataagatggctttgaatgatgctttgattcttatgtaagttacaactttaccctgtattttaacatactatggggtatgttcagttcaagcctcactttcccattgtgataaacatccatttttttagtaatgaagaagggttgttaccaaacccataagcggaatc

SEQ ID NO: 48684 - DNA, 275 bp, Glycine max
  Clone ID: PAT_MRT3847_14969C.1
ggctcgagaaccaaaaaaaaaatccctgtggatttaatcctaattggtccggtttttccctcggttcctcacaggacataatgggggtccagaggaaaaaccacaaccttaacacctttttccaccaatcccaatccattttcccactatgctcttaaactttcccccattttaatttttttcacctctttcacaaattcccactcttttccttttaccctttaagggctctccctttgttgcaccggggttttctgcggcggcggcgcccccgg

SEQ ID NO: 48685 - DNA, 194 bp, Glycine max
  Clone ID: PAT_MRT3847_1496C.1
ggtatatcccttcacgggggggaacctgagaaaaagggccccggttcttttaaaaaataatgcccttttgggcccaaaaccaaccctagacctctggcgaaattttttgggcgccctcccccccatggaaggcagacaaagccccccaccccaccagaaaattgccctatttgttgggcaaaaaaacaaaattt

SEQ ID NO: 48686 - DNA, 358 bp, Glycine max
  Clone ID: PAT_MRT3847_14970C.1
caaaaagactgcgtaccggcgttaacctaaactaagagagagagaggtcgtagactgccactcgaatcgcttactcatcactcttatactgggacggaaagtgaacaatagatatggtctgaatcgagcttattggatgcacataccacaaagctcttattgtgataaataggatatctgggagaacagctcgtctttcaaggccctaagctgactgctacgatacatgaaaatttcaatcggtttcgtcatagcatctacaaatgggggtgacgacaccatcaattttgaggcttttccatacaagctggttcactttggagagattcaagaaaaagttgtattgtaactttcacaa

SEQ ID NO: 48687 - DNA, 787 bp, Glycine max
  unsure (1)..(787): unsure at all n locations
  Clone ID: PAT_MRT3847_14971C.1
gacaaagttgctgatggattcaaggttgtagcacgttctgggaacattgtggcaggtatagccaatgaatctaaaaagctatacggtgtacagttccaccctgaagttgggcttacagaaaatgggaaggtaatactgaagaatttcctgtatgatatagctggatgcagtgggaactttactgtgcagaaccgagaacttgaatgcattcgagagattaaagagaaagtaggaacatcaaaagtgttggttttactcagtggtggtgtagattcaactgtttgtacagccttgctaaatcgtgctttgaaccaagatcaagtcattgctgtacacattgataatggctttatgagaaaacgagaaagccaatctgttgaagaggccctcaaaaagcttggaattcaagtcaaagtgataaatgctgctcattccttctacaatggaacaactactctaccaatctcagatgaagacaggaccccacggaaaagaattagcaaaacattaaatatgacaacaagtcctgaggagaaaagaaaaattattggtgatactttcgttaagattgccaatgaagtaattggagaaatgagtctgaagcccgaggaggtttttctcgcccaaggcactttnacggcctgatctaatcgaaagtgcgtcccttgttgccagtggtaaagccgaactcatcaaaacccaccacaacgacacagaacttatcangaagttaaggggagagggaaaagtaatagaacctctgaaagatttcataaagatgaagtca

SEQ ID NO: 48688 - DNA, 564 bp, Glycine max
  Clone ID: PAT_MRT3847_14972C.1
gacaagcctcactctttctctgtctgtaacttggaagttggaaccaccaaactcaactcatctcagcatgaattctctttctctttctcttgctatgcttcttctcctcctctgtgtttctgtgcatgcatgctccgcccgttctctttatcctagtcttactaaaaaagacaccccacataaggaattagacaagctcaaattattggaggcattaactgcatccagtactgtgaagaattacaaactagaggagaatcaaccgcagcaacagaaagtcgcaaataatgaaataaacacttatgagagttgtagcggtgcatcatctactttgaaggaaacgatagtagaggcagcttcagtaaacataataccaagtgacggtggtgagcatgcaactgggacatcttttcaaatggattcgccatcctttcttgcaacccaggatgagaggaggcatgcccggtcaatgctgggacctgctgagcacaacgatgaagaaacagtggttacaaagaccagtgacaccgaagaggacatagtcgagatggattatgctcaacc

SEQ ID NO: 48689 - DNA, 282 bp, Glycine max
  Clone ID: PAT_MRT3847_14973C.1
tttatacatacaaaaatctgaccttgaccacattactattaaaacatgttttacagatcaaagcacagataaatagtagcttgttacagtaaactagtaatacattcaatttttcttcagtgacaaatcatatccggagatgtaatttatgcaccatttgcttcccattatccttatgggaaatctggcttaactgctgtccttgtgtgtaggcatgaagttaaaatgataattatccaaaatttcaaatacactggtagtgacctccatggcataagcata

SEQ ID NO: 48690 - DNA, 336 bp, Glycine max
  Clone ID: PAT_MRT3847_14974C.1
cctacgcatacgtttattctttgttttattaaactggacataaaaatcggtggggattctatcaaaggacttcaaaaacactctgaccaaaattaaataagtcttgcaggattaactaaaaagagccagcattaattcaacatatattataagttacaaaccataccgaaacaatgatggaatcaatctctcacaccctcaaaccttacgataaaaggaaattttcaacagcaatgtttttaactatatgttcaacaccaactccatcctctataaacctggtgaacatccaaaccatgaagttcacattaattttgcaccttactctttttacag

SEQ ID NO: 48691 - DNA, 292 bp, Glycine max
  Clone ID: PAT_MRT3847_14975C.1
attgcctatccaaaagaaagaaaaaaaacaaaaaaatgcaagggtgtgtaacaccccccataataaaaaaaacccccccccaaactaattttgaaccacacgaaatattgaataattccaataacaaatttttcctttaaaggaaaacaaaaaataattttttttttccaccaaacaaacaaaatataataacaagtaccatctctttctacaacaaccccccacctttgtcttacgcgtgcgtctgcccttaaatttcccccccgttcctgcaggccgcccagctttccct

SEQ ID NO: 48692 - DNA, 450 bp, Glycine max
  Clone ID: PAT_MRT3847_14976C.1
tcttatccgcgcagccatctctctctgatagtagctcaatgacgaccactactattcttggggctgctagtgtttgaccccttcaccgttcactgtacacacacaattcatataagatgtaattcattttcacccaagttgttgtattctgtttccacttgctatatataatattgtattttgtttccacttgttttatcttttgcttttattttcatcattgacagtgcattcaagactttttcttgatcacaattcatgacttattctatatctcattcttctattgctttatcccgtcaaagttgaaacactccaattatatcacaagtgggtcaacaccattttcaaattccagtcttctccctctctagctatgacacctacttcttcaatgctcattgctcacccccacattccattggtcagattcatcaccaaacacctact

SEQ ID NO: 48693 - DNA, 504 bp, Glycine max
  Clone ID: PAT_MRT3847_14977C.1
ttttatataatttgttgttttacttttttttttttttttgttgtttatttcttggagggaaataccggtttttttctttaacaaaaaactaaggtgctttaccccggaaaccaaaggggttttttttcttttaaaaaaggaggctttcctttccccacagaggggggggggaacccatcggggctatcaaaaaaaagccttttccaaattgtccccccggctaacccccaaacaaaaaaaaggccttcccaaaaaggtggttttttcaaaaaccatttcctaaccaaacccgtgtttttttcccccccaaagaaaaagtttttacccaaaaacaccccctttttttttcttgtttttgcgccgggcattaaataaaaaacccccttactcccccccgggggaggggttttcgctgaaaaaaaaaaaccctttttttcactttcggaagagcacacacctgttgctgacacaaaaacattttcctcttttggcgggggccccccc

SEQ ID NO: 48694 - DNA, 1298 bp, Glycine max
  Clone ID: PAT_MRT3847_14978C.1
taaaaaaacttaaagaaggcaattgttaaaaagagtcttctaatcacgacactatccaaaggtaatattttggtcaatgaacaagtggtgttgcttctataaagtgaaacagtatttaggaagaaaacacggtaaccaccgactattaacatttcgacatttcatgctttggtgtacgcaagactcaaccttcatataacagaacacataacaaagaaataagagttgaaccagatcaagctatttcagaacttgagacaaattcaagttctatttccaacttcatgtattgttatgaggaatcaagatgatcaagtacaaagatctaccttcatttctcttcgtaaccaacttcatggttttggatctcaccagagctgacaagtgagttgacaacgttgccttctattgcatcttcggatttggatccattagtgaggtctgaagaatgagctgctgactgatcatccagtgtcacttccttttggactacctgctttgggcgtctgatcgcttctgcagcctctggcattgctataggaggaggctgaggaggaacccacgctcgttggactggctgcggactggatgcagcaggtgctccattatactcaatttcattatcgatctctttgattctgacgttctttgtttgccaccagggtactgtgttgtcaccattatcttggatcttgccatttacttgatacggaaggacttgggttgaggtgttttgcacctgactaacctcccaaggcttggctctaggtgctaagcgaggatttgatggttgctgataagggttgggggctgaatcatcaatttccctaatgttagaaggcttctcccctctttggatcatggccattatctccatatatgatttaggatgaggagcactagatggttcaacagatacaggaggggatgaagatctcactgatcgggactcatagtctgacttcccattcacgatcagttgctgtgtctttgaacctgtttgagtgactaagcggtcttcttgctttgagacagagagtccaccagaagcttccaatcttcctattgcattagtcatcaacttcatttcctgcacttgcttatccaaaaggttcacaacttctacaaaatatctcttctcttcaatttttgaactcagtaactcgagccttgcttttgcaatatcagcagctgcaactgcagctgcttttgcagcctgtgcagcttcttctgccaatgttggttttgagcctgttctctttgattgatcatgaccctcttctaggacaacattgcgt

SEQ ID NO: 48695 - DNA, 412 bp, Glycine max
  unsure (1)..(412): unsure at all n locations
  Clone ID: PAT_MRT3847_14979C.1
gacccagcgnccgaaaattttttaggagaaagaaaaggcaggggtggccggcctcctctgcaaaaaaaaaaacccaatagccccttcttcgtcccttttcctgcattctgccggcggtgcttcagagtctcaactttgatcttctcctcaaatggctcatacccttttgtttgagggtttgcatggttactgggccaccttggggggggttcctttcgttgtttttcgcccccattctgtagtgctaggtcttgaacccgctaaagggtcgtcgcggctgcagtgagttgaagcgggagcgtgagaaacagaaaaggggtggccgccgcgattgatttgccagaacgagagggggtttatctgcttattacttggcgcgggtttatgctgtttgtggggcttctgtgaacag

SEQ ID NO: 48696 - DNA, 360 bp, Glycine max
  Clone ID: PAT_MRT3847_1497C.1
acttattaaaacccaaagatttattcaaaagggcgaacaaaaagttcctttgatactaaggggcacccttgttcacgaacgcttattgagagggaaaagacaatacccaaacgttctaacatttcccggaaaattttcagaacggcccccccgatggacatattttaaaatccataagaaaaaccgctgatcactagacgggttttttaacttgtgacctggaaaaacatgatcctgatcaccattatcaggataaacaagttggctgtaacggaaaaaccggtggataaaactttgaacggggaaaaaatccttatgaatgggccagaacaaaacctggctgaggacattctcccccat

SEQ ID NO: 48697 - DNA, 1631 bp, Glycine max
  Clone ID: PAT_MRT3847_14980C.1
acgccacgcgtgtgcttttccctgcgaaaaacaacaacaccaacaatgggagcacgaaagagactctcttcttccgagcctcattcttcttctcctgcaacaaaggaaaacaccacaaccaccaaacccgaacaaaaaccaaccaaaacagaccctccaattgcgcctcctaaatggggtcttcttctgaagctctctctcttcttctagctcccttactcctatctccacttccccaactatccgatcgtgccggttgtccacatcatcaaccgccaaagtgcgggcctgagactcgactaccgactcggaaagatgatggtacactccttcacttctttctaagaaatttaggccgaaagtccgaaaaggcactttgtatttatcttcttgccttccaggctatagcgtgctgttgatgtttcttgctacgttgtttccttgctggttggtacaaatgaaagcacgtattggttaatagaatacacatggatgagaactacgcaaaatgcagacattgcagcattaccgttctgtagtataactacgctgtaatgagtatttgttgatgtccttaatgtctcttgtaaacttaaattactactcccatcaattgctgcacttcctttgttaatggcatatgctggacacacaactatagttataccaaagccacttgtcccacacattgggattgaggttttggatcttggatggatgtataaactatatatggggctattggctgttttttgcacaaattccatcaatatacatgctggaataaatggccttgaagttgggcagactgtggttatcgcatcagctatcctgatacacaatattatgcaaattggagcatcaacagatcctgaatataagctagcacatgcattttctatttacttagctcagcccttgctagctacctctttggctttactttcttacaactggtatccctcttcagtttttgttggtgatacatatacatactttgctgggatgactatggctgtgattggtattttaggccattttagtgaaacactcttgattttcttcctacctcaagttttgaacttcctcttgtcactcccccagctttctggctatattccttgtccacgtcatcgactgccaaggtttgaccctcaaactggactactgactgggacaaatgatgggacacttgttaacttctttctaagaaatttaggccgaaagtccgaaaaggcactttgtatttatcttcttgctttccaggctatagcgtgctgtttatgtttcttgctacggtatttccttgctggttggtacaaatgaaagcacgaagtggataaaagaaaagatatggatgagaaccacgcgataggctgattttgttgtatatcatttttgtagaataacttagtgagaataggcatatatgttggtggtgaaggaattttgttaacttaaagattttgcatagattttcgttatctgaatggtgtgtactaatatcaacttagggggtgtttggtacaagaaaagttattttttaccgaggaatcaagattcatgggaatcataaatcacgggaatcatgatttataggaataaataaaaattagttggtttctcataaa

SEQ ID NO: 48698 - DNA, 508 bp, Glycine max
  Clone ID: PAT_MRT3847_14981C.1
ggaatattaaagaacattgaaacattcaaaaactttaaattttagagaaaaaaaacctccaggacttctgttcaagcacctcactgaacaacatttcactcctttggtcccttattcctatgcttcacatacttccatctgtcttggcatgagatccttgctagtagtggaattgctggtattcactttgttggggcgttcagacaaattggaacatagagaggttgacttgtgtgatcatggtatacattgatgtggaactatgaacctttttgctgtaaatatggaactgttgtacaacatgaaagatgtgactcttccatgcagaggaaactcgacggcttcctgaccggtgacatcaaaactaagtttgatacaaataatgcaaattggcagaaaggtaatcttagtaaggagattgtggatcatcatttttgaaggaattataatatatttgaacaaggcaccatgtgcatgccttccaggctccatcaaggactgcaaataa

SEQ ID NO: 48699 - DNA, 1713 bp, Glycine max
  Clone ID: PAT_MRT3847_14982C.1
gggtcatcaagttaagtttaaaattgaaatatatacatacatataaattagtcccagcagaattttcagtgtatctgcatacgttcatcgaagtgatatctacattttcaggaggtaactgtacatccaaaatgtatatagacacgacggataacttttcttctttagaaattaaaattgtacatagtcaaaatggataacttttcagaagatcctctagcagtatactaataaagacaaacaattaatgattcaacaaatggcattatttgcagtccttgatggagcctggaaggcatgcacatggtgccttgttcaaatatattataattccttcaaaaatgatgatccacaatctccttactaagattacctttctgccaatttgcattatttgtatcaaacttagttttgatgtcaccggtcaggaagccgtcgagtttcctctgcatggaagagtcacatctttcatgttgtacaacagttccatatttacagcaaaaaggttcatatttatatttttttgtaaaagatgaatagtcaagcatcaatctctaccattatctcaaaagttaacttctctataagacaattccagcaattccactactagcaaggatctcatgccaagacagatggaagtatgtgaagcataggaataagggaccgaaggagtgaaatgttgttcagtgaggtgcttgaacagaagtcactggaggttttttttctctaaaatttaaagtttttgaatgtttcaatgttctttaatattccctagtcaaaactattggtaagttgatcataaatatgtatgattcacctcatagcttgaatgacatagcttctggatatgagaactggttttcaaggatttaaaccttagaacttgaactagctccaactttcatgcactgaagtgtaacttctgcttatacatatctcaaatgtagtagtgacagattactgcaatgacaatgagtcaattgcttaaaaaatgccaagcatcataagaacactgggaaatttcaattcacatggaagggattgctgaatccaatattgagatcaaatcaatatttgaaggaatctaagaaaagtcccagtgtaaggccagccttccaataattaaacaaggaaataaggctcctactctttcgaactaaaggaagagaagctctgtacatgagagccccaatgccttccacaacagccacagccaaggcagcagatagaatatcccagtcaccagtttgtccaataacagtggcaaaggccgttgcacagtaaaatccaaccaagaagaaaaacagcttcaatggaagatttttctttacctcctgaatcttagaacctaacttggtctgaaactcttgaatcactctaattatgcgagtccttccattagtgctatttgaagtagaaggactaaaactgctgtcatttaagctgcttctaactgaccaagtcatcctcttgaaactgaaagttaaacaaggttgaccaaaactgaagaagcttggacagcattgcttctggcagaacgtggttttgtaaaagaatgcagcgagagcaactttagaaactcctgaactgacataatcaagagatttaacttgtgcactagtcatacaactggatgacctcattgtagtcgcaaacaacatgcagagtcctcactctgtgtgtgttggtgagcgcaaagtgcgaatttag

SEQ ID NO: 48700 - DNA, 306 bp, Glycine max
  Clone ID: PAT_MRT3847_14983C.1
aattcggttcgagcaagaatttttcaggagtctgtgtataagacacaacaaactatatggaaagagacaagacatatggtacaaagacaatttattgcctgagctgaaacatataacatgtggctggctcttgttttgtaaaccaaatgattaatcttcacttgagaaagcagtttctaggaaatgtttaaataaaagagagtctacaccttaaagaaacctatggagcacaagatagataaatttctgcaggacagcctataaaattgtggtactttttgatgtttcagtaaacttgacattgtc

SEQ ID NO: 48701 - DNA, 290 bp, Glycine max
  Clone ID: PAT_MRT3847_14984C.1
gcagtgactcccacaaggagactcaacattgagtacaatggcagtgacctatacgactcgttcgagttcaaacagatgactttacaactcaacgaggccattcaaacctcaaaagaatcttcaccagcttacagagagatgacgcacaggcacaagcttaaaaaggccattcagggctctaatggctcatcgccatcattagtcttccacctaaattcacccttttatcgtcgccacctgaagcgtctctacaaagaaagcacaaaggcaccaagagaatctctagtcct

SEQ ID NO: 48702 - DNA, 335 bp, Glycine max
  Clone ID: PAT_MRT3847_14985C.1
tctgtaatgtaaattgtttaatgttagtatagtcacagttttttgcattttggtgaagccatatttttttatttttttttttcattttgcttgaaagttaatttgttatgtcaagaccctatttgatgtaagtttcatgggagctaggcctacgatttttttcatcaatggattcctttgcttcttggaagatgtatgataacggaatgaagaaggaagagagagaagagacgtcacttcaaagagaagatgagtctagaagaagttcatcacataaaaggtcatggataagagtttggagaaagaaagagatgaatgaagggagaggaagagaa

SEQ ID NO: 48703 - DNA, 257 bp, Glycine max
  Clone ID: PAT_MRT3847_14986C.1
gagaaatgtgcaaaaccaggttcagttattgagaagaaagcatattttgaagctcatttcaagaggaagggcatgcttggttttattccatctacaggtcatgagggatcatcagatagagcaaccagtgaaaatgatggatcagagagaaatgccaagcaagaggattttgagtccaatgatggccattatgttcaatttgatgaaatgtcccaaaaggattttgagctagatgaaggtgaccattatattgaaat

SEQ ID NO: 48704 - DNA, 110 bp, Glycine max
  Clone ID: PAT_MRT3847_14987C.1
cttggaaacggaaaatactttattgctaaaccaacaaacacatgaaggatacatcagaaaattgctaaaacctacacaatccaacataaagcctgaagtttggtacatcc

SEQ ID NO: 48705 - DNA, 544 bp, Glycine max
  Clone ID: PAT_MRT3847_14988C.1
cattgatattttaaatttacccgggtgaataatagaaggaccccatacataaaaaaataaataaaaaacatttgccttgctttccttcagttttaaagagggcataaataacctcaattgcaggtttgaatttaataggcaccacaccactcatcaggttgtcaaatcgggcaaggaaaaatttccatgggttggaactgaaactttcactaattgttaaccacgttgaagtgctaaacaatgggctatgacaggttttgttggggagattcgagatgtacacctataaaccacgagtcacttataagggagtcgtctgacattacactctaactcaaaaccttttgggggtatactcctcacttatatggggttcaatcttttcacttctatccgatgggagactttacctcacacttgtaacccaacaaagttttgcatgtccatcccataaaagggccttaattaatctcatgggcttaattaagtttaaccttataaatgatgatgtatgggaagaatatatggtaccctggcgtattct

SEQ ID NO: 48706 - DNA, 246 bp, Glycine max
  Clone ID: PAT_MRT3847_14989C.1
tttttctttagaatctttttggttgggatagaataaatttatctggaccattggcatcaactacataaaatgaatcattcaacacataattgaatcaagggcgccagctctaaagtagtaacacatgtgatccgttcaaatattttctatatacataaccagtcaccaaaaaatttcatgctggacgtggaagtataatccaaaagcacgggtcaaatttgctgagccaacaatgtagcttgcata

SEQ ID NO: 48707 - DNA, 266 bp, Glycine max
  Clone ID: PAT_MRT3847_1498C.1
acccacgcatccgtacacgcgtccgaagactaccgagtggattacagaaggggaagaaagagaagtaaaggagactgctttaccagtggggatgttgtttctgtcgtcggtttcggcagaattgggttcgactaccatagtcccgatacattccccctgacctctagattaaatgaaaaaaccgactataaacagtttgattgttaaaggtaccattatttcattagtaatgtaatcattattgtcacgggcttcgatcctattta

SEQ ID NO: 48708 - DNA, 401 bp, Glycine max
  Clone ID: PAT_MRT3847_14990C.1
agcaaaattaagccatggccgagcggaatggcgcatagttcggattcaagtacagttttacacattgagtccaagctcaattgacaatatgggaccgtcatttgattttagacgttccatgaaacaaataccgactatactggtagccaccaggatttcctactccctaaaacattaatataaacccaattcggctcatgagataacttttctaacaaagtacataatcttgaccactgcttccataatgaccaatgcacagaaagactctgaaaaagcattaagccttgttggatgtttcgttcgataccctgtccaaacactcattaagaccctaccaagaggttgcacattgtcgctctggatgtgaccaggtccctgtgtgagatagtggagaccca

SEQ ID NO: 48709 - DNA, 373 bp, Glycine max
  Clone ID: PAT_MRT3847_14991C.1
aaaacataatttttctgaaacttaaacaaagtcccataaaacagattgggcctcatcataacaacaatggtaaaccagtttatgttacatccatctacacagatggaagcttccacgactgcgaggcctatcaagcactttcctacttgtataacttgggttccccgaagccaacaaagaacggtctattgccgtttgcatcactgcgccaatttcgccaaggtgcaaaagcgcacttctctcctagaaaacggtactgacccaacatggccctaaccctacttggaccgatacttttgacgagttggccaaccctcattacatagaagcttcaagccagacctggggcctgcattctaagtaaccgagctta

SEQ ID NO: 48710 - DNA, 239 bp, Glycine max
  Clone ID: PAT_MRT3847_14992C.1
caccccaatcaagagagacaagcctgcctatgttaacataaccactttcaccaacatcatggcctgagacaatttgagctcgaactgattatatgtagcaaacaaaggaacctgtcaataaagaagggactactttgctctgaaacgtatagaatccttgagaatctacaatacagatgactgagaatcttaaaggttttaacagaatatctgagcaacatacaaagtggtatattcat

SEQ ID NO: 48711 - DNA, 1357 bp, Glycine max
  Clone ID: PAT_MRT3847_14993C.1
gcacgcctgtgagctcggaattcggctcgggcggctcgagctcgagccgctgttacatatatgtcacctgagaggattcgaaatgaaagctattcttatccagctgatatttggagccttggtcttgcactttttgagtgtgggacaggagaattcccgtatactgcaaatgaaggtcctgtcaatcttatgttgcagatcctggatgatccatcaccatcaccattgaaaaacaagttttcacctgaattctgctcttttgttgatgcttgcttacaaaaggatccagatactaggccaacagcagagcagctgctttcgcacccctttatcacaaagcatgatgatgccaaggttgatttggcaggatttgttcgaagcgtttttgatcctacacaaagattgaaggatttagcagatatgttgacaatacattattacttgctatttgatggacctgatgatttgtggcaacatacaaagaatttatatagcgaaagctcaattttcagtttctctgggaaacaacattgtggtccaagtaatatctttacatctctatcaagtattagaactacattagttggtgactggcctcctgaaaagttggtgcatgttgttgagaggctccaatgccgcgctcacggtgaagatggagttgcaattagggtatcgggatccttcataattggaaatcagttcctcatatgtggagatggcattcaagtagagggcttgccaaacttcaaggatcttggaattgacattcctagcaaaagaatgggtatatttcatgaacaattcattgtggaaccaaaaagccttattggatgctacaccattgtcaaacaagagctatacattaaccaataaccagtaatgttatattacattatggtgtcacttggtcacacaattcgacacacataacaccaagaatcttgattttcacagaatcctgttctcccacgtgtaaaaacacttacaaatttgccatgtatccattttttgaaaaattgtttatagtgatatgaattcatttaaatttagcatttgattttgttacaactactttagtacttcctcttgcttctgttgagcaaacagcagatatctttaccaaagcttgttgcctaggctctttcagtcctttctatccaagctgggcatggttgacatttatcaaccctaaactcacggtggtggggctgttacctgatacgttgccacgtgtatcagttagttaaaacagttaattagatgcgcatgtatctgttaatagttagctctttgtatataaaccaagtttgtaccattactgactcattcattcagattttaatgaatcagttttctc

SEQ ID NO: 48712 - DNA, 490 bp, Glycine max
  Clone ID: PAT_MRT3847_14994C.1
aaaaaaaaaagcgccaacaaattctttagtaattaatttctctaagcattttttgggttccaagttacctgtttaaaaaagtttttttttaaaaaaaagaattcttaaagctaactttgaaaagtatttgcatagacgggagacttttactcatcgttgctaaagcaggatttgtaaaggaatttcactcccaccataaataacctggtcaagaacatctggggggcttgggttgcccttgtttttaaatggccttgagaacctttacccccccaagaatgcccaaaagaatgagtccacctgaaaagtttcctccaccccctccgttgccaccatgaccatcgccattggaagggggcaaaccagggccgttgttgccaagtttaggagacttctctttgccaataatcattgacccaaaattgggtggtacaaatgggggtgcacttgcaggtgccgcggcccttttaaaattcaaagcagcagcctg

SEQ ID NO: 48713 - DNA, 269 bp, Glycine max
  Clone ID: PAT_MRT3847_14995C.1
aaaacctgtatcaactattattggtagacacactatcctctagacagtagttgcacacaaaaaaaaaaaaggactatgttcgtaccctatggagttacaccaattcttttttaaaactctgcttttatctaactgaacctagcaggccagaccaatgattgacgaccatggcattcttttcagggctgcccatcttcttaacaagcacttgatttaaaggagaacgtcacatgcctgatagagtcacatcagcatatacaatgattggg

SEQ ID NO: 48714 - DNA, 417 bp, Glycine max
  Clone ID: PAT_MRT3847_14996C.1
ccaatcttattaacccctccactaggggcctccttatagccaaggcccaattggagggggggtttcaattggtggtttaaaatacaatttcgggccccctgccttttttagggggaagaatttatacacacccacatttaaaaaaaccgaaaaaaccacccagcccgaaagcttaccaaatttggaaggcccccgaattggagttccccaatggaaggaggtgcaaccttacaggactccgaggccaaaaaacccaagttcttcagggccctaaaatgctgaaacccaccatttggggtaccaaaatttgaaacctccaaaaaatcccccccatagggccaaaaaattaactaaaaggcatttcctagaaagggggctgttcccggcaagaatttcagccccctaggagaaaaagcc

SEQ ID NO: 48715 - DNA, 426 bp, Glycine max
  Clone ID: PAT_MRT3847_14997C.1
tcttttttttttttttttgtttttgttttttctttttgttctttttttttaaaaggaacggggccccatgtgataaacaccgcattcacagtttactataaatggctagggaaaacatggggctttttcaaagtgaacgccccctagattgagtccaggtgaaaccaactactgaaacctagggatatataaagacgaaattcccgtgttaaacggctcaaaccgtgatatatcccgcaaaaaaattgccctggggccaaaggccctaaccgctgtgaaacaccctccacacggggcatatccggttccaagagttgttaccacccggactttcctctaaatctaagcggttgcatcccatggactcagggcggaaatgaggtcccatccctatggggcatttttccctgcataaactttaaaccc

SEQ ID NO: 48716 - DNA, 244 bp, Glycine max
  Clone ID: PAT_MRT3847_14998C.1
acgcgtcagtccagctgcaaaagaccaccgaaggggctacgtgctgatcattcttcttcatctcatgatgaagccagtgcttttcctttaagtccttgataattgcgtacttgtgtgaatttcactcgaagccagactgatgttcatcgtaagtttcaaggttgagagtctttacatgtcatacacaaggactcgacagcagtccctgtacaactagggaaccactcgacttgttcacgagagg

SEQ ID NO: 48717 - DNA, 594 bp, Glycine max
  Clone ID: PAT_MRT3847_14999C.1
accaatgttttttgtttatttttttttttttttttttttttttttttttttggaccgggggtttttcttggaaattttttttcgcaccccgggggggaccccccagaactttgggaccgcaaaataaagggggacaaacttttgccaaaagaagcttattgaaaaaagggggtatatgttgacaaggccaggacatggaggaaaccggaaccccggaaaaaatagcctggggggcaaaatgccggaaaaaaaaaaaaaaaaacggggggggctaaaagacgggggaccaaaaaaaaaaggcgtgccgccaaatggccgattacacaaaaaaaaccctgtaaaaaaaaaaaagttttgagccccccaagacgggggaaaagcccccccggaaaagggccccagggggttttttttcccccccggggtttagtaaacccgccggaggcggcccaacccggggtcccaaaaaagcgaaaacccggaaaaaagggggtaaacccaaaaaagaaaaaaacccggccgggggggaaaaacacgggggaaaaaaaaaaaaaaggcgggaaaaaaaaaaaaaaaggcccggccccaaggaaa

SEQ ID NO: 48718 - DNA, 776 bp, Glycine max
  Clone ID: PAT_MRT3847_149C.1
ctaaaatgggcttttgcgatgaagccattttgttgtttcaagaaatgctacagctcggagtggaggctgatgtgttcaccttggttagcttgctttccgcttcctcaaagcattgtaatttggatttgggaagatttgtgcatctttatattgttattactggagttgaaattgattcaattgtcaccaatgccctcatagatatgtatgccaagtgcgggcatttgcaatttgctaaacatgtttttgatcaaatgctcgataaagatgttgtttcttggactacggctgcgagaagacgacagaaggggtatggttaatgcttatgctaatcatgggcttgttgagaatgctgtgcaaatttttattcagatgccggtgaagaatgtggtttcttggaattcaataatttgctgccatgttcaagaagagcagcaaagctgtgaaagttttccacaggatgtgtatttcaggtgtgatgcctgatgatgtaactcttgttagcattctttcatgctgcagtaacatgggtgatctggcattgggaaaacaagcccacatttacatttgtgataataatattacagtgagtgtgacgctttgtaactccctaatagacatgtatgcaaaatgtggtgctcttcagactgccatggacatcttgtggatgcctgagaagaatgtggtgtcttcgaatgttattattggagcacttgctctgcatggctttggagaagaggcaattgagatgttgaagaggatgcaagctagtggac

SEQ ID NO: 48719 - DNA, 430 bp, Glycine max
  Clone ID: PAT_MRT3847_14C.1
cacgcgtccggctcaattttctaatgatggcagtatatttgtaagtgagaatgaagagttcttaaagaagggaagcaaaccagtccttctaattgaatccacaggtcatgctctccatgcttttgtgaaccaagaatatcaaggttatcctcttacatataataaattcattactttatattttatcaatcaattatcattgtgtgatcatatgagaattgttgatattatgaatttcagcatatgccacttgttcccttgtcttctcttggtaattgtattgtccttcccttgcaaagggttcaggataatatggaacggggggagtgtttagttaattacaaacacatcccgagaagaaaatgaaataaaggggtttcttttttattttgagaattatataaaatctgttattctgagtttaacatca

SEQ ID NO: 48720 - DNA, 195 bp, Glycine max
  Clone ID: PAT_MRT3847_15000C.1
gagcgaaacagagagtgatttcagtgagtgatcagtgttcacttgattacaacaaagtcgtcagagtcaattgaagaagatgccgatcagaaacatcgccgtccgcaggccggtagaggcgacgcaccccgagacgttgaaggcggatttcggcgagttcatcacaaccttcatcttcatgtgcgccggctcaag

SEQ ID NO: 48721 - DNA, 286 bp, Glycine max
  Clone ID: PAT_MRT3847_15001C.1
ttaacaaaacagaacgaatcagcacaggaaagagagagagaaaaacatatggtgaaggctttgtggaagaaggcgaattgaacacactgcctaaatacttcactctcaaatagaggcaaaatgggcggtatcttcggacattaacgacgataagaccatgcatgggtttctcaaggtctctggaactcatgtcgcgagcccattcgctaagtttggggttgcaaaagcttaagagaaatataacaaccgtgcttgagcatgtcagatgtggtgacaacaacatata

SEQ ID NO: 48722 - DNA, 272 bp, Glycine max
  Clone ID: PAT_MRT3847_15002C.1
tacggctgcgagaagacgacagaagggggtacacataatcgtttttctttgaacaaatagtcattatgtcgaaagaacccattttgagtagtgtcagaccctaatttcatccggggactattattcattgatgttttgattctcactggctgaattgcattgttcgacaccagttaccacacaaaacgaagacttgttcaatgttttgatcaagaatacgaaagataccaaaaaggaggggcaaaagggttttttcattatttcctggaccc

SEQ ID NO: 48723 - DNA, 350 bp, Glycine max
  Clone ID: PAT_MRT3847_15003C.1
tccttcattaggggtacctgctatactcttcctaacttcttgcaactcccatgtaaaaacaaagaggtgttaggccatggtaatgattgtagaaacttgaaaccaaggttgttgtaactaagacatgcacaaacacagattgtgatgttagttagagggtgggtaaggggggagggaaaaggcgttaattagttgaggatgattggatcataggatataaggataggataggataggatagaaatgacacatacagcataaattatctattgcatggactttgtacgccgttagctagggaaagaggagtgtcttcagctataataatttggcatttgatgatctgaaag

SEQ ID NO: 48724 - DNA, 1852 bp, Glycine max
  Clone ID: PAT_MRT3847_15004C.1
ggccctgggaaccattttcaagggcgggtgggatggaaaccccccgggggggcctccttcccccccaaggatggtgcccatgggccggtgaacacttcgataaccccctgtactttgattcccctagccatgccctgggggatgtttgaactcacgtgacagtgttgaactggttgtccaagggcttcctcccgacgataacggagtgttggatcacggtggagggggtgccgaagatgaagtcgactgtgccggagatgacgcagttgcggtagaattgcctgttggtctggacgtacaaggtgtcttggtaacccaagatgtggcaaccaacgagagcggacatgtctccttggttcctgaatgcaacggcttggtgtccctcagcaccggcagtgttctggaatgtcattgccttggcaatgaacccttctgcagtgttggcgaaagtggcagtttgcatggtcttgacaccatcgacgaagttcttgcgaccggtgatgatggtcttagcagggccatcaccgtacatgagaatgttctttgaactcttgggaacggtgatgtactcgtcatagacaccagccttaacgtagataatgtatctacctttgttatcctttgggtaggaagcaatagcatcggcaacggttttgaactgaccagtgccatcctgggcaaccacaacattgggcttgacacgtgatctccatccacgacccaaaagcttacgatcagcagcagagaaccaagtgggcaacccatccttgccgagaagacggcgagacgcgggtttaagattaaacttcaacccgaacttctcgaggatgttggacaaaccactcacaatgtcaagggtgatgccagtgagtttctgaacattgtccaaggtctcggtatgaaactgctccttgatcttcttctcaccttctttgccatcgtcaaaaccctccatgcaggcctgttggtacgagataacagcgctgagccagttcttgaagtcagcctgttggttatgcacggcctgcaagttgttgttgtgaaccatgtcaatgctgagttggaggctctcgatagcggattgcaagaggtccttgcaatcatcaagggccatcttggttccgttatcgttgcctccgtactcggtactgagcctatcactcatgttgaaggccctggtcacgctgtccatggtggctttcaccgccttggcgatgtaagcctttggatcagcggtgtccatgcccttcacggagcttagggtttcgtggcagagcttctggtcatcagtgttttggcagataacccctactgatttttgttgagattgaagtgtgggatcctcgcccttcttgttgacggccaccaccacacctatggccactccaaccaccaggatgagagaaacagccgagataattacctttccagacatttttgttattccttttttatttttccggccttagaatataggcttattattattcctcccctttggctgctctgtagctagggggggatatgctcgagccgaattccgagcggccggtaccgacttctgcgacggtctcattagccagcaaatagctgctcagttcacccctgcccaattcctccaggctggttccaacggtggaactgtctggttgaaggctctccatgttcctcatgcacttaacttcatgaaagcttgaaattaaaccgtatatccatcaatgctcactctattaactgagtgttagcgtttgtcatgttgagggtcatagtccgtgtgacaatttgttattctttgcatttatctttggaggtctccggataatatttttaataaaaattacatgatttattt

SEQ ID NO: 48725 - DNA, 924 bp, Glycine max
  Clone ID: PAT_MRT3847_15005C.1
ttgctgcgtgggcgccgacggaacaaccaggaggtgccgaagatgaagtcgactgtgccggagatgacgcagttgcggtagaacatggctacaggaatcgtgatccagggttgcaacatcgtcccagaagccgaacttttccctacaaggttccaagtgaagtcataccttggaaggccatggaagcaattctcaaggacggttgtgatggaatccaccgtgggtgacttccttcaccccgaaggatggtgcccatgggccggtgaacacttcgaagacaccttgtactatgctgaatacaacaacgatggacctggtgccaacgttaacggaaggatcaagtggaagggttaccgtggtcttattagccgcgaagaagctacccaattcacccctgcccagttcctacaggctggagccaacggtggaagcgactggttgaaagctctccgtgttcctcacgcacttagcttcatgaaggcttaattgaaattacacaaacacatatccatgcatcatcaattgagtactgttagagagtgtgatgatgagggtcatagtccgtagacaatttgttattctttgtatttatctttggaggtctaccggaaatatttttaatgaaaatttttaaaattgctttgattaaacaagaagctgctcagttcacccctgcccaattcctccaggctggttccaacggtggaactgactggttgaaggctctccatgttcctcatgcacttaacttcatgaaagcttgaaattaaaccaaatatctatcaatgctcacattattaattgagtgttagcgtttgtcatgttgagggtcatagtccgtgtgacaatttgttattctttgcatttatctttggaggtctccggataatatttttaataaaaattagataatttatttcgatt

SEQ ID NO: 48726 - DNA, 683 bp, Glycine max
  Clone ID: PAT_MRT3847_15006C.1
ccttcttttaacccctagccctatcacgtttttacattcgttcggacatacacattcgctcgagccgaatcggctcgcgcaagcctagctcctcatatcataccactgatttatcttccctctccatcgttcgttcattcattcactctgggcgcgcgcacgtgctaggaaccatcgattcgagaatgggcaacgactgtgtgccgtcgacggcggcggcggaggtcatggcggtggtggccgttgagctcactgacgcctccagctggtggcacgacatcgacgactctccggcgtggcaggatcgtatcttctacactctcgccgtactctacggtatcgtggccaccgtagctttggttcaactggctcggatacaattgagagtgccggagtacggttggaccacgcagaaggtctttcactttctcaattttttggtgaatggggttcggtgtgtagttttcatcttctttcggaatgtgcagaggttgaagccagagattgttcaacacatcttgcttgacgtgccgagtcttgctttctttacaacatatgcacttttggtcctgttctgggctgagatttattatcaggcacgtgctgtatcaactgatgggctgaaaccaaggttctatactattaatattgggggttacggtgggcagaatactttatgggta

SEQ ID NO: 48727 - DNA, 429 bp, Glycine max
  Clone ID: PAT_MRT3847_15007C.1
gcgcgaccagctcactaggaatgcggcctggcactttttttgtgttctttttttttaccaagacatgaaaagactgtgctcaaacactcgcgcatggatcatttaaattcttcccaaactttgaacaagtatttctcgcgcccactgacaaagactcctaaaaaccaatgaatcaatggacaagcctctttatgaacagggggtgtaaactagcctatatggttgggtccataaaagattgccctcctggatttacgaggggttctaaccaaatacgcggatcggaacacatcaatagctggtcggcgtgtgcgcggcacagaacggatgtctggggagcccggccagggaaatctaaggtaactattctgtgtgcgccccgaaacggagtgctggggatagacggtggggggcggggttggattttct

SEQ ID NO: 48728 - DNA, 231 bp, Glycine max
  Clone ID: PAT_MRT3847_15008C.1
cccacgcgtccgcccacgcgtccgacgtatagacatcgacttgaaatgacactatatatctcaagcatttcacacactagcagagccagtctgactatgggagaagagaggaatctacatgcggaggttagaggctgatacagagcctcatcattctcggtgaaccagtaccaatcttctattatcaggggccatgcctcaagacagtactaaccaggatgtcgcatgact

SEQ ID NO: 48729 - DNA, 520 bp, Glycine max
  unsure (1)..(520): unsure at all n locations
  Clone ID: PAT_MRT3847_15009C.1
tggagaggggtttaatattntagggtatgagggtggtnaaagatgtaatttttattatgatgtgtnaaattttggtgaatatggtntagaaaagtagttaaggatggngnnatttttgttatatgggagtgaggttgaggaaggtggggaaagtatgtttgnatttgagaatggnttgganatggatggtaantatgggtttgaggantgnattggtttaaaagtaaagnnangnnaaggggatggtgttgtattttattnattggtaaataatggtgagattggtgtggaatgatttgatgggaggtgggngtgtggtggaaggggaggaagggggtggggtgtaggaggtgggtggggggatgagggtggggggtgtttgtggtgatttgggggttgggggtgggggattggggtgggggggatgggatggggggggngtgggtgggggatgggggtgtgggggggggtaggttgagtggtagggggatggtttgttggtggtgggggggtggggttg

SEQ ID NO: 48730 - DNA, 478 bp, Glycine max
  unsure (1)..(478): unsure at all n locations
  Clone ID: PAT_MRT3847_1500C.1
cctggcatcttcaatttggtggctcttatcctgatacatacataataaatagcttttattattgaaattggcttttgttttaagcaccagataaaattaaaaaaaaatagtgttgattttgagccacatgaatgactgggcttataattagaaatttagataatattcaaaggtaataacaggagtagtgtcagttgttaatttgagcatatatatttggccagcagaactgaatgtttcaatcaaatttgtcatacactgttgtttatttttcatgattggttatgttagaatatgtatgtgattattctctgaactttgaagtcttgcttattgctatggaaccaaaacatggtaagaggagagattatctgctatactgtatgatataccaaaaagacttccatacatcaatttttttgttcctctttcccaccttctncctatcttnctcttttcagttctctcttttagccga

SEQ ID NO: 48731 - DNA, 190 bp, Glycine max
  Clone ID: PAT_MRT3847_15010C.1
cacactttatgtaactggtctatcttctagggtcaccgaaatatacctaaacgagcatttctccaaggaaggaaaggtttctttatgttttcttgtggtggaaccccgttcacggatttctcgtggttttgcttttgttacaatggaatctgctgaagatgcggatcgctgaatcaagcttctcaatcaa

SEQ ID NO: 48732 - DNA, 541 bp, Glycine max
  unsure (1)..(541): unsure at all n locations
  Clone ID: PAT_MRT3847_15011C.1
agggcatgtacttctcctaagncnnncnnnnnnnntnnntnnnnnnnnccnnncnnnnnnnnnnnnnnnnnnntgtngggnnnnntnnnnntnnnnnnnnnntttttttttntnnnnnntttctnntttttttgggtggggttttttttttatttttttttttttatttttcctttttttttttgtttaagttttcctaagtccatcattctacatgcaatccctaaacgcaagaatcaccatcaagttgcgttggctcttcactgcctaacactactatagacctgcactccgcatcttgttatctcttgcccttcttagagacaactgccttcttacctccctttctccatacaggtaccttacgctttttccgcgctacttacagtgcttgttcgcaccgtaaagaaactgccaaatcgtttctgtaactgcccacttttacattattttagtctcgcaatggctgacaccacacggtcctcctggaagccatgtttcttgacttacaagaccaccaactcagtctcccttggtcact

SEQ ID NO: 48733 - DNA, 499 bp, Glycine max
  Clone ID: PAT_MRT3847_15012C.1
tttgacaattggcaatcgatgacattagtgaaccatggttaattaacttcaatgcttgctctagtagtatatagctcctctattttcttcaatatctctcatcttcctttcacatccgctcattaattaattttctcatctttctcctcttcacaagtaacaataacaaaggcgatgacacaaattctactgcatgggaccctccaagtcacaatctatgagctggataacctcaaggctggaagtggtggtaatattttaaccaagttggtacataacatcgaagagactattggtattgggaaaggaattactaaactatatgcaaccattgatctagagaaggcacgggtgggaagaaccagaatcatagaaaaggagcacacaaatcctaaatggtacgagtctttccacatttattgtgctcatatggcatcaagtattatattcacagtgaaagatgacaatcctattggtgcaaccttaattggaagagcat

SEQ ID NO: 48734 - DNA, 103 bp, Glycine max
  unsure (1)..(103): unsure at all n locations
  Clone ID: PAT_MRT3847_15013C.1
gacagttgagtgggtcnagagggaattttgattaccanaagctgtggaagactccatcaaatcatgggtttctgctcctgtacaaaccctacacctacattat

SEQ ID NO: 48735 - DNA, 446 bp, Glycine max
  Clone ID: PAT_MRT3847_15014C.1
aggcataacgcctcgttctgcccacgcgccgaattctagggcctctatggcggctccgccgacctgatgggtcttttacgacagccgatgtgagttcgctcaacaaaccgtcgcagtatatggaaaatctggtctcactgactaccggccaccttcagcttgaccggaccggctttccttgggcaccaccaccacttagtacgacagagacacccctttctccaccatgtaccgcggctcctccttctacgggctcgacatcaccggcatttccgtgggcggagccaaacttccaggatcctcctccaccttggccaccggcggtgcaagcatcgactccggaaccgtgatcaccggacaaccccggaccgtccacaccgaactccgctgcggctcaggcaaggcatgtccaaataccccttcgccggggaagccctcatactcga

SEQ ID NO: 48736 - DNA, 492 bp, Glycine max
  unsure (1)..(492): unsure at all n locations
  Clone ID: PAT_MRT3847_15015C.1
ccnnnagaggcgtcacatacggttagttgatctataatgataagccggcccctctgcgctgcgcatagttttatccaatttctctataaattcccccattccctgggggggaccccgtgcttctctacatcctctcaaaaaaaaacaatttgctccaaacatgggggctaaatctcggatctaacccacacttctgaaaaataagaggtgtgtgccatgcaacccagaaggacttgccaccattgagtgaggatgcggggctctctctaatgccacccgctgctgagtggaatttgtttttctaagatggtgttatgaacctgaggggggcatgggccgaaaagactctccccaaaggattggaatttttcatgataccaaaatggtcttgctgaaagtgaagggcattattctgatcttgaccctggtggctggaataaagataccatatatatttggactcattctgctggtggggtgacagaaaaagat

SEQ ID NO: 48737 - DNA, 331 bp, Glycine max
  unsure (1)..(331): unsure at all n locations
  Clone ID: PAT_MRT3847_15016C.1
cacaaggccaaacaggagngacanccaccncncggcagaggaagaagccaccanagaggcaaagaccagagagggccnnganggggncgcaccacaacgccacacaaagccncaacgaagggacnanncagcncaacacggcgangccnncnccaaggcccaacacncnncnnnaacnanaccagaannaacacaannccaacnccnccagaacgaaccccaagagaagaaannggcgnacaanggaagncaagnaccggaagaacncgnggaaacagagnannaccaagaacncaacagcgnggacaaacaccaccanacgacgggaaca

SEQ ID NO: 48738 - DNA, 401 bp, Glycine max
  Clone ID: PAT_MRT3847_15017C.1
agaaagaggaattaggttattaattagagagtgtgaaaaggaagagtctcattctaataggttttaggttagggcgatagagtctctcgtattcgagcatcatgtgttcgaggtcgtcgtcgttggtgacgaagatgagagcgtcgaggtcttcgccggcgagcttggagaggaaggcggggaacataacagagcggtcgacggcgaggatcgtggtgtcgccgacgacgtaggagagctgattgtcgtgggtgcggggctggatcttgcaggacaaattcctctttaagggaatcatacggatttcgtttgaatcatatcctctttatacggatcattttacatcaataaaattaccctattttaattctttacattcaatatgcccaacaggtaaaatc

SEQ ID NO: 48739 - DNA, 266 bp, Glycine max
  Clone ID: PAT_MRT3847_15018C.1
attagatgctgcaagaattcacagcccggccttatatatcagacgattgttaattggggggcgggacgtgtatccggtactgaggtcaactgtatacaccctcgtccgttcatgcttcattagtggcttgctccatgattgggatcccagggcaccataggaagccttccaattccatattgctatcctcggctgacatttttgatcttgcgcattcctctaaagggcatcaatttattccagtaagagatagtcgaataattcct

SEQ ID NO: 48740 - DNA, 606 bp, Glycine max
  Clone ID: PAT_MRT3847_15019C.1
ccacgcgtccggtccctttcattagctacgctcaggtttcaccaacttcgcgtcgggttcacttcagtgaaatcttgttaaagcaaaccaacggttggtttaaccttaggacggtagcgaaaggaaccttctagctaaccgggtcaattcaaactcactacatactccatggaattgagaacccggcgtaattggttttctccagcggctctttttcctatattctgatggccctgctacgtctgcccactacagaacaggcctgactcccgtgagcaggtccgctggctcttagtatggcttttgacttttctgatccggcatgataacaactcgaactcaacttctattctttcaagagcaagagaagggcaccgagatcccgcgtaagcgtcgtttgcccgttgccaataggatcgacttgggtagtaagattcaattgtgagattcaaaaatacgaaagtaaggggccggaaatcttgggatcaaaaggttgttctaaaggactgtaaatccttgctcctaggatccaagaagggctttttggttttcaaattcctaattacataacttactaccctactagtgtagtgtctactgactgag

SEQ ID NO: 48741 - DNA, 483 bp, Glycine max
  Clone ID: PAT_MRT3847_1501C.1
aataaaaattctcattctcattacaaatatcattaaatagcacaaaaggtataagattataagaatacaagtctcatttcaagacaaaagtttgatttcaatgcataaattttcctaatgaatttttcatcttaaactttaggcacatctcagttcttgaacaaaatcaactaaaaagtttctcctcttgcagtcttgctcatcttggttcttgcttcctatctttgacaagttacaatattgatgcaattttaaatcctttcaaaaatctcatttcaatacaaaagtttccctcttgtgacccaacatgcagttgtagttgtgaaaagaaaagcttatatagacaccaattttagtcttatgacaacaaaaacattggatgattaaaaaaagcaaaatttaatatctttgaagataagaatccaaaaaatctaaataaaaaactggacggattttctgaaatttaggaaaaatagaaatttt

SEQ ID NO: 48742 - DNA, 427 bp, Glycine max
  unsure (1)..(427): unsure at all n locations
  Clone ID: PAT_MRT3847_15020C.1
ttatantttttttttttttttttttttttttttttttttctttgaaaagaggtgcggaaataaccaaatcggcaaaggttcccaaacaggggggcagggccaaacttcctttgtggtttttaaaaaaaaaacacacggtggataaatcaaattcctattcgtgcccaggttccccatttaaaaaaaaatgggcctccactttaagcagcatataatgcccgctttttgggatctcctgtcacagaaacccccggaaaatttcccactagagggggaacctgccggcttgaccggcacggggggggggcaacataggcggaaggggagtggctttgccaaataataaccctcagtcaaacacgcattgtgggtaccaaacacccaggttgccacaatcagttccaaggaatgagctacaaattttccc

SEQ ID NO: 48743 - DNA, 347 bp, Glycine max
  Clone ID: PAT_MRT3847_15021C.1
cccccgcaaacgaggaagtattacatctctaacacttacaatgcaacccacgataaaaggccgcactaaataccaagcgtaaaagaaaagaaaacgggtgaagtgttcctgaactagaatcaacgaatctttttttttaatagaatttttgttagaattacaaccatctttgaagttgatagagagaataatcaacactggcttccggttgccgcctaaaacaacacaagggtcttcgccatctttttcaaattgtaacctaagttacacagcggcggccgtggaaggggaattagagcatccaaagagtttcgttatgaactagaatctttgctttgccgtgggat

SEQ ID NO: 48744 - DNA, 427 bp, Glycine max
  Clone ID: PAT_MRT3847_15022C.1
cgctctcgcgtacgccaaagcatcaggaggccctgctactgtggttagaagagcaggtaggttgtcaagcacaccgttttataaaactttatgtcgaacgctatggcgaaggaattgtcatttgcttacaacatccccgtgtacgatcacctactggaactaatggtgttactggtggtgctaacggactggctaacccagtgtttatgcctgtgtaagaggatcttcaagagaacctagtagatgatttaatacgttagtccatagaaccgcacggatgcattaatagtggaatgatctgtgaaatgtgccatatctcttgccggcactatggcatagcgtctaacgttctcgctatagatgaggacataggggatgcacttgtataacagtctccactatagcactcacttgttcaaactgatgc

SEQ ID NO: 48745 - DNA, 700 bp, Glycine max
  unsure (1)..(700): unsure at all n locations
  Clone ID: PAT_MRT3847_15023C.1
agcgcgtccgcggacgcgtgggcggacgcgtgggtttggatcggaagcgaggagaaaagttgattttatgcaagtagggactaaaatatctttatttttttttttagtagaaatatgtgtgtgtgcatcaatgccatcacatatgatattcgtaccaacaaaatgaaaatggtagggaggcagctaagtactgtaatgatactgctttggtgtcttcattttcatgtccaaagttgtcttggatttgaagatggaatcagcagatgtcaattcccagaagggttcctcttcggaacaagcacttcctcttaccagattgaaggagcacctgggatgtttttagtaatacaccaggaaaaataaacaatgatgagaatggtgtcattgcagatgatcattatcatcgctatttgataagtatcagcttcatattaacctgcatttattatatactccgactcatttatgacttaaccgctggccttgacattcaacaggaagacactgtgttaatgtcgtctcttggggtaaatgtatatcgattttctatttcatagacaaggattctaccaagagggatatacggngacataaatccaaatgggataatgttctacaacaagattatagacaatctgctgcttaaagggattgagccatttgtgacaattcaccatcaggacttgccacaagaactgga

SEQ ID NO: 48746 - DNA, 799 bp, Glycine max
  unsure (1)..(799): unsure at all n locations
  Clone ID: PAT_MRT3847_15024C.1
aaattcgagtgtctttactgctgagaaatatgtcgacatggtagttggtaaccttacaactgtgatcaaggggattcacaagacaggagggaggaaatttggggttcttaaccagtcagctttgggttgtattccattggtcaaggcactattaaatggatctaaaggttcctgcgtggaagaagcttcagcgctagccaaactacataacggtgtgctttctgtggaacttgagaagttaaagaaacaactagaaggatttaaatattcatacgttgatttttttaacttatcatttgatcttatgaacaacccctcaaaatatgggttaaaagaaggcggcatggcatgctgtggcagtggcccttacaggagatattatagttgcggaggtaaaagagcagtgaaagattacgagttatgtgagaatcctagcgattatgttttctttgactccattcatcctactgaaaggtttaatcagattatttcccagcttatgtggagtggaaaccaaagtattgctggcccatacaatctcaaaacactatttgaagaataatccaatcatgttcagataaatgtcatagttctctctgtgggtactgataaataaatgatgaaacaatgtaatcagcagttacaattgtaacatcttgatggattaaagaaacaatacttttttttttgcacagcaaaaacaactgatatattataagaaagagtagtgctttaccacaagaaggggccaaaaaaaaaaaaaaaaaaaaaaaannnnnnnnnnnnnnnnnnnnnnnnn

SEQ ID NO: 48747 - DNA, 108 bp, Glycine max
  Clone ID: PAT_MRT3847_15025C.1
gttgattaggtgcctataagacttgagcgtgccgtcgtaagcggattcggtgagttgtttacttttatatctcgcactgacattaccatccatctcattacacacacc

SEQ ID NO: 48748 - DNA, 196 bp, Glycine max
  Clone ID: PAT_MRT3847_15026C.1
tttaaattttttttatgtttttttaagatgcatatgaaaacaaagtctgatgcattacgacacctgttgagttacgacaagacaaatgaagttctatatatcaacaccggcttttgccatttcacgctagatgtatgtaattaacgacgcgagggtccaacctcatttaaaaaaatgctcatttcttcatcaagta

SEQ ID NO: 48749 - DNA, 411 bp, Glycine max
  unsure (1)..(411): unsure at all n locations
  Clone ID: PAT_MRT3847_15027C.1
nnnnnnnccttttttttttttttttttttttggttttttttttttttttttttttttttaaaaaaaaggggcggattaggttttttaatctaaaccaaatttccattggtttggggggggccaaccaaccaaatggcaaggcttttttaaaattttaaaggggggggccataagggtttaatttttcagcaaaaggttcttgccaaaaaagtaaacgggggtaatcggaattttccggggggacccccaccccctacaggggggggggcctggccataatatacagaggggttgcttttttgctccaggggccttacatgggcttcctaaataccatggggggggttttgctaaaaagttgaaaatccagccccttatttgtttccagggccccttttccttttaattggc

SEQ ID NO: 48750 - DNA, 486 bp, Glycine max
  unsure (1)..(486): unsure at all n locations
  Clone ID: PAT_MRT3847_15028C.1
ggaattcggcacgcccacgcgtccggggaaatggggtgtgttattggagtgagattggcatcgttcttcaccggtgctgcagcggcgtcgtttctgggcctctacagcctccacaacgattacaagctcgcgcacttatactatattcaacggatgaatggcctccacaaatcactggaaagtcgaatttcttccttggaaaaactgaaacaaacggaaacttctgaacaggttgaagcaacaaaataagagttcagaccgaagcatccattgtggaaaattttgattcaatgcactatgaaaagtgagtttttggtttgctttcctcatgaataagttcaatttgactcatttaatggcaccacatctgactgaactttttcgtctaaagagtacagatcagtggtgtcaccaaatgtagtttggattattttttggccaagagattttagctttcaccgcggttagacatggtaattannnnng

SEQ ID NO: 48751 - DNA, 602 bp, Glycine max
  Clone ID: PAT_MRT3847_15029C.1
gctgaaaagatttattatatataatatgtaatgtatatgttcgtcttctaatttcaatttacactacattttcaagtttcatcacacacactcgtaaattacaaccagcgcaataccctgtatgtcataaaggagccgatttggagctcggggtggatgttgttgatgagctctcatccttcttttgcttctgcagaaaaaaaaaagaaactattggcaatttgataagacacataggcacatagctacgggtagcactaaagggcttgcatctgcatattaagttgtaagcaaactcggagttgtaaagttgaattgatgctaaagaaagaaaagagggttgagttgggggtaaagagagaagagaaaggaaagagattgtggtttgaatccttccattaacaactaacatatatatgtgcgataaaaaaaatgttgtaaacagactctatagttatgattgtgtttaggggtaactgagcaatagcatatataccatccgtgtttctgtgtccccgcaaaccttgtccaattcctcaaaaacaagctcaatgggtggacgaccctttgcttgatttgggaacacacaacactgcaatctg

SEQ ID NO: 48752 - DNA, 325 bp, Glycine max
  Clone ID: PAT_MRT3847_1502C.1
gtggacaaaactggagattggatcaggcggattcaaaatatctccaaggggggacttgtcgagagtggctgcttggaagaaaggctgattaatgggtaagattgtgatgtctgggaatgcaacagtcaaaaggagagattgggcctcattggtactagtatttttaacaaacagcaacagcacagagcattatgatgcgtgtaagaggacaaaatccgtaccacgtaccggggcatagatctctacaattgaggggttaggtgccactaatggataggcctggagcccatatggctcgctgaattaaaggactgggcctgggaaa

SEQ ID NO: 48753 - DNA, 704 bp, Glycine max
  unsure (1)..(704): unsure at all n locations
  Clone ID: PAT_MRT3847_15030C.1
caaaagattcatctggggtggcctgttaaagaaactggacacacactgcgcacgggaactattcatcctaagaagccctctaaagctctatttatgcaggttttggatggacaaggtgaaccgatcaatggatcaattacagaagatggattagagttgagtgaaaggaatcatattgaggatgcaacaacaaagcaactgtacattttgctttgttctgagaaagctntatatgtctattcattggtgcatgcgattcagggggttaaaaaggtgctatacaagaaaaagtttcattcctctacgtgttgctgggcatcaacattttgcagtccttctgatgttggccttatactcattttcactagtggaaaagtagaattaaggtggtgtttttctcagtctgcactttatttgagaacatatgatggtgcgaaacatatgaaaagacttaacatcatttgttaaaataacgactcaatgccgattttgacttttgaggatagtatcagtgacaaaaaagaggaaatttttatatcattgtttgtaatataatgctaatctcccaccatttgctggcataatcccagtgtgcttttcaagtcaaccaagcaaaatgcataaaatttatttgaaagtttttgctacttttatttngtcttggagataaagaaagtagtctcaacaaatagcatgaggtcaac

SEQ ID NO: 48754 - DNA, 516 bp, Glycine max
  Clone ID: PAT_MRT3847_15031C.1
ggaattcggcacgaggaatgtggctataggcattaggcaaaccacatgcactcattctataactatttgtcattaagtgccgttcaggggccagcttgtaaggatgttaagagtgggagaggcaatcaatgcattattggattctgtatagcagcttaaataaatcaaactctgatattggattctgtatagcttaaataaagcatactctgcattgcattttcagttatccttcattgttcatatttcagaggatcccagttctgaaacattttatcttggaattccatcaacagttggcattgaaagtgtaaattttcaatctcttactttcagtgaaagattgtcaaacaccttaatgttaggctctacatacggggtcacggcaaacaagtctctcagaaaactggcttcgaactgaggacttagagcttcaaaactatacttgaaggcatcaagtctctcagaaaactggcttgcaatactctctaacatacttttccaatacactctttg

SEQ ID NO: 48755 - DNA, 1115 bp, Glycine max
  Clone ID: PAT_MRT3847_15032C.1
gaaaattaatttctgtttcatttgattataatgataatatatgaagataattccatgaccaaattataacggggaccttctcattgttctccttctattttgtcttgactcccctgtttcctacccactatatgttctcaaattgccaatcatggggcgcagaaacacacagaactattactaacaatgtgaaaaagaaagccaactctatcactaagtttcaccaatcaccacctcctctggttggaaaagttcaattctgtgtccctaccaagttctgcagacttctgaagcttactcatcacagcattcttaaaattgatagcttcttgaatctgagagcaagacctttgcattctagtcccacttaaactacacctagactccatcatctcgttgagggtaagcctcttctttggcccagctggatcggggcgttgctttggagcactatgagacctcaatttggccttgaaagactgagtgctggccatgtagtttggaaaattgtctgatactgcccatagaagaagttgttctcggtgcaaacacttttaggtgtcatactcataggtgcaacaacaacagatccacagctacaagagttggtaaatcgtggagtgctttgcgctgtggagaatctgcactcttctcttgttaagccccattctgagtcgtggtagttcctgtggcttggtatggacaaatgagcaaatggaagaggagaaggaagtgcctgaaatgatgggtcatcgccaaaatctgacattgaggtgttgctcctgcgagaccttgactttggcctgccactgccagtgtccacttccactattttggggctcccatcaaaaaagtttgcggacgtgtgggtcgagaccaaaattcctgcaagccagccgcagtggaagggcgccaagaccccaccctctcggtgagggaaagcctccacggaggcccgggcgggtgggggcgacgcatgggcgccctacgagcgccgctgaggccgcgagatttcctagccgctggcgatgcaggagggcaaattggcgcgagcctgcccagcggggaagctgctgccggcgcccgcaccaagagccctctcacaagtgcttgta

SEQ ID NO: 48756 - DNA, 255 bp, Glycine max
  Clone ID: PAT_MRT3847_15033C.1
ggtaaatgatctgatacgtgtgatctgtatacacacatggttgtaggggaatattgaagtggagcttactatttcaatttcaagagtgatgttataatgatgatttgagattgcttcatttactgttgcaatctcttttgttttgactgcgcgacctaactatgttttaaaacgctcaaggtcccaacaataatcaactgggaaccttagttaaatgatcttattgatcaatcaagctggataatatacatatat

SEQ ID NO: 48757 - DNA, 813 bp, Glycine max
  unsure (1)..(813): unsure at all n locations
  Clone ID: PAT_MRT3847_15034C.1
actgtacgcatggcacgtcgtatcgtcnnagctcgtgaattcggcttcgagcgcggagggtatatactatttngctacttaagcaaagcgggcctgacgagtgatacatgtcttgaaccgtaacttgcataagaatgtgaagggcgacttttgacagagtaaaacaatatctcgagccgaatcggctcgagagcacattagtgaatatgcttgttctggtttgaggaccttactacttgcagatcgtgaacttaatgaggaagagtacaagaaatttagtaaagacccacgcgtccgcaagaacttagtaagtgaagaccaggagcagattgttgaggggataatacaaaatattgagaaggatttaattcttcttggtgctactgcagttgaagacaaactacaagatggggttcctgaatgcattgacaagctagctcaggctgggattaagctatgggttttaactggtgataaaatggagacagcaattaatattggatttgcttgtagtttactcagacaaggaatgaaacaaattataattagctcagatactccagaaactaaatcattggagaaaatggaggacaagtctgctgctgaagcggcaattaagtcaagtgttcttcgtcaactaagggagtcaaaggcattgctttctacagcagatgaaaactatgaggccttagccctgatcattgatgggaagtctcttacttatgcactagaagatgatgtaaaggacttgtttcttgaacttgccattggctgtgcgtctgttatctgctgtcgttcatctcccaaacagaa

SEQ ID NO: 48758 - DNA, 272 bp, Glycine max
  Clone ID: PAT_MRT3847_15035C.1
atgtcatttgcaaaggaatcatttgttcatgtgccaatcgaccttcttcaagcctctagatcgaaagggcagtgtgatagactttcggtaataggggttatgtcgcaatctgttgatctatttaatgcctcaaaaattctcgcgactgaattcagggcagaacacggtaacatagagttcagtgttttgcatcggattaattaaaatttgttggcgaacaaagacagagacatatgagccataaaattgaaattacttacccgtgttggcga

SEQ ID NO: 48759 - DNA, 407 bp, Glycine max
  Clone ID: PAT_MRT3847_15036C.1
ttttaaagaaacatggcatcaacatatagctattagctaccatttagcagaacaaacagatctttaatatcacaaataagcacacaaaattgaaaacttgaaaacgaatttgcaaaaacaaaattcatgactaccactaggaagtttagtatccaaaatacacccattttggaatatttgattatatctgttcggagcaatgtacattaaaaccctttaatcaagaggactgtctatatttttaaaaaaaaaaaaaactaaagggctgcaagagaaaaaattacaccctgcctcctacaagcaagttcaagttgatttttttgggtaaatcagcatcttcttgaggttaggaatcttccctcttctccattacttgctgaacaccctcttggtacccttccatgaaa

SEQ ID NO: 48760 - DNA, 308 bp, Glycine max
  Clone ID: PAT_MRT3847_15037C.1
aactaatgtgttttttttcacttttttaatgtttaagattttgtaagtattttaattttttttttttatttttgttgaggtattaaacgcttccaaggggggaaaaaacgaaagatatgttaacgccccaaaaacacgggggggaaaacatcatcctcgggccaacaaaacatttttccacaacatacccaataacaaaaaacctattgtttgtcacaggagaaactgaatcctccacaccccccccaaaaaggaaaaaaaaaatttccacacctgtccccaaaaatgaagccacccaatttttctct

SEQ ID NO: 48761 - DNA, 215 bp, Glycine max
  Clone ID: PAT_MRT3847_15038C.1
cccacgcgtccgtccacgcgttcgacgacgccagcgtgcggctgctagagacaacagatggggtggcacatgctgaacagggcaaacattaatcttaactacccatgatatagcatgcctcctagacaattattgctatcctatcgtagacgagagcactaaggacgccacggctggtggacccgttcgaactcggatagggtattgaatttgcc

SEQ ID NO: 48762 - DNA, 182 bp, Glycine max
  Clone ID: PAT_MRT3847_15039C.1
ttcccacagaaaaatccttccaactgtgaagcagagtaagcactttatgtagattgatacatgcataggtacattgtgtctcaggttcataggccatatatgaattgttttacttttgttaatcgtgacgcaatttatacattttaagacgttgaatcctacaaagtgaaatctggcatagg

SEQ ID NO: 48763 - DNA, 356 bp, Glycine max
  Clone ID: PAT_MRT3847_1503C.1
ggagaataaggatcaagcggcagacgtggcttcaaattggggaatccgtctattcggcaacatagtcgacacacggagcattcggtctgttcatcaccgtcaccgttgcgcgcaccctctgttctaacgactcctaaatagcttgagactttgcttccacttcatctttcccagatcgttgcaccctttgcttccatatgcacacgtctgcgccgttcactgtctgcatggaataagcatcaattcacctgtttgatttaccacatcacatggtatcacatgcaacagattgatgtctcaacaagcatgcctacttcacacatgatgaggactgttctcaacgttgtcgatatctc

SEQ ID NO: 48764 - DNA, 1425 bp, Glycine max
  Clone ID: PAT_MRT3847_15040C.1
tacggctgcgagaagacgacagaaggggacaaaaaaaaatccaaaacagtaccttgccgtttattatcacacaagacagcattacccttctattgttatcatcgacattcttaactcttaagaactgattcaccaacgacccctctgaatttcagaaactatcaatgaagggggaagtgcagcttcagcctccagcggttatgcaaaaccctagtgattcggaccctttgctccataaccaggaggaggaggaggaggatgagtcaccgggaagctctggtgagatcaagaatgaggaagaagacgttgaggctggattactcccctgttgtcgaatttgcctcgaaagcgattccgacccagaggatgaattgatatctccgtgcatgtgcaaagggacccaacagtttgtccatcgttcatgtcttgatcattggcgctcagtaaaggaaggatttgccttctcacactgcacaacctgcaaagcccaatttcatcttagagttgaatcgattgaggacaacacttggcgtaaaataaagttcagactttttgtggcaagggatgttttccttgtttttcttgcagtacaaactgtgattgcagctattggtggctttgcatacatcatggacaaagatggttccttcaggaactcgtttgatgatggttgggataggatactgtcaaggcatcctattccattttattattgcattggagtgctggccttctttgtattgattgggttttttggcctcatactgcattgctcctccctcaatagcaatgaccccagaatggctggctgtcaaaactgttgttatggatggggcatcttggattgctttcctgcatcaatggaggcgtgctttgcccttgtggttgttttcgttgtcatctttgcaattcttggtatagcttatggttttcttgctgccaccatggccattcaaagaatttggcagaggcattaccatatcctcaccaagagggagcttacaaaggaatatatagtagaggatcttggtggctgttatttcccaccaaagttggacccagaacatgaaggtcgcttgaaaatgctcaagctcttgtaattacggagcacacacctgtaaaaatgtttttgaatgatttataagtatcaagttgatgctttatttgaccgttacagtctcatgattagcaaccttgtttgctagtgcttggaaatggtttatatcattgttttttttttaaacaaagaatctggatccttgccagattctgtatactggaaaatgatgaaaatatatgctaatatttgtccatacaccaggatatacctataatgtatccatcgcaattgtcatatgagtaatgaaaagtggatacctcttcactccaaacagcttattaatacatataatttctgtctaaaaa

SEQ ID NO: 48765 - DNA, 327 bp, Glycine max
  Clone ID: PAT_MRT3847_15041C.1
tgcagaccgagctagctagctggcaagcatgcacagaaatggaggcagggcgaggccatactctgatgtgcttggcacgtgttttactcttcctctgagctctaaccctatgcgctgatcacggaagcaccacggttcaagacatggcgagaaagtcgaaactcgtcggcaacgtgcttctgagcacggagaagaagttcaaggcattcatggagaattactggaggagctactccacaaaggatgtgtatctgcgccgattcaggattctctaccagatcatagtcacagcgtcggagcatcagactctggaccccatcgtcgatc

SEQ ID NO: 48766 - DNA, 610 bp, Glycine max
  Clone ID: PAT_MRT3847_15042C.1
ggctcgaggtttcttcttgctaggttaccccaaatctttatggaaatctagttgcaaatactgcagcaggcattgctggaggcactggagtcatgccaggaggtacggttgttagttactactgtattgtaacttcagtgttctcatctgattatttgcccttttaaatacctccttgcttgtttctaccatgttatcaattttttgactaatgttctgaacttgaaaaaactaggctgtgtttaattgtgtacacatgtctagatcattattctgcatctaagaagcattttcactcattgaaaaactttgcaaattaaggcatcgtattgcattagacatttagactcttcgatcatataggacttgtattaacctgggcacacacttttatacaataatatgggaagtactagagatgacagctttcattgactcattaagaaggtaatggagttgttgatggcagtgacaacagaagtagctgtagtgatatgatatcagtgaaatgaagatgttagtggccgtgatgggaataagtgattattgagaaaaaatattctctgtactcaaattacttattgtgcttgacaactacaaaccatgcata

SEQ ID NO: 48767 - DNA, 392 bp, Glycine max
  Clone ID: PAT_MRT3847_15043C.1
cgggtctgcacgcttacttgtgctcggacgtcctttcgagttttattttatacgaaggactctatgggacctatgtctcccgattcggtagcgggaagtacgaagaacactacgctaatttgcgctcgaacactgggatgaacacttgaaaagatggggatagacgtggcacaaaactacagcgcgtaggcgcgagccttagagaaattctattgggttctaagaacaccttggacacttataccgatcttagcgcttttattcaacaccgctctttacccttggtgttcacttacaggcaccaatggcaaggatggcatgtatgatggtaaccacaactactccgatcgttgcacttcgggtagacacggtgttgttagctgatcacattg

SEQ ID NO: 48768 - DNA, 182 bp, Glycine max
  Clone ID: PAT_MRT3847_15044C.1
taagtaagctaggaattaagctcctggttaaagataggataaaaccccaaaaagcccaaaaagggcgcacaccaccagcctcatataggagctatatgcattcatcagtgattaccagcagacacaacacattaggaaaaccgtgatgcgactgcgatgtagatagagatggagtttacaaa

SEQ ID NO: 48769 - DNA, 350 bp, Glycine max
  Clone ID: PAT_MRT3847_15045C.1
gccacatctgctttaaaagcctgtacttttgaacctctctcgtgatcactctaatatggtgggggtggttttgaacgatcgatttgtgaagaaggtgcgcgtgaagtgcaacgacgatgataccatctgcgaccttaacaagcttgtggcggctcacactggctcaagagccgtcaagatccgcatccagaagttgtacaccatctacaatgatcacattactctcaaggattacgagatccatgaccgcatgtgtctcgaactctactacaactctacacaacaaggtgtgccttatgcgtaatatactatgtgcttctaatgggataagcgcttaatgtaattctgac

SEQ ID NO: 48770 - DNA, 316 bp, Glycine max
  Clone ID: PAT_MRT3847_15046C.1
agaacatggaagcaacgttgctggaaacgagtgggcacatcatatctgacacttgtcttaaaaagttgtatgtttattcttgtccagaaatgaatattcccatgagccgttgctacgatttccttgaatcgttgaccatctgtgatggctgcaactctctaatgaccttttcgctagatttattcccaacacttcggagacttcgtctttgggagtgtcgtaatctacagaggatttcacagaagcacgctcataatcatgtgatgtatatgacaatcaatgagtgtcctcaattagaattattgcatatcctcct

SEQ ID NO: 48771 - DNA, 154 bp, Glycine max
  Clone ID: PAT_MRT3847_15047C.1
atcaaactgtggtccaacactttcatcacaaggaagcagtcctgatgagagagggtacattggcttgcggaaaaaccctgctgtaaaaacttggcctatgaaaacatgcggacaactggcaatgtgcccacatttttatgcccatcgcctcttc

SEQ ID NO: 48772 - DNA, 409 bp, Glycine max
  Clone ID: PAT_MRT3847_15048C.1
actggattgaaaacaaaatttaaacaccatatggccgcattcagttgaaaattatattttaacttccccaattggttaccaacagttgtaacatttatgggaacattgaagttaacttttaccaaacttatttttaaagggtatttacaaaccctttccacttaactttttttttaaaaaggttggggaaattccaccatcgaacttcacacagaaataagttccagcttaaacccccccacaaaaacgcaacaccaagtgcaaagttgactccttctggatggttgagtcagcgagggtccttccatcctctagctgtttgccagcaaaaataagcctctgctggtccggtgggattccttccttgtcctggatcttcgccttcacattgtcaatggtgtcggagctc

SEQ ID NO: 48773 - DNA, 433 bp, Glycine max
  unsure (1)..(433): unsure at all n locations
  Clone ID: PAT_MRT3847_15049C.1
tttctctgcaatgtaggtaggatgcaggaaagagagaagcacaaataatgtggtatacgtggcaagatctgtattgttcattttcatctacggttcatgtttatttaactctccaattttttaccaatggagaggatccatttcccttgttctcacttttgagggttaagtgcttcaagggttataagaatatgactatgtctattaaatatgattcaattagagatatttctcttgtgaaagataactcgtatcaaagctaggttggtgaagatttatcgaatcaaacaaggggaaacaacttttgttctataagttagttttaatggatgaaaatgtatgtttttggggttctgtttatatttattgaaggcacgagtaggtctcgatttactcttctattagntttttggtttttcttttggtttggatg

SEQ ID NO: 48774 - DNA, 1696 bp, Glycine max
  Clone ID: PAT_MRT3847_1504C.1
acggggtcctttgttctttccatttttcttttaaacaattaagcttcaacaatgtcatgaggtaagtgtgtaactgcagaaatgtgcattccactttggtccgtagggtttcctatccaagtagtgcattaatttcgttttgacgtttcacagtgtgacttttcaatgtgaatgatatcatagagggatggaaccatgtagttaaaataattatgcttatcttagttaattaacaaggcaaaacaccaaagaacaaatagcattgaaagataacaagacatcacttatttgattgtatgtaacactgtctccttgatctaatccaaaacgtacacaaagttcaccaacttgagccagttaaaagttataaactcaacttataaggatttgtttgttccaatgcgagaggattatatggagtttggagaaagcacaaaaatcaatcacaagatggaaaatgttgaaagagaagaagaaatagacccagaaagcaatccactgaatgagccactgctcaagcggaaccggacactgtcttccaaccctcttgctctggttggagaaaaagtttcctacatagaaagcttggactatgagataaatgagaatgatctattcaagcatgactggaggagcagatcaagagttcaagtgttgcagtatatattcttgaaatggttactagcattccttgttggacttctcactggtattatagccactctcatcaatcttgcagttgagaatattgctgggtataagcttctggctgttcttaaatacatccacaaagaaaggtacttgacgggtttcctatatttcacgggcattaatttcgttttgacatttgttgctgctattctctgtgtgtgttttgcacccacagcagcaggacctggaattcctgagatcaaagcttatcttaatggtgttgatactcccaacatgtttggtgccacaacattgattgtcaagataattggaagcattggagctgtctctgcaggtctagatttgggaaaagaaggaccgttggtgcatataggaagctgcattgcttccttactaggccagggaggccctgacaattacaggaccaaatggcactggcttcgatattttaacaatgatcgtgaccgtcgggatcttatcacctgtggttcatcttcaggagtttgtgcagctttccgggctccagtcggtggagttctctttgctcttgaagaggtggcaacctggtggagaagtgctctcctatggagaactttttttcagcacagctgtggtggtagtggtgctcagggccttcattgaaatctgtcatactgggaaatgcggcctttttggtgaaggaggattgatcatgtttgacgtaagcaatgtcacagtgaggtaccatgttatggatattgtccttgttgtagtcattggaatcattggcggggtattgggaagcctttacaatcatgtactacacaaggtcctcagactctacaatctcatcaatcagtaagcatcaatatccaatcctagtctcaacatattgcatatccttaggagacaattaccgtgacaggaaaaaatatcatgatttaatgttctatactgaccacacatgcatcatccaatgaagacaatataattgtgtcaattgtagtcaatgagattataaacatatgtgctcatttgataagat

SEQ ID NO: 48775 - DNA, 234 bp, Glycine max
  unsure (1)..(234): unsure at all n locations
  Clone ID: PAT_MRT3847_15050C.1
ttgcacccaccattgacaatgaccttttcattaggctcatcttggangtggtgantggtacacaaactgcaacaaagactgtgagggctaggttcatagnatcttccttggtgattccagaagnccttgtttctctnatgantcacaagtttcctcaattgggtntgaagcnntccgantgnatcgaaannacntggctnananctntgcngntttgngannanatngacantg

SEQ ID NO: 48776 - DNA, 211 bp, Glycine max
  unsure (1)..(211): unsure at all n locations
  Clone ID: PAT_MRT3847_15051C.1
acatagttggtgcaatggncggcgttgtttaagatcataccggcggtttaaaacgcagcgtcgaggtatatttgttgtgcttttcaaaggtggaaggcccctttcggatgggtacattttcgactaccattcatccagattgaacccaacatgaattcaaggtttcagcttttgagtactctctaccaatggcgattttgtttcaaggaaa

SEQ ID NO: 48777 - DNA, 319 bp, Glycine max
  unsure (1)..(319): unsure at all n locations
  Clone ID: PAT_MRT3847_15052C.1
ctcctcccattttttccatggcttatatctccacgatcaagaaccacacccatgtnccttttttcatagattggggggcaccattcagaccacgacaatagcttctctataagcatatatatattcaaagtattcacattcatacctacttaaacggactttattgataatatcacatcctaaatcataccactggctttgactgctacttccatttacatgattgcactattgatctataatatctcacatctaattttaaataaagaataacctactaattcatgattcacaagggtttacctacacaaacctacct

SEQ ID NO: 48778 - DNA, 295 bp, Glycine max
  Clone ID: PAT_MRT3847_15053C.1
agtgcttagatttccctacgaccatatattataccatctatacatatcttcacatacttaatactatataatcatgggtgttgaactaacgttgaagatcacgagggccgaacttgaggcctttcgacagagccttatggcagacatcggcatccagcggcgtacagacgatgatgggaggagaacccacaagattggttgctactatgaacatgatgatggaaagggtaccttaatctgtgtcacttgtggagtttcctacttaggtcttaccttggtcaaccatctattgctc

SEQ ID NO: 48779 - DNA, 1312 bp, Glycine max
  Clone ID: PAT_MRT3847_15054C.1
ttttgttttttttttttttttttttttttttttttttctttatatatcatatactaatggggataattttttttttaaaaaaagcataaattcataaaggcagaccaattttttaaagaacaaaaaaaactaaaagagacaaaacaggccagtttctaaaagctctatgggtatacacaaaaaaagattttgcaagggaaaatcatttccccttttttattaaactggcattgctgcattcccatttaaaagtagggacacttgttaagtagcgaccccaagggcaggggccataccctttctcaccccgaaatagcatcaccaatgcagtcgataaccctgtgcataaccactggagagccttgtgccctaaaacatagtagatgtggagggaagaatgaaatatgctatagccgaggacctggctacccagatgaattaaccaacccccgcattgaaggagaaagacaataaagcaaagcagtggatcttttcaatgctgcagatgaagagattgaaggggatgttgattttcgacatgcatatatagatttttcccaacttgaggtaactatttctgatcaaggatattcagaggttgtaaagacatgcgctgctgcaatggggtttgcatttgcagctggaacaacagatggaccaggagcttttgattttcagcaaggggatgataagggcaatcctttctgaaagctgtacacttcatgcaaaaccggacacccagtatatgattccaatcttaataaatccgaattgctgttcaatgcgaatgccaatgaagaccagactcaacatattagctagcaaatgaataaccccagcatgtaaccaaatgcaagtgaagagtctccatccctgatgtctattcacaacattatcccatcgaagggctcccatcttggtcaatgttgaagaagaaggaccaagcaagggattctcctgcataggctgaaaagagaaccttccaaggaacctggccacgcagcgaccttggaaacgaaggttgttcctgggacaattgttgatgtacatggtaataacaaagacagcaatattagcaaccacaaacataggcacgagccatgatgtccaatgggtctcagaatcataaacatgggaagattcaggtgcagagtagttttcctctgcagttctgttattcttggttcctccaccgccactttcaagatctcttgccataatttctcgcaagtctggaacttttgctctgtatcggtgctttatgccggtggaagaggtggagttggtaaatgagtttaaatgggggaataag

SEQ ID NO: 48780 - DNA, 907 bp, Glycine max
  Clone ID: PAT_MRT3847_15055C.1
acactggattaccttgtgacttcaatcatagtacatgtggagggaagaatgaattatgctatagccgaggacctggcttacccagatgaatttgaaagtacccgcattataggagaaagacaatttagaaaagcagtggatcttttcaatgctgcagatgaagagattgaaggggatgttgattttcgacatgcatatatagatttttcccaacttgaggtaactatttctgatcaaggatattcagaggttgtaaagacattagctcagtttgtgagaagttcagtcagcactgcgccaagaagtccaaaaagggctccagaagcaccaacagagatgtggtatctgataaatagagacgacagtacacttccaccaaacccagacaccaagtatatgattccaatcttaataaatccgaattgctgttcaaggcgaatgccaatgaagaccagactcaacatattagctagcaaatgaataaccccagcatgtaaccaaatgcaagtgaagagtctccatccctgatgtctattcacaacattatcccatcgaagggctcccatcttggtcaatgttgaagaagaaggaccaagcaagggattctcctgcataggctgaaaagagaaccttccaaggaaccttgccacgcagcgaccttggaaacgaaggttgttcctgggacaattgttgatgtacatggtaataacaaagacagcaatattagcaaccacaaacataggcacgagccatgatgtccaatgggtctcagaatcataaacatgggaagattcaggcgcagagtagttttcctctgcagttctgttattcttggttcctccaccgccactttcaagatctcttgccataatttctcgcaaggagccgatttgtgccggacgcgtgg

SEQ ID NO: 48781 - DNA, 406 bp, Glycine max
  Clone ID: PAT_MRT3847_15056C.1
tattttttttttacaagcaaatttctttatatatcatatactaatatgtataattttttttttaaaaaaagcataaattcataaaggcagaccaattatttaaagaacaaaaaaaactaaaagagacaaaacaagccagtttctaagagctctatggctatacacaagaaaagatattgcaagtgaaaatcatttcccctttcttatttaactgtcattgctgcattcccatttagaagtagggacacatgttaagtagcgacaccaatggcagtggtcataccctttctcaccccgaaatagcatcaccaatgcagtcgataaccctgcaatcaacagaataagagacacaacccctagaacatattggtgagtcttgtactttgacttcatctgaacaccggca

SEQ ID NO: 48782 - DNA, 2582 bp, Glycine max
  Clone ID: PAT_MRT3847_15057C.1
agaactagtagaagcgatgttttggggtcggggatgggaaactacggccacggaagcataatgcgtggcggagggaaggtggagccggcgagttctcgcggcggcggcggtgggaatgagacggtgaagaaaggggggcacgtgcagagtgtggatccggaagagttgaagaggttggggaacgagtgttacaaaagggggaactttgctgatgcgttgagtctctatgatcgcgcgattgcgatgtcgccggcgagtgccgcttaccggagcaaccgtgcggcggcgctgacgggcctcgggggtgagtctgtgatcatctttggcgcaaggtagggccacgggaaggccaattggtgcaactgcatcaaacgttccgattgcaccgagcttacactgaggccaaaatgccaagggcttaaaggaaatcgtaggccctaggcgcgacatgtgggatcactctgtgaggccttacagcttttagaccctcattacttgtaatgcttctatgttgccttctgcacttcaggcatgttgtttccccaaacctccagttaaactctctagtctctacagctcttccagtcttttgaccccaccataaagtgaccacctcgtcaggtcatacctgtgacataggcaaatccaaacaataatctctttagcagccaattccattggaaccggaatgtgaggtggctgtgaggttggatcctaattatggaagggctcatcagcgtttggcttctcttttactcaggttgggacaagttgagaatgcaaggaagcacctttgtaatcctgggatggatccatagccgtctgagatgcgtaggtggcaatttgtggaatagtaaagctacaaatgaagggatgtttaggcattagaggttgtagagattgttctcttggacggctattgttctgttgcccctggatcggactcttcttctcagctctttatatgtatagaagaatcgtttattaatctccaccacattgatgatgcgcatttgatatttgtgacttttcgaaactccataataatcttgttagcagccactgcccgtggatctatgacaaaatttagtgcggtttacagttattatgtattcattcattctgaaatagtttctggttccattttccatcaactttcactctgtcaatattctttagtcttcgacttttgagttcttgtagacgaggttttcttgtatccccagatgccttatgggtgaacaaaagtgcggagaaatgagcttgttaaatctgaaaggttcactgatgcttgcttggcttatgggggagggttgagactggacccttcagtttctgttctactttgcaatagagcagcttgttggtttaagcttgggcaatgggaaaagtcaattgaagactccaaccaagctttacatatccaaccaaattacaccaaggctcttcttcgaagagctgcatcaaacagcaagctagaaaggtgggaggaagcagtcaaagattatgagatcttgcggaaagaacttccaaatgacaatgaagttgctgaatctcttttccatgcacaagttgccctaaagaaatcacgtggggaagaagtaactaatttaaaatttggtggtgaagtggaagaagtctcaggtcttgagcagtttagagctgcaatttctttaccaggtgtatctgttgtccattttgaagttgcatctaacttgcaatgcaaacaaatatcgccatttgtcaatacactatgtggtcgatatccatctattaacttcctcaaggtggacattcaacaaagcccaacagttgccactgcagagaacgttaggattgtaccgaccttcaagatatacaaaaatggctgccggctgaaggaaatcgtatgccctagtcacgacatgttggaacactctgtgaggcattacagcttttagaacctcatcatgacttgtaatgcttctatgttgtcttctgcacttcttgttgtttccccaaacctccagttataaactctatagtcttttgatcccaccataaagtgatcacctcatcaatacctgtgacatagtcaaaaccagataataatctctttagcagccaatgccattggaaccctagagatagtctagtagttccttttggagtttttatttattcattcattcctcattgctctttgtttccatgttcctcccaagttcccttttgtcgattttcttttttcttatccactccttttcagttcatgtagaccagctgttcttgtatccccaatttccttgtgggtgaaaaaaagggagatttttatgtatgtacaattgattaaattgtcagtttatatttacctttaagatagatagacaaaagggagaggaggttggtccgctgccagaggaggattctgtacatgtatatatgtgttgattatataccaaacactggaaaccttagagggagatagaatgagtggtgggtacttaatgggttggtgaaatgaggatgaatatgttgttattgttattatttttctgtcttagccatttaatcaataaaatttcccattttttctgttaacg

SEQ ID NO: 48783 - DNA, 160 bp, Glycine max
  Clone ID: PAT_MRT3847_15058C.1
tacgtaagttaggaattaggatagaggtgtatgggaactgaattgaatgagagtacatgaaggaatagaattgtagttagaaaggtatgttttgggatgtgaatgggttgtgattaatggttatgtgagtagagttttatgaaattgtttaaatatgagg

SEQ ID NO: 48784 - DNA, 127 bp, Glycine max
  Clone ID: PAT_MRT3847_15059C.1
ttttacgcgtacttttaggcttccggtcttggtgccaaagtggaacatgggagagcatgtgctccataatctccttttatgatcgatggaaaaattctttctctggcataaacaccgtgctatgaca

SEQ ID NO: 48785 - DNA, 284 bp, Glycine max
  unsure (1)..(284): unsure at all n locations
  Clone ID: PAT_MRT3847_1505C.1
gtgttncagaggggagaggagtcataattttgggtgttgaaaccaactcagtacattgcttggccatttgaaaaaggattaatgtattttcaaggccaacaaattttttttttttttaaaaacaggataatttttgcccataaaaggtcatttaaatgttcactaaagcctatgggaaaaaaaaagccatttttttgtactggacaataaaatcgtcttactttacaggacggacaccaactgtttttacacaaaattggtgctggggcaaaaactcttcattt

SEQ ID NO: 48786 - DNA, 250 bp, Glycine max
  Clone ID: PAT_MRT3847_15060C.1
cccactcttgcgatcaggcttgcctgtttgaactagaagatggctgctcgattgtttgaagtgtccgctcagctggacactcagctctaagatccacctcattacgcttcataacggtcatatatatgcaactcgtcgcacatgagccgcgactacgatatgcgaatcccccctgcgttccgtggtgccgccgagacaacttttgcacctggctccggtatatagctagaggctgcgtctcacgcactag

SEQ ID NO: 48787 - DNA, 410 bp, Glycine max
  unsure (1)..(410): unsure at all n locations
  Clone ID: PAT_MRT3847_15061C.1
tcatatanatgtcttnggttagtcctncnncacncngnctgtggtggtggcnggggcnctgcnttcttnagntanacntangntngngnatncncncncncnnggngncntngcgangggnanantntncngngcnancngnangncagaacnanngcnangnanacgngnnattntntangncntngtntngcactgcnngtcccnntcgcnntngcnanantngnantntngnanangaananantntacntncnanatacnangggntnngccacaanantntncnancnacgntncanantntntncntntncncngntnncancnaccncngtatncncngcntntntngtgntgtanantnggngnangntgnanangaactngncntngcangntaccnantn

SEQ ID NO: 48788 - DNA, 131 bp, Glycine max
  unsure (1)..(131): unsure at all n locations
  Clone ID: PAT_MRT3847_15062C.1
gagngcgtnagcgtnctagcnagtgagttcggntcgaggtaanccantgtgtnctactatcttgnnaatnntttgtacccncancnccntaagccactagtacctgcacnatgcccattgtagcaacctcn

SEQ ID NO: 48789 - DNA, 261 bp, Glycine max
  Clone ID: PAT_MRT3847_15063C.1
atcgaagggggaacatttatctccctttttcggtccaatttccattcagcccttttagggatcaagagttttgtcttcctgtacattaaccaaaattattgcctaaaaaccttgatttaaaaaaaacagggaaaaaaaccgggtcttagttttttcccccatctctacttggggtggtccattcttcggagataatatttaccaatcaaccctgtttatttcaatacccctcacccgagcgttcctaaacccattatttac

SEQ ID NO: 48790 - DNA, 527 bp, Glycine max
  Clone ID: PAT_MRT3847_15064C.1
ctgataacgaagatagtttcatctctcttgagtataacaattttaatggatcaggcgaatcaccacctattggacattttacagaatggcataatgcgaccttccataatgatgatggatatgagagtggaaatggcttatggtctgatgagcacggctttgctcttggaggtcaagaccggctacgccgaatgaatggatacctgtctgacttggctgctgcagctattgttgacacacgtgaggtgcataaaactcacttgctgcatggaactattagcggagtctctgtggtgcaattgtgtaaaagatattggatggaaacgatcgtggctagtgaccttgatgaatgctctccgacagcaatgctcaaagatgtctctggtataacacgacttattcagcctttggacgcatctggcgtattgcttcagctgactgatgaagagctagtgaaaacattgcacttcgtcattgttgtggtaagagaaggtcacacaattgcttgtgctgtccttcatcctcac

SEQ ID NO: 48791 - DNA, 391 bp, Glycine max
  Clone ID: PAT_MRT3847_15065C.1
gctttgtgaacgtgtgaaaaactaagaatcagagagcataatgtgagggatcattcacaagattggggagacccttcatgtgggagggcacaagaaggcggaggagcataagggtgagcaccatgctggagaatacaacggggagcaccatggtgaacacagcagtgagtacaaaggagagcatgatggagaacacatagctgtagagtaccatgatgagcacaagccagagcacaaagaggggtacctagacaaaggcaaggacaagatccatggcgagggcggcgccgacgagggctagaagaagaagacgatggacacgaagaataatgagcatggccatgagcatggccatgacaagagcaacatgagtgacagtgattaaactgct

SEQ ID NO: 48792 - DNA, 411 bp, Glycine max
  unsure (1)..(411): unsure at all n locations
  Clone ID: PAT_MRT3847_15066C.1
tatatatatatatatttaaaactaaaaaaatcagtttataatgagaatcagaaaaaaatagcgggcggggcagaaaaaatnagttacatagnggtttnnggggggatattcaacatcacccctctaagtgtnacattttnaatttagcagcattnagagcgtataaatattatatttttttcttctgtacctacagatatattattagtgcttcttntgtctactgtgtcatcggacgctncgtttaatacaaattgtgaatgacttccgccgtcagataaatcagtccgaaaaaattcagtccagtgtgtgatctcttatttcattttttatattgctgtcagatatcaattaatttattctgtgtaaatttctgcaagtgtgtnagtccactttaaatacccttaatat

SEQ ID NO: 48793 - DNA, 1097 bp, Glycine max
  Clone ID: PAT_MRT3847_15067C.1
ctgactcactcgctcgctccctccctcagaaaccatgcgcgaatttaccagcgcgctcgctccctccctcagaaaccatggccgaatttgccatcaacaacaacaacaacggttcccattccagcattaacagcccccatcctgattatgcggagattgttgtggtgcgtcatggcgaaacagcttggaatgctactgcaaaaatccaggggcacctggatgttgaattaaatgaaaatggaagacagcaagcagctgtagtggctgatagactatccagggaacctaaggcctctgttatatattcttctgacttgaaacgggcttttgaaacagcactgatagttgcatccaagtgtggagggatcgaggttgtcaaggattctgacctacgggagagacacctcagggatcttcatttcattgtttttcatgaaatagtaaaaacgtaatcccacatgctgacaaggagttttgtgatcaagagatacgaggtggtagagaaagtcctgttcaactttatgatcgcagcacatctgcattgcttaaaattggcttaaagcataaaggggagcgagtaattgttgtctctcatggaggattcatcagagccctttacaagtgggcatgcccaaatggtaagcctgggaaggtactcaatacatgtgttagtgtttttcacttgtacggtgaggacaaatggaccttaaaagtgtggggtgatgtcagtcatctgaacgaaactggatttctagagtctggttttggaggtgatagaaattctggttaggccattgtttcctatttaaggtaataaaggtttgattgtttcccatccgaagttaataaaagattagagaaagagcagaaaatggatattaatcagtggtgctaaatatgattttggcccctatttatgttttgtatcttagcatgcaaatatatggtcaccatgtaaggatatgcctaaactatttaattttgtggaggtgatgtcaatctcctttatagaattgtttcttttaaaatcttttcgaagctttcatggagtgatgaatgtaatgatacacttttcatgttagtatttttaatttgtt

SEQ ID NO: 48794 - DNA, 261 bp, Glycine max
  Clone ID: PAT_MRT3847_15068C.1
ctcatggagatcaagttttgcactgagaagttcctccgatgctcttgcgctcaatcacgtcattatccacttatgcagcttcatgcacggccttaccggtcattattcagcacccatcctctaataaaaatatgtgctggtctcagttgccacaactcctacagcgaacatggatacctaggatatcacgatctctacatgcattagcatactatttgtttcatccatatgtcctatgcttcagaacatatttgcttcata

SEQ ID NO: 48795 - DNA, 388 bp, Glycine max
  Clone ID: PAT_MRT3847_15069C.1
gcgcccttttgaatgaatgctatagcatatggggggattcaggacttgaagaagcccttttgagtatatcaaatcacaataatttcgagctagatcgcatttcaagggaattaagctgaatccattaaatatattcatgatcttgatgaacatacacttcagaactttggcatctctggagaacaaactacttgccagctgtcagccttgccagctggtttcataccaggggtaaatttggcgaaacggaatggcaagcattacattgtcaaacttgcaaacttgggggtccatctaataagctcagatccccccaagaagcgacacctgcaaatttaattgtctgtcacaacaagtggacatttcagtccgttggtgagctggtttc

SEQ ID NO: 48796 - DNA, 636 bp, Glycine max
  Clone ID: PAT_MRT3847_1506C.1
ttttaattaacacataagattattatgaatcccaaaacgtttgcagccaaatgaatgtctaataaacctccgcctctatgtatatttcctaaaagcataactaacccatttcccaattgaaaaacatctcatgcttcggcttatgtacttcctgtgtgaacaacccaatgtacaaaaacccacaccaaagatgagaaagtaacacctctcagaacttattggtgcaaaagcaacctgaaactgaagtcataggacatcatttgtaccatttgtgaaagagaatctcttccccttctttcaaggcattcaactgcttggtttctcaattcgtccggtaattggaggcaaacccaatccaataaagattccaagtcctttgcaaagtccaataaataccagtccaacaacttggggattattaacttgtttgttttagtaatgccaactgaagcatgtaaatagtccctctttgctgcttctaactcttcatcaacttttgatgctgtataaactctcactgcaggtgaagaccagcttccacaggaaagtgcaaatgttactaagggctcagaccattccaggccaaatatgcctgggggcttaacctcatcattttttgcagcttttggacaggta

SEQ ID NO: 48797 - DNA, 876 bp, Glycine max
  Clone ID: PAT_MRT3847_15070C.1
acctcatcactacttcgaagcatttctatatactattactaagaaatttatcaatggctttccttcgatccaccttggcgacctcaatggttcttttagcaatgctagccattgtctccgcaactgactattatggatatggtccaacaccaaagcttgagaaccccaaacccaaaacagattacaaagttgacaaaccacaccccagaataccagattactatgcagtgcccaaaccaaaaggaaacgatgaactacatctgcttcccacaatcattggtgtccaaggtgttgttttatgtaaatcgggttccaattatttcccaattcaaggagcggttgcaagagttacatgtggatgggagaatgagcttgggtacgagacaggtcctatatcagtgttgagtcatgtgacagatagtaaaggctatttctttgctacattgtcacttggggagcttggatcgaaattgaagatcactgagtgcaaggcatacttggagagttctccattggagacatgtaaagttcccaccgatgtcaactacgggatcagtggtgctcgtctttcttcttatcgcctccttgagaataagatgaagttgtacactgtgggacctttcttctgcacctcccaacctgctaaaccactccctaacggttattaattaatgaagccaccttctatatgacgtccgttgaaatggctgcaaagtggaaatcatcattttttttttatattcaatttctatttttgtgttttttttttgtgcctgatgttttgttaagtgttggtttcatatgtaattcattggtagggggaattgattaagcctccttgccctttaagagattgatgttaagttttattatgtc

SEQ ID NO: 48798 - DNA, 579 bp, Glycine max
  Clone ID: PAT_MRT3847_15071C.1
agtaaagagcactaaaacatggatagaaaatcgcatagtattgtccgattcatttggatataaacaagcagtttttttagtgccaaaatagttaatatcaaaaaaaagacaagttatgttttttacattttgattaatgcgatgtggatatatcttccggataaaaaaggaagtcatttcattatttttcattcttagtaaagctaagaaaaaatttttgttttttaatttctgttttacttctttcttcccccataaagatattgaatagaatgaactatttttttttccattgaaatttaaaaaatgaacgtttaaatatccttcaaaaacaagtaaatagatccgaaacatataaaatgcagttaatcctgctgtacaacaagctattattgcaaaaatgggtgaatacaaccaactatcattaagaatctcatccttagaccaaaaacaggcaaaaggtggaataccgcaaagagaaagcgtacccactaaaaaagaagtttttgtaattggtacatgttttgttaaaccgcccataagaaccatattttgacttttagctggagaatatccgac

SEQ ID NO: 48799 - DNA, 343 bp, Glycine max
  Clone ID: PAT_MRT3847_15072C.1
aaaaccggaaaaaaataatttattaaaatcataaatttcattaaaaaccccttgcagggcccggaatgaacattaaatttccttccggaaagcttttaatccccaatttaaaagttatttttattgacaaggaccaaccttggtaacttacccttgggacccaaaaccctttaacttcccgacctaaattaatttttccggaaccatttttttcccattcacaatttccggaacttttttttgctttccaaaattgggaggcctaataaaaggaatccaaccttttttctttatttttggcaaaactttttttttttaaaaaaggggtgggcaaaattttttt

SEQ ID NO: 48800 - DNA, 691 bp, Glycine max
  Clone ID: PAT_MRT3847_15073C.1
cccacgcgtccgcccactctttctctttcttgaagaatgagtcatctgctgaaacatatactatggacatggatgctttacataaaaataatcctcccggtgatgtggcattaggaattttgtagtgctccaaggatagtcaaaactcgcttacgtctcaaggtgcaacaatttctgctagagagaaaactatagcaaaatcagtgaatacaacaataccagatataaaccaagagcctcaggagcttcttgccgaggaaagtcctgtggttgacagggagactagcacatcaagaacccacagccttgatttggatcactttctttctcattcagatgagcatgcaaggtcaagttctggaaatagtactttaagaatagacccaagcagcagatgggtcaaaagactcaagttgtgcacattgggctctgctcatggtactgggagtacaaaaattggagaaacttcttcacatgaaaaagttaacaatatatatggcaaaattatgaaagatagcagaactagtctggaacccaaaatggtacatcatgctgaaggacagatggatccggatctacctgcaacagtatcaacaaatggcaagtcctctttgactgaagcaaagaaaactgtagaaaataccctttcacatccctggatacagagatggagtcatgaccgtgctacatc

SEQ ID NO: 48801 - DNA, 334 bp, Glycine max
  Clone ID: PAT_MRT3847_15074C.1
aattctcggatcggccgactcgtacgcccagaatcccccttttcacctcttttaatgtctgatcctaaaaatgaacgctcccattcgcaaacttttaacagacctgggggtcattctgatgatctttcacttaaaatgagtgaaacaaatgatgctaggcatctaaaacaaccctcagttcggatgctatcatatcttaattttacaaagtggctttatgctttgttatgaagcatatgtgctgctatctttggttctttcaatcccctatttgcttatgttattggcctctttgtgacatattactatagaattagataatctcatcacttac

SEQ ID NO: 48802 - DNA, 402 bp, Glycine max
  Clone ID: PAT_MRT3847_15075C.1
ggggaaaaaaaaattgccttcaatttaataaaggggtttcccttttttaatcccagagatttgaaccttagaagggggtggggataattaggggggccgggtcccaattaatagatgcccctcccccttttgtaagatgatttggccccccaattttggattaaaagggacccccgggactggggcctgtgccttggtgggaaaaagctcaaatgaaaagcgttgtaagagtaatgaccaaacccactttgtttttaataaagcaaaattttggcctaagcccccttttggaccccatccaaaggggaaaaaccccactgggccttttggggcctttgctaccccttcagcaaatttttttggggtgaactctggagcatcatccccccaaatatcacgatc

SEQ ID NO: 48803 - DNA, 302 bp, Glycine max
  Clone ID: PAT_MRT3847_15076C.1
ggggccaaaaatcagtttttttaattaaaagcttatcattttttgggttccacccacccctgaacggggaacataaacctgggggttcacaaaagtacaaaggtggaacccttaccatacacaaggtatttttaataaaattggtgaaaaaattcatttttttgcctagcaggggtcttatttttaaagcatgcccccctttgctcgggtatttcccgtttttaaaaggccccctttccccccccacgggttttcaaacgtttaaaaacttcatcctaaggattattcccccccgagggact

SEQ ID NO: 48804 - DNA, 441 bp, Glycine max
  Clone ID: PAT_MRT3847_15077C.1
ccccaattcaaagttgggctttaaaaaaaaaaaagtttgtgggattcgcccagtttttttaatgttaagggggcataattttaaaaaacccatgcggggggttttaaaaagggcttgtttttttttccgaagggattttgaggggccccccaaagagtaccgggttgaaactggcccccttgtaccttccaaacttttttggggggggtggtttcgattggtttcaaaaaaaactttccccccaaaattttttgaataaagccttttttggacagccttcctttttttgaagaaattaatttcaaaaaaaggtttttccccccccaaaaaaaaggttggaggagttttttttttttttcttggggggaaaatttggttccttgggggaacccccttaccaatccgggggaaaaggtttgtttctttttggggaaatccccc

SEQ ID NO: 48805 - DNA, 771 bp, Glycine max
  Clone ID: PAT_MRT3847_15078C.1
ccacgcgtccgattaaatctttgtttggaagtacattgactctaataaagaagagcagctccaggaagctaaagcagaaattgaagacaaagtgaaaaggatattgaaacttattaaagaggacaaccttgaagaggatggtaccccagtagaacattctaagaaggaaccgcttgttgaactgattgaagatttccacaatcaataccaatcactgtatgcacaatatgatcatctaacgggcgagttaaggaaaaagattaagggcaagcgagaaaagggtagttcttcatccagctcagactctgattcagattcagactattcttcaaaggacagagacaacaaaaacggacaactggaaaatgaatttcaaaagacaattcatgacttaaggcaagaacttgaagtggtgcatatagaagtggctgagttaaatcgtaagttgacaatcacacatgaagagaaggaggatcttaattcaaaatatcttgcagcattgagcaagatacaagaagcagacaaaattaacatggacttgaaaactgatgctgaagcattaggcactcaaagattaaaacttttggttgagaatgctgaactaaataaacaactggacactgctggtaaaatagaagttgaactgagtcaaaaattggaagacttaacagcagaaaaagatagtttgaccatggagaaggaaacagctcttcacagattgaggaggaaaagaaagatactgatggcttgagaacccttgttgatcaactg

SEQ ID NO: 48806 - DNA, 253 bp, Glycine max
  Clone ID: PAT_MRT3847_15079C.1
tacggctgcgagaagacgacagaagggtacgccaatcctttttccacaataatccaaataattgttgctgatgtaagaagtggtgtcctaagctggaaaggattccactcaaactttaaaactacacaaaaggggcctgcttttaacaatagatgggtaaactccatggttaattcttctgggccctggggggattttttaaattccacaaaaaaagggaaaaaatccttttaaatttaacggggttaaggcc

SEQ ID NO: 48807 - DNA, 280 bp, Glycine max
  unsure (1)..(280): unsure at all n locations
  Clone ID: PAT_MRT3847_1507C.1
agataatcatcttgacgaaatctagaagcgttntacaacatcaacaagcgcataaagcacactatacagcgggatcagcagactccaggcggtgtgtgatcctacgctgctcatgtcagcactatatgaccatcatagaagccggcacagtcgatctgtcacactataatggcgtgcgcggacgcacgaacaaaagagaatatgaagctcgcggactcgctagctaagcacgtgggcatactatcggctaccgaagcctgcaccatgacgaaggttgctt

SEQ ID NO: 48808 - DNA, 1095 bp, Glycine max
  unsure (1)..(1095): unsure at all n locations
  Clone ID: PAT_MRT3847_15080C.1
cccacgcgtccgcccacgcgtccgcccactgcgcggccgcccacgcgtccgtacggctgcgagaagacgacagaagggggctgccgctctctgagaaaaacagatagtgtgggagagagaagagcggaagagaaaatgacgaccaggttcaagaagaacaggaagaagagaggtcacgtcagcgccggacacggccgtatcggaaagcaccgcaagcatcccggaggtcgcggtaacgccggtggcatgcatcaccaccgtatcctcttcgacaagtaccatcctggtttcttcgggaaggtaggcatgcgctacttccacaaacttcgcaacaaattctacaatccgatcatcaacatcgacaagctgtggtccctcctcccccaggaggccaaagacaaggccaccgccgacaaggcacccttgctcgatgtcacccagttcggttactttaaggttttgggtaaaggggttttgcctcagaaccagcctcttgtcgtcaaggccaagcttatttccaagatcgctgagaagaagatcaaggaggccggtggagccgtcgttctcaccgcttgattttttagggatcttgagaaaaacttcccctatccaagtcttgctacatttgattccgtgacttgggaaggggaattgatggctagtttctccccccatggaggaagttttctccccttttcagtgatccgcacctcattttcaacctcgtgcaatcgtgcatgataacccttgggtgcattttgaggtataacatctgattctcttagccaacaaaaagaaattgatcctcagtgttccttttgtggtatatcgccggaaacaattctcaaaattgatgttcatatttcttgaagaaggcctttgctgggtgcataatttattgagaaggccttagctcccaattctctcaccattaaaaagaaatctttattaacatatantacctgttcctaggcctttgattcattgcttgttaatttgaaataaagtttgtttattgcatatatttgaaggaatgtcaaaatggccaaccctaaacctgtacttatatgtcaaaaacgaagaaaaacccataca

SEQ ID NO: 48809 - DNA, 150 bp, Glycine max
  Clone ID: PAT_MRT3847_15081C.1
attttctctcacctgaagatgtcttgctgctgaggtaagtgtggctgcagaaactcatggaagtgcggtaagggctgaggcagctgcactatgtaagtagatatgatctagagtgagtcaacgataagcgggagcttgctaatgggatgt

SEQ ID NO: 48810 - DNA, 256 bp, Glycine max
  Clone ID: PAT_MRT3847_15082C.1
ctctatcaatcaagacaaaaaaacatccaaatacaaaattataaagaacagttctatttctaccaaagttagtaataaaaccagcagtcttacaaagacaagtaaaagtaccaagatcagcaaccaacctaattttattaagagtaataatagcactatttacataaaaatcacaagcagtaatataagtaataagagtacttatagtagctttagtagcaccataaacaaacctcacaaagcaaataacttaaga

SEQ ID NO: 48811 - DNA, 436 bp, Glycine max
  Clone ID: PAT_MRT3847_15083C.1
actacaaaatttgcattcatgcccaacttcatttcaccttcattttcatttctctataaccattgggcgctttatcagaaaatcaatttataacaagccactataaaaaaaatttatgcaagaaattttcaaggtgacctaaaatttgaaaacacacatcaacacctatataaatggccaccaaaagcttccatggctttgcttgctcctcctatttttgtaaaatttcactatggtgaaggctaaaataaattaaatattcctcgacactcctcactatcgggtgaagtggtccacgctgggcataagccccgagcaagccacaggataactctggcatcctaagaaaaggtcaacatttgtggacattgaccttaatcccataaatgccaattttggtacacgaaaaagggccccaccggaaaaacaacaaaaa

SEQ ID NO: 48812 - DNA, 515 bp, Glycine max
  Clone ID: PAT_MRT3847_15084C.1
ccgaacgtgagttttgataacttggttcttttatattatacggaggttggctgttttaactacctagacttgatttaaaaacttatggctgtttatactggcgccagcgcacgctaaaatgatggaggcgaagagaatataggtgatgacatggctgattcttacaaatgatgaagttttgactgtattgcttggcagagcagtagagttcaagcatttgcacaaagaattttatcattgtcaccataagagctggcgcacgggacttattactttccatctgtcataactatgtaacacgacttcgactaatgtagaggttatatagagaatcgagcttgactttttggcctgatgcaacatcaccgtgtggggttccttcagatctttgttacacatctctagtgattgggttgaaaactggtattacctacttcatctactttaaatattctgatttctgcatactttggttgaaattcagtctttcaagcgctattttgccagcagtttga

SEQ ID NO: 48813 - DNA, 485 bp, Glycine max
  Clone ID: PAT_MRT3847_15085C.1
taataaaactacaattacattaatttctgataaaatcacaacatacagaaaattcatttctggaagagacgtcagagaaatattcatgctctttagcatcagatctcttgaagatagttatcgaataaattcttattcgatcatcataatgtatcatatatgtttatctataaaaacctagttgaacaaacacactataataatactaacggactacaacataaattgatggagaaaacaacagaagaagttagcaaaatacagaatatcgttgactgattgaagcatcttgtttcaactgatttaacatcaagagattctgatcaagctctagtttaatttcgtgggacattcattgacctttcccaactcagtgaagacttcagggttcttgacatagattgcacaatctcatgcacactagggcgacttgccggatctgtctttatgcaattatcaatcatttcaatcacaaacatagcaag

SEQ ID NO: 48814 - DNA, 1020 bp, Glycine max
  unsure (1)..(1020): unsure at all n locations
  Clone ID: PAT_MRT3847_15086C.1
atcatatgagtctcacctcccagctggcggtaaaaagccactaagtaactatctgtatcagagtaaatcacccattggagcagttaaatcacccatttttgaaaaagttatccttaaaaaagtggaaaataaagaaataactactcgttccactactacaatggtgcagcgcgaaagcaatgtaaacatcttaaatgctgttaaagatgtgagctgcaatacccagattaatcaaagcaacccaattatgtctgcatgtcaaggccaagttccatgtggaaatggagtaaatgttaattttggaaaggatcatgacttgaaagtagtctactctgaaccatcacaaccagataaagttttgaaaaatagtagcatgggtgtttcagctaagtctgttggaaatactggtaatgggaatgttgggttgacttcttgcgcaccttctcaagacactgcaaaggatgtgctagatgttgctcgtctaagtttcttccataatggcagtttcatccaacaaggaggaaacataactcctggatggagnnngagttttgcaaatgaagaggatgcttcagaagatatggaagatgctatggaagaatcagctaaaggtgaaaatgaagtaatgggggatgactctagctccgctgctgaagaaatgggtgtaccaaaagacctaggtggtggttggttgccccatgaatgatgctatggcaactattccaaaagccaaagctatgtctccccttaacaactggtagtatttttacaagaaatgtctcatacatctagttccctaacaatagatttttagtataatgggatcactttgctcaactgggataatcttctagccaggtgaagggtcaccagtcaccaacttgcccaggatttttggtatagactatagagcagtatgtagatttttgttaatattatttgccacatcattcaggaaattcatgtggttggtccttttgagtcacttgtgtatgttatttattacaaaaaaaaatgcgg

SEQ ID NO: 48815 - DNA, 249 bp, Glycine max
  unsure (1)..(249): unsure at all n locations
  Clone ID: PAT_MRT3847_15087C.1
gnccatggccatggncaagtctacacctttcgctttcaatcctnttcatctcngttctacgaatacaanaacaacaacatcntcacaacgccaatttnccnacanttnanatatnnngntccctnanncnanaatcgntttttnctcgtcaacgtttcccggtcctctcagttccgtcccttctttgcnttccctcganaacgccncantttcgtataaaagctntcgattccggacgnagcaaatcag

SEQ ID NO: 48816 - DNA, 316 bp, Glycine max
  unsure (1)..(316): unsure at all n locations
  Clone ID: PAT_MRT3847_15088C.1
nnaaancagcangcacgcgtacgtaagctcggaattcggctcgaggttgtcncatancntnnggangagttatngcattagnagattnactnacgaagtagtngnnncatgangcttggttganngatcaaaantngnantaatnatntngccnctctngggnntgantttaagccantaaggggcactgaaccagaagcgaggaactttaaatgtncaanggcaatgnanttcnggcagncanccaactnttcatcnanngcccnttnnnaaaacgcannncnnggggngngccacatcccnnggccccctttcc

SEQ ID NO: 48817 - DNA, 231 bp, Glycine max
  Clone ID: PAT_MRT3847_15089C.1
cccttcaaaggatccttacaaccaactctggttaaaaaaagaatggctgccaacacatgggtgatttctgccatctcagccttcccatctttcctttcctcctcaaaaaccagattggccccagcagttcctctttccagctttgttggcaccaaggcctctttttttcccttttccatgattgctaatgggatgcctgcccagcctagacccccctaccttgatggttca

SEQ ID NO: 48818 - DNA, 477 bp, Glycine max
  Clone ID: PAT_MRT3847_1508C.1
ttttgttttcacaggtgcataatagttaacctgtgcgctaaaaacagtacaattttggacaccgtgcaagagctgtgattggaaccggaattccgcagcactagccgcgagcttagatcaaagagccctcgggcgagcgacgaccgtagctttcgagcatcttgggcttgttgtccaggatctcctcgatgcgcttggcgacctcgggcgtgagcttcttgtacgtctcgagcgccttgaggttctcaaggatctggtcgggcttggtagcgccgaggatacaggtcgagacattctcgttcaaaagggtccaagccagagccaatgcgctcatggtcgagccgagctcctcggcaatctttgtcaacttcttgaccttttcaatcttggccttgccctcctcggtctcgagctccttgatcttcgagtccatcatgccctttgtggtggcgtacgagagtcggacgggatgccgtc

SEQ ID NO: 48819 - DNA, 1400 bp, Glycine max
  Clone ID: PAT_MRT3847_15090C.1
cattgaacaaaatgtacaatggaatcatgattccgtagagcactggtttttgcctctattatcacaatggaaccatgattcccttatattttgtggcacccccttaagacaacagaatcactcacggttctatgttaccaaatatccttgcgaaaatgtgattccatttatggcagaggagtgcacagcgatggatgtgcatggcagcatggtgatgctggcggtgcaatgtggaggagatgggatagggtagtggcacagtgcagaggtggtcgatgaagatgatggttgcgcgactatggtggggggttgggtgagaagaaggtgggatgataggggaagaggatgagaccaatagtagatcccttatagaagtaatagtccaattagttagttcatattttgggtgaaataggccgaagcccaaaagtccattattactaatttgcagttttttttttaaaaaaaatataatttgggggagatgaattgaattgggaaagaagtaagcggttttccctggcaatatgatacgaaatgcagcgattaaggagttccttaaaaaaaagtatctcaattcacgggctgccattgaagatacttatttttccaccaaggatacttttgagagacatcgcgtggttttcaccgttggaacttccattgcttccgttgccactgcttggttcggttattccttgcgccatttacatgacatcaaagttgatcaaaggcttcaatctatcgaaaattctatgaaaaacaattccaatctccaacattcccaaatcaaagacattgtcgcgggttccgcttccggagcttttagtatccctgcttgtgttgccactgctggaacctccttaatcatcgggtatgccccgcccacgcgtccgggaatctggtatgcaactaagaagttcagaaaggagcagatgaaaatgctaggacagattacacctaaaagatggcaattgcttgggaagataaaacctagagggtttcaattccagttccttagaaggaaacttacaagattcaaagtgtttgatactgccccaaaaaatttgaaacaagtataaagggtgtttctaccacacatattgctgtaaaatccgattagtatactactataaatggttctttcaagccccaatattgatagagatggctgcagatactggactaggctttcaattagacaaacagagtagcaacttagttattatcaattatcatcaaatttttctctgatattttattttggcctgcagttgctcgcccttcataaatttttcatccctcatgggaggagtgctttagaaacttatgttctgttttgatcaatttataatggaggaaattttgaaatacaccccctttaattttgggggctggcc

SEQ ID NO: 48820 - DNA, 277 bp, Glycine max
  Clone ID: PAT_MRT3847_15091C.1
ttctgtcttttttttttttttttttttttttttttatctttattttctttttttatgggccctgggtattagttatctattaattctcatttattcttatgatgagtcaggggcccacttaagaagagcgataccaaacaacccacagcgccttaatccgaaacaaacctcagaaaaaccctacaatgggccaaaaaaacgggccaaaaaccttccctatgggcctaaacaccacaagaacctatataaaaagagcgaaaaaagctaggcccaaaaa

SEQ ID NO: 48821 - DNA, 194 bp, Glycine max
  Clone ID: PAT_MRT3847_15092C.1
aggtgatcatccatgaccccacacatgccacgcgagcttgtttcagcttccagcggccacacccattacgataccaatactaaaacaaatttttacactaacacacctttatagatgggcacaatttacaacatgtcccaaatgcctcttttactcatatatagtcttatctcttttatacaactctttcgtat

SEQ ID NO: 48822 - DNA, 306 bp, Glycine max
  Clone ID: PAT_MRT3847_15093C.1
gcatggcagaagaagataggatagggtgccctccgattgggatactccactgacaacacccttaggtgctgccagaggcattggtcgtattcacagcgagaatgggggcaagcttggccatggcaacaccaaatcctcaaacatggcccccaatctctaataagggggttgcaggcctgaccttggcctggcaaccatataaagcccacttgccttaccaatatcacacagcaaacggttaccgggcaccacaagttacaaacatctagagggctgtgctggcattctggcggcgttcctggtctg

SEQ ID NO: 48823 - DNA, 269 bp, Glycine max
  Clone ID: PAT_MRT3847_15094C.1
cttaatttctctctgtctcgtttacacatctctccaacctttcactttcgtttctcagttttattcgaatccctgctctcaatctcctttccaaatccgccagcgttgaggttgcacagcaaacaccaacaacagttccagaaaatgaaacaaccgaggtaagcaagatccagaacaaccccagtcactgagctctgcacagaacaaccagcagctgggttcctgcaacagaacaaccaccgctgaggctctgccccagaatcaaccac

SEQ ID NO: 48824 - DNA, 297 bp, Glycine max
  unsure (1)..(297): unsure at all n locations
  Clone ID: PAT_MRT3847_15095C.1
ttgtgttgcatatctgtaattttcggttccttgcagcgtttgggatactttttttcccttcatgatttatttggttttcataattaaatattttgaacattccgaaccgagtttaggagtaatatgtttttatgcaacgaataacgaagagnatcatacacctgcaaagtatctctacctttctatcacctgatctttcantttatctctctccttcatcagatatttcactttctccttgtncctcnnatttcccctgcctgnttaccggcctacacccaaaaatgtgtgaataac

SEQ ID NO: 48825 - DNA, 1104 bp, Glycine max
  Clone ID: PAT_MRT3847_15096C.1
ggctcgagcattttttcaaacacctgcaagggataccaacacatcctgaacagaagaactatagcaaaatctcttgaaatcaataatcgccaatcccaaaccaactaggagaaccacacagattgcaatcaagaattgtcatcaaaagcagaaacagaacgcttgaaccagaactagagtcgcaacatccagaaacagaaccaatgccaaagaagtagaaagatagcacgtttttaaaatccaaactccaatgcctgatcaatcacgaaggtcggaaatcgtattcacgaaggcgggcggcgacaatgaatcaggaacccaatcggtgggttgtgatgcggaagatgcagcgaagctttctaaatcagtgtccccacagcggtagatctggatctgcgtccggcgcgccggtctgcagttgtggtattgtggttgagatttgggagttcactggatcccggtggatggcagcggtgttggtggcactgacggcatggaggcagagaggagcgtcgcggactccgctcaatcttcaatgtgagcacaactagcacatccagagattggagagagatagggttagggacacgtgtcagcattcaattgaacagccgatacagacactaacataaacctattgccaagtttagttcaacaacgtagaaatgctacaaaacccaagagtagtgcgatattccgctcagccattcaatcctccaactcgcatggcaacaccatcactttctccattccaattaatacccacttctccatcttttccaatcctcaaacaacaatgcagattctcacgtagagagctcaccatcttcagcaactcttgcttgctactactcttgggtgctcaggcaagagcagaagagaatttgactttggcagaagaagatgttggtaacacaagtaacagcgatcaaccagaagagaatctgactttagcagaagaagatgttgctaacacaagtaacagtgataagccagaagagaatgtggctgtcactcccagctgcacttgaagaaaacctacaaaacaagtattcttagacatatctattgatggcaaacctgttggtcgcgttactatagggc

SEQ ID NO: 48826 - DNA, 722 bp, Glycine max
  Clone ID: PAT_MRT3847_15097C.1
cggaattccccggtcgacccacgccgtccggaaaaggtaatgaaacagcttttacttttacttttaaggacaagagaaataataaataagttaaatcaaacaagtttttgataatgaatgaaaaaaacacacaagtttttttatgtataatttattaattaaatatttagagtaaaaaactttatcaatgttttgtcatattcaaaaatgactatcttttaggaaacacatatattttacaattcatatatataatagttatgcttaattaggatatgattgcctcataaaacactactacgtgtatagattatccaaataggccaaccaaaatttccagtgttattgatgtagctgcaccttaattacagttccgattatgcactaatttatctatcagctgaatagcagctatattcggcgttacattctttccctaaatttgtttttcttgctcttttccctcataatatcagctcataccgaaaacacaatattttctatttctaagaatgcgcaaaaaattttaaaaaacaatccacgagcgtgattttgatcataatttttgggggtgtttgcaactttaattgtaaccaaatcggcatatttgtcactaatttcctacaatatcaaacaacacaacgaaattaaaatggtgacagtaatttaaaatcttgcacgcaattgaacatataaaattctattttaccactgatataact

SEQ ID NO: 48827 - DNA, 491 bp, Glycine max
  Clone ID: PAT_MRT3847_15098C.1
aaaaaaaaaaaaaaaaaaaaaaaaaaaaaaaaaaaaaaaaaaaaaaaaaaaaaaaaaaaaaaaaaaaaaaaaaaaaaagaaaaaggtagaacgaaacatggaaggccggcccgttaatttacgtggtctgggcgttttttttccagtgtcttggggggccattaactttcgttttggggaccggaattcctttggggggcccccggttttcccccgtggggaacagacctaattgggccggtccgcaaattccgttcggggcagcgccattttccttttggcggcgggccctaaccctgtttgggcactttagctgccccttgggaggggttttgacgcgcgttgtggatgggtttacgcccggggtaccccccacaattcccgatgctttcctctctacttgaccgggttctactgccttttcctggacctttttccccgttttttccgttaaatttcaaagttttgtcccccttgggggctcctttccc

SEQ ID NO: 48828 - DNA, 287 bp, Glycine max
  unsure (1)..(287): unsure at all n locations
  Clone ID: PAT_MRT3847_15099C.1
gcaatttgaattggaaaaaatcccaaattacctccggagtgttttcnaggtacaaagatccgggacgaggaatttctggaggccgtgttactgatatctccaaagaaaaaaatttaacagagtccaggatttggattagaatcgtgtaaccacagaagtagcaaatcttacattaaataaatcctcaaggtcgatctggactgctcgagtttggtgggtttgcaacatcttgctgaaacatttgagagattaagggatcaggttaaaggtcaacaagagagcatgag

SEQ ID NO: 48829 - DNA, 536 bp, Glycine max
  Clone ID: PAT_MRT3847_1509C.1
tagctgccaaagagacaatggcgctttgttccttctatgcacaaatgataaaaccatcatattctggaagggccacgaactgaaagtccagagagtctcatacatgaatgttgatcctaagttactgtgaaacggctctatcgcttgatcaagcaatttttttagctatgcatcatatcttgcacagggacgtatctcaacagggaccatctaattatttacacaacgagatctcatctccaccagacggtgcaccttcactaatattaccattggaaataaccagccatgagaccatgttgatggctccatacacctgagtatatacccatgctcatgaatatcatataaattctatgtcaaatatcagcgatggctaaactttcatatcacctgacgattgacgaataaatctttgcaacctgcatattagcaatcatagcagtaatcttgtcgatgtaaagcctgcacatatggacgatctgaccgtgggtataacactctcagaattgcaccctacacatctgaatacattg

SEQ ID NO: 48830 - DNA, 1767 bp, Glycine max
  unsure (1)..(1767): unsure at all n locations
  Clone ID: PAT_MRT3847_150C.1
ccgcgtggccacaggtgcgtttggacatccgatgagttggtcgagtatagcaacatgggattttgcatatgagaggtaacaggttcgaattcccactcatatgcttggggagaaaggtcaaatcacatgtttaaatttctattcattgtccttactttcttggatccctgtttgtgaagaagcatcagggtcttcctttctttatttctttcgctgatcgaataaaatttccccatttgaaaccccacaagagtgcaattgacaaatagccacacagaaagatagggttttgagatattgcgaacgatgttgagactgttggatgcacactgtcaccttcaggacccgagaatcttaagcaaggcaccccatctcatcaaaaccgcgcaagacaccggcgtcgcgtacttcgccgttaacggagtttccgaacaagactggcactccgttaagcagttggccgaaacatacccttccgtcattccttgcttcggtctccatccttggtttgttaaggaacggagtcccaattggtttcaaacgttgaaggaatattttgattccacaccctctgctgcagttggagagattggtgtggacaaaggatcacacggaaagaagattgatttttctgagcagattgaagtattgaggcagcagcttgaacttgcaaaagagttaaacaaaccagcatctgttcattgtgttcgtgcttttggtgatcttcttgagctaatgaagtttttggggccttttcctgccggtgtcattcttcattcttacctaggttctgcagagatggttcatgaattttccaagcttggtgcttatttttccttctcaggatttcttatgtcactaaaagcaagtaaagcaaagaaaatgctgaagatggtccctcctgataggattttgttggagacagatgcacctgatgcactaccaatgtcaaacatagattctctttattttgttgaaggagatacttctctcaccgaagagcttcttgcccaaacaacaacttcatcaacttctggttcttccctcggtaattcatcccatgtcttggcagatgcttcgatgttgccaaaggaaacactcaatcatcccgcaaacattcataatgtacttgattatgttgcatctatgctagaaattacgaaagaagagcttgctgaattaagttaccagaatgcagtccggttattatcctatgaaggttcgaaagtacttcaaaagtagacaaaacaattgcttcttgaaagagctagcttggcaaagtttactttgggaagttccaaatagaatttcgtctaagtacgagcagatagattacaggaagagttcgctaacatgtatgatatatgtggtagttattgtatccctgccaaagtttattgcattccatatgctcaatcctcattggatatagtaatttttcttgtcttatctacttttaaacattcaatgcaacaaccttttgatgtagttctttcttatttcagaagggtaccccaaatgaaccaatagacgtacaaaataacatggctgccataactacacgaatgcttttggaggaaaaactcataagcgttgcctttcctttccaaaagaagtgattgccaacacaagtgttgtattcaactcaaaatataactaggttctctaattaaatgtaataccccgataaccttgatcattctccaaggacacaaaaaaaaaaaaaaaaaaaanaaggcgccgctctaaggatccagctacgacggg

SEQ ID NO: 48831 - DNA, 393 bp, Glycine max
  Clone ID: PAT_MRT3847_15100C.1
gttttgaatggtttgtaactaaacttaattgttgatctgctgctatttggattgcggattatagttaactgataatggcgcttttctttgagacagtgtgtgcactttgtggataggagaaagcaggagaggtggcattgagagctacctcatatagaggcaaagatgtattgaattttcaggcagacgatgattaatgcacccacggagctgaacagtccagcttgtttgaattcatgcattcatcctaaactgagtcctgagatgctgaaggatttcatgtgcggccattcctacaatgctatctaaatgtggctggggaacgacgctttgctagcctatgacacttcatacaaggactccatcaatgatacgttaccttgtggttaggat

SEQ ID NO: 48832 - DNA, 234 bp, Glycine max
  Clone ID: PAT_MRT3847_15101C.1
ttttttttttattttttttatttttttttttttatatccatccttactcttttacccacccaaagagaaaaaccttttccttcagccataccaccttttcaaaactgaatccaataacacctaaataaatcataaccataactgtttcctctttgtaaatcttatcccctcacaatcccacacaacatactaacctcaacccaaaaataaaaagcccaaccttcctaatgacac

SEQ ID NO: 48833 - DNA, 425 bp, Glycine max
  Clone ID: PAT_MRT3847_15102C.1
atatatttaaaaattattcattaacaagatttttatctcaataacagaaattgaatctatattcttttagagtgaactatattttcttggcatatatgatttaggaaatattcattgtcccaccaattcaaatatgaaactgagttttattaatatatatatatatatatatattagccgggtttaaaaaaggttaataataccctaatgtttttatctacccaatttgccaatcatggagttatatctgttctggtttattcattgaaatttatttcataacaatcacttttgataattagtcttgcaattacgtatgataagattgttaatggatgcttgggatacttttttactacatatcgtgaatttgtcataaagataataatgcataaatgtgtttctagaaactgtatatacaatgt

SEQ ID NO: 48834 - DNA, 266 bp, Glycine max
  Clone ID: PAT_MRT3847_15103C.1
cacttttatcggcattaatttttcagtgtagtttgttgttgtaaaataatgtaatcatcaaaatgatgcatattgttacactactattaactaggcttcagtatatcagtgtttatgtcatagtgttaaatgtatacttgtaaataaaatagctgcaaacctcagtcctttgtgctacttgatgtggcttgcaaagaatagaatccttgtcctgagattctcacttggcttcaggaaggctgcaggtatgattccagaaaccagtg

SEQ ID NO: 48835 - DNA, 355 bp, Glycine max
  Clone ID: PAT_MRT3847_15104C.1
atatttaaacacacttttttgttatgcctcaagccctgtcaattaaataaaaaataatggcagcgcttttcactcttactatttacctttccaactgaaaaggaacatgaactcacctgccgtattaactaaatttaaagatgaaagctaaagcaggtggcacttagctttttgttattcacactgttttggtcgaaaattttcattacacaacaacgaattgctctgggtttatagcctttctgatccctggccaggcctgtggacagttgtattaccaagttactgagcagggatcactcccattgtccatgttttctatgcaccagccaccaagaacaaccatcgcaggacc

SEQ ID NO: 48836 - DNA, 489 bp, Glycine max
  Clone ID: PAT_MRT3847_15105C.1
gcacgtgcctcctatgaggcatctatatcatggggggggcgtgcctatccatagatagtgtgctctcaaaccatttacaaaaaaccaaaatatgcacgctttaacgcctagaatgctactaacggctgtacatgcgatgcatattagaagacatgcaacatatggatgcgttgttaataaatgctgaccgctttaccataccatgacggtatggaaccaatctagactgctgctataggacgaaatgattgcccctaaacaacacgcccactatcgcgagtagggcctctacattactgcacaattctgcttctggaactgcgcctgatagacctcgtactatcaggtgcctaatgcgctttcaggcttgcgcactgcaactttgaccgtactggtgggacctacttcagcatgccaccataggattgtttgctgttgcgcgccattagtctctgcggatgtcatggtccactagccgccgctgacctc

SEQ ID NO: 48837 - DNA, 565 bp, Glycine max
  Clone ID: PAT_MRT3847_15106C.1
gacatattggcccatgacgccggcaacaaactcgagacactctctcttgatgagatggaggggatcaggtgcttcttaacgccaccaacctagccggggacggatgtgccatcgtctatgcttctacattgactatttctggatctgcttccaaaatagctgcagctgtctcggacaaggtgtgatgacaacctgaaaccacactctgatgttggaccaagatcacgatcacgatcatgattgcgaccatcagcataagcatgagcatgacctgaagcaccatcactagcaggatcacgaccaccacgaggaccgggatgatcacgccgacttggctgctgtctccttggaagaactgaaactcaagatcatcacagcggtggagtatgattatagggatgaaactctacccactgacaagtatctgaagggttttggcagccgaacaacgaaaggttcgggcctgatgagaaatggcttggtttgactactttagagctcacgcgagaccatgcatagaatgttgctgcgttgaaggagtcaccactgacatgcgtattggtga

SEQ ID NO: 48838 - DNA, 570 bp, Glycine max
  Clone ID: PAT_MRT3847_15107C.1
tagtttgggtcttttagggcggccgcccctttcgggttataaaagtttttttttttttttttttctttttatctttttattatttttttttttacttgaaaatacaaatcctccatcaaatcttccagttcatttatacaacctactaacgacaaccataattcgtaatattcgatatcatcacaggtaggacatcccttctccatagtttagatggcgtttatgcttaaagaaccttttgaccataactacaaccataaggtaatgttacacatggtaaaattgcaacaaactacaatccaacccaatgatggtttagccctttccccctactttttaatgttttctctagaacgaatgtacaaaatcaaatgctaattcccagacaagcaaacaatatgtaacaagaaccaaatatatatatatatatatatatatatatatatatatatatatatatatatatatatatataatattataaaacacaaaaaaatatcaaggaatatcgggcacaaaaattatcactcggatgaaatgtgcacacccggttatatagtttttacatgc

SEQ ID NO: 48839 - DNA, 332 bp, Glycine max
  Clone ID: PAT_MRT3847_15108C.1
caccagagggagtagtactatacagccccactttctctttccctttatcttaactctaaagcctaagcatccatggccatcggcgcctgcaaagctgaacaccctggctacccagcgaaccgcccacaattccttcttttctaaccaaggatcctttttttgccggggggggtcttccgatcccctccttcttcccaccaacaaaagcaccaaaaaacccgtctattttattgcatctcccggcccgcgcaattctttgaaatggaaaaataaaatgtcacacgtgggaaagcgtggacccctccattgcatgggacaaaactggaggggaa

SEQ ID NO: 48840 - DNA, 490 bp, Glycine max
  Clone ID: PAT_MRT3847_15109C.1
aaagctgaccctgaggaccggccggatccggtcaccacgcgtcgccccttctcccctacgccaccttcgccaccaacgccaccgtacggattacccttattggcgcggttgtctagggacttattgcttgtccgagggctcatgcatatgtcgattaccgcatgcttttcgctgggctaggttgaacctctgacgaccatgccctccatagagccttctctcaataccgctatctgcctgtaactaagattatcaaccattgtgatactggcggatccaggggttgagaatccgcaccttcaactcttatcgaaccatgagagatcccatcggatcaatgaatggacacagactcgtacggtcgaagatagatactgtcaaacgaactgagtcctcagatgactagcactgtctgcacgccaggaacatgcactccacgtggcaggggatgtagaagctgcagatgccttggcatggacgaacaagaata

SEQ ID NO: 48841 - DNA, 410 bp, Glycine max
  Clone ID: PAT_MRT3847_1510C.1
agactgaaaataaaagtaaccgaagctgcggatgacaacacaggctcgggacaaaacacacaacaaattgattagcctataggaatgaaaatggtataaaacctgcaacataagggggggttctaaattgacactgctctattcaaaggaaaataggtcatgttttgcatgaactaaaattattgggcgaaatgcaaaagcacctctcaaaacctagactaacgagagagagaaagatatggtgcaacactcatttattggtaatggaagaatattccctgaacgaaatgaatatacaagccactgagacgcaggtggaggcatcggattactgacaactattctatcttataaagaagctggcacggatgacagatgaccattatacgcgtgcccactatggttgcatg

SEQ ID NO: 48842 - DNA, 166 bp, Glycine max
  Clone ID: PAT_MRT3847_15110C.1
aagcctattgcacaactaaaccctctctctatgagatggcaactagtgtggtgattctcgctatcggcatgtacttccataccacctgtgttcagcactgaatagctggaggctcatgacggtgccagtggagggaaatatactattggacttggccaagattgca

SEQ ID NO: 48843 - DNA, 367 bp, Glycine max
  Clone ID: PAT_MRT3847_15111C.1
cttacgcgtgcgcattgattgaaatggaaactagacccacagcttaaattgttacggtggaccaatgaacaaccccattgctttgttgtccattattgacgccaaggtgacaaacgtctatctgcttcctctgatcctacaactgtggaactgatgtcctttttagagatacagaggagggagacttgcctatgttgtgtgttagatccacatcaaaggacttatgtctactgtcgctttgactatatgttcaaggcggggggaactgatgggggatcatggcctgggtctcgagttgttcatcattcttatagacaaactgcacctggttgtgcatattatgaacaaaagcttggacgttaatctt

SEQ ID NO: 48844 - DNA, 1062 bp, Glycine max
  unsure (1)..(1062): unsure at all n locations
  Clone ID: PAT_MRT3847_15112C.1
gatgattaatcaccagaccaaatgtgcctggtcaattaggggaccgaatttcataactgagtgctttaggggaagaagaagcgaaacacagtgtcagaatctgagttctttgaactcaaaccctaaaaaaaacgatgtatcgttttttgtcttccattcgccatggctgtggatcttccctcacatcacttctcgcgccgaaacccacccttccattcgacgccgccctacgatctcgccgtttacctcaaaacgacggcgcgccgaacctgcacttccattcaactccgctctgcgacctcgccgtttacctcaaaacgacgggcatgttagaggattttctagctcgaatttagattggaggaggcttattgtgaaccagaagtgtgcagatgcaaatgctccagtgtactcttcgaatccctctgctttcatttccgccgttttcgaaatggaaaacaaatttgaagtttagatggcgtcgtttcgatgtgtggatttactcgagactgtggaaatagaaaatcgtgtatgcttataattttttgacggcgtcgtttcgatgtgtggatggatagggattagaggcagtgtttactgttttcaaagagagaaaagagagagagagagagagagagagagagagagaggaaattatgacaaagtgaatgttcgattttggttgctgacttgtgttgtttcgtttgtgtgagttggtccctgaagttgttaatttgttatggagttcactttgctgaagctgttgactatgctgagaagttgttcattaggtctgaaattgtgtgtttagtgtgtgatcctttttaaaatagtatgtgatatgatgttcaatttgtgcatgagtgatttgcccattgtttcctgttatatgcagaaccaaggttttcaaaaacagccggtgactttttggggactccgtgaccgcaattgtggccgcatcgtttctgaaagtctgtcttttccatgacaaataataatttgtggactgcatttgatgggcctttaatttttttagttaattntattactgatttcctttca

SEQ ID NO: 48845 - DNA, 470 bp, Glycine max
  Clone ID: PAT_MRT3847_15113C.1
ttatttttttcaaatttttttttcatttagtaaaagttcacaaaaaatattgcattgtgtattgctactctgcaacaattttacagaaacatttgaagccatttgatacacaggtgacagagaatccaacttgaggagaaattcaaaccaagaaagacggaatgatgaggacataggagaaggcgtgatggaaggaacacagcgtccaaggattgggaagatcaatgagaagaacaagagtcaagaaagctaaagaagctcttcatcaaatggtgccaaatttgatcaaggaagggctccaaagttgaaggcccaaaatgtgaagtgggggagcccaaaataattggttgcattcagattgaagaccatgagagagagttgcatttttatttagtctacttttggaccattttaagctaaataaaagcgtgtatatatttgtgtgtgtgtgataagaaaggacatgattg

SEQ ID NO: 48846 - DNA, 221 bp, Glycine max
  Clone ID: PAT_MRT3847_15114C.1
ttaataacttaatatgtggcatggcattggtgaataagacttcaacccacttaccagaaattcggaattacccacttccgaacaggttccttaaaaaaattcttaaaaaggaacccaaaaccaggaatggaaaccccctttgaaccccccagaattaaggggctgggggggggggaaaggaggccaaggaaattgttggaaggaaaggagaaaggatcagg

SEQ ID NO: 48847 - DNA, 512 bp, Glycine max
  Clone ID: PAT_MRT3847_15115C.1
cgatgccactaatgatagagttactattgaaagcgctgaagctacactcaagtataatgtagctatcaaatgtgctactataactccaggatggacaaagccaatatgcattggaagacatgcttttggagaccaatatcgggcaactgatacagttataaaaggcccaggaaagctaaaattggtttttgcacccagtggaaatgaaggcattaaagagctagaggtctataactttactggtgctggaggcatagctttgtccatgtataatactgatgagtccattcgagcttttgctgaggcttcaatgaactttgcttaccagaagaaatggcctctctatcttagcactaaaaataccattttaaagaaatatgatggaaggacattttccaggaagtttttgacacccaatggaatcacaagttcaaagctgcagggatatggtatgaacaccgtcttatagatgatatggttgcttatgctctcaaagtgatggaggtatgtat

SEQ ID NO: 48848 - DNA, 506 bp, Glycine max
  Clone ID: PAT_MRT3847_15116C.1
gggctgagcctcgagccgattcggctcgagcggctcgagtagcattataaattgttgttggtgcaggcctgttaactctagacgtgtttgtttttactgtttccaacattccaaatcacatccaacgtgaatccgtcattcaacgtgattgaagtatccaacgacaattcatacgcacactaaccttactgagggtgttcattgggaattggttgattccacacattttatttaagccaataaaaaacacaaacacacgacccatttttctcttggtgttgtagaaattgttgtttcttcctctctgagttccaactttcacctcaaccaaatacacaacaaaatggggtttcagaagataagggttggcaaccccatcgtcgaaatggatggggatgaaatgacccgagtgatttggaaactgataaaagataagcttatttttccttatttggagctggatattaagtattttgaccttggccttcctcatcgcgatgccacta

SEQ ID NO: 48849 - DNA, 1849 bp, Glycine max
  Clone ID: PAT_MRT3847_15117C.1
tgtgtgtgtgtgtgtgtgttgttcttgtgcactaatgactaacctttttggtttggatttgggttcggtttttattgtgagcccacgcgttcgcccacgcgtccgcgcacgcgtcatttcccatataagactcataaccgttcgttcgttcgttcgttccccacttgcttttcattttttttctcccttttcgctaacctcaaagagagttcagtatttatacaaataaaagttttttctttttttatttctggttttcgttttggaatggctgggatttgctgtggagttgttggagaagccgccgagacttcttctcccatcgaacccacctcacgcccttccgcacgccggagtttggaccttttgcccttgaaatacatagctgctgacgtgtcagtcccgccgctggagaacagccggaagcgccagaggctggataggcgcgcttctccggcaagggagtgcgataacgcggttcatagttccaaatcgaaggtagttgaggttgttccgaattattcttcgaagagtccaacgttggactccacaagtccaacagttgtcgaggagtatccgaggtatggggtaacgtccgtttgtggaaggaggagggacatggaagacgccgtttcggtccatccatcgttttgccaagaaactttatctcatgataaaaaattagggtttcatttcttcgctgttttcgacggccacggttgctcacatgttgcgacgatgtgcaaggagaggttacacgagatagtgaaggaagagattcaccaagcgaaggagaatttggaatgggaatcaacgatgaaaaagtgtttcgcgcgcatggacgaagaggttttaaggtggagtcagaacaacgagactccaaattgcaggtgcgagcttcagaccccgcactgcgacgccgtgggctccaccgcagttgtggccgtcgtcacgccggagaaaatcatcgtggcaaactgcggagattcacgcgccgtgctttgccgcaacaacgtagccgtcccactctccgacgatcacaagccggaccgacccgacgagttgcttcggatccaagtagcgggagggcgcgtgatatattgggacggacctagagtgcttggggtgttggctatgtccagagccataggggacaattatctgaagccgtatgtaatttcggaaccggaggtaacggtaactgagcgtagtgaggaggatgagtgtttgatattagggagtgatgggctatgggacacagtgcaaaacgacatcgcatgcaaagtggtgcggatgtgtctgaacgcgcagaagccgccatcgccgccctcgtctccgaggagggagatggcggtggactgctccgacaaggcttgctccaacgcctccattctgctgaccaaattggcgttggttaggcagagttccgacaatgtgagcgtggtggtggttgatttgaggagaacctaaaatgggaactgtgcgtggacacccgatgttgtggaattttgtttttgacaaaagaaaggggaagaaaatgcagggtgttgcgtggtgctttactgatttcttgtgattgtaattaaaatagtacttgtagataggtattttaatcaacgggggtgtgtgaaatttgtaattgtcagaaaaattatcaacaaattatgggaaattttaagagtagtgaaaacaattagtgtgtcaaccaagaggtaaatcagcctcctgaaacaccgttgtttttgttgtaattagatatataattgtaattgaaacccagcttggatctataaacgcgccaattttgttgtttggtttgcattaaaaaaaaaaaaaaaaaaaaaaaaaa

SEQ ID NO: 48850 - DNA, 395 bp, Glycine max
  unsure (1)..(395): unsure at all n locations
  Clone ID: PAT_MRT3847_15118C.1
gtgttgtctagcattattgatcgtttgtgtgggtgtgtctgttttcgttgtttcccactttccaaatcacagtccgcgtgaatccgtcattcaacttgattgaagtacacactaaccttactgagtgtgttcattgggaactggttcattccacacattttatttaagccaaaaaacccacaattttcttagtgggtgcttttttggtgaaaaatggtgtcctttctctgaggtcaactttttcccttcagccaaatacacaacaaaatggggttcagaagataaggtggggcaacccatcgtcgaaatggatggngatgaaatgacccgagtgatttgaaactgataaaagataagcttattttnccttatttggagctggatattaagtattt

SEQ ID NO: 48851 - DNA, 220 bp, Glycine max
  Clone ID: PAT_MRT3847_15119C.1
tatatgtcctgttcaagcgattacaattgaggctgaggaacgagaagacggccgccgcaggacaacctcggatgatatcgacatgaccaagtgcatgtattgaggatcctggcaagacgcctgccctgttgaagccatagctgaagggcccaacattgaattagctacagagactcacgacgagcttctatatgacaaagagaagctgcttgaacaggcg

SEQ ID NO: 48852 - DNA, 231 bp, Glycine max
  Clone ID: PAT_MRT3847_1511C.1
attaagaagctcaacttagtaacaacacacactcacagtggtgttgaattttcctcagagagaagagagagagaggatgtggaaactcgtgcgatacgccgacggcttcaacctagcccgatcgcggaggttttacgccgtgaatcccggtccgcgcattgagcacaagcgcggggccgacatactacacgatcccgggttcaacaagagaacatcgttttacttttgagt

SEQ ID NO: 48853 - DNA, 381 bp, Glycine max
  Clone ID: PAT_MRT3847_15120C.1
acgagcttgaattggtccttgcggtggatccccacatgcaatcactgcctcattggcttcctttccttgaaggtgtgtggtgtgaacaaaatttagtttaatttcggggtccggattttgcccaaaatgtcaccccgtaataattacaacatggtttctaggtcctagctcatttagcttcgtgagttatcttccttcctgaacacaaacaagtttttacgtttcggggcttgttaaatcagacccaacataacgtacacacgccgtacgctgtgacaaatgctacatatcatgtcaccccgctttgatcattctagttgacttgatcctaactagctatagccaattaatacctccgtgcaaattcccaaacacagcctt

SEQ ID NO: 48854 - DNA, 775 bp, Glycine max
  Clone ID: PAT_MRT3847_15121C.1
tgtgtgtgtgtgtgtgtgttgggcatgtgcactaatgactaacctttttggtttggatttgggttcggtttttattttgagcagccggaccgacccgacgagttgcttcggatccaagtagcgggagggcgcgtgatatattgggacggacctagagtgcttggggtgttggctatgtccagagccataggtgagtaatcaataaatacacgcgcggcgcattatagcagattggagggttcttatttattttattttattggcgaatgttggttgtttgttgggatgggattccaacccataacctatgtccttccctttttccttcttttctttctttacaatttagaccaaccttgtatctctatcattctgaattattaacgttgtcgtgttttgtgttttgtgttgtgcaggggacaattatctgaagccgtatgtaatttcggaaccggaggtaacggtaactgagcgtagtgaggaggatgagtgtttgatattagggagtgatgggctatgggacacagtgcaaaacgacatcgcatgcaaagtggtgcggatgtgtctgaacgcgcagaagccgccatcgccgccctcgtctccgaggagggagatggcggtggactgctccgacaaggcttgctccaacgcctccattctgctgaccaaattggcgttggttaggcagagttccgacaatgtgagcgtggtggtggttgatttgaggagaacctaaaatgggaactgtgcgtggacacccgatgttgtggaattt

SEQ ID NO: 48855 - DNA, 2071 bp, Glycine max
  Clone ID: PAT_MRT3847_15122C.1
gaacaaacgtccataatgtgttggctagcattattgatcgtttgtgtgggtgtgtctgttttcgttgtttcccactttccaaatcacatccaacgtgaatccgtcattcaacttgattgaagtatccaacgaaaattcaaacacacactaaccttactgagtgtgttcattgggaactggttcattccacacattttatttaagccaaaaaaacccacaatttctcttagtgtgtgcttttttgttgaaattgttgtttcttcctctgagttccaactttcacctcagccaaatacacaacaaaatggggtttcagaagataagggtgggcaaccccatcgtcgaaatggatggggatgaaatgacccgagtgatttggaaactgataaaagataagcttattttcccttatttggagctggatattaagtattttgaccttggccttcctcatcgcgatgccactaatgatagagttactattgaaagcgctgaagctacactcaagtataatgtagctatcaaatgtgctactataactccagatgaagctcgtgtcaaggagtttaacttaaaacaaatgtggagaagtccaaatgggacgatccgaaacattttaaatggtacagtttttagagagccaattatctgtaagaacattcctcgtcttgtttcaggatggacaaagccaatatgcattggaagacatgcttttggagaccaatatcgggcaactgatacagttataaaaggcccaggaaagctaaaattggtttttgcacccagtggaaatgaaggcattaaagagctagaggtctataactttactggtgctggaggcatagctttgtccatgtataatactgatgagtccattcgagcttttgctgaggcttcaatgaactttgcttaccagaagaaatggcctctctatcttagcactaaaaataccattttaaagaaatatgatggaagattcaaggacattttccaggaagtttttgacacccaatggaatcacaagttcaaagctgcagggatatggtatgaacaccgtcttatagatgatatggttgcttatgctctcaaaagtgatggaggttatgtatgggcctgcaagaattatgatggtgatgtgcagagtgatttcttagctcaaggatttggttcacttggcttgatgacgtcagtactggtttgcccagatgggaaaaccattgaagcagaggcagcccatggcactgttacccgtcattatcgggttcatcagaagggaggtgaaaccagcacaaacagtattgcttcaatttttgcctggtcgcgaggtcttgcacatagggcaaaattggatggaaatgctagattgttggacttcacagagaaactggaagcagcttgcattggaacagttgaattgggaaagatgacaaaggatcttgcacttcttgttcatggacctaaggtttctagatcccagtatttgaatactgaagagttcattgatgccgtagccgaggagctgcgaacaagattatcttcacaatcgaagctgtaatgttcaaaatgagtgtgcccaataaatgttctccatttccttcatttttcctttttctttcttgaaggagggaaattctattgcttgagttaaacattttagagcaataaggtcaccaaaattctgatgcatcacttattgcatgttgcttccttcagccataagaactcaacatttgaagaactcataccatgtaccacaaaatcaatactatcttttcattgtcaaaacaacagtgctactttggaagtccttacaacaatattaaagacattgtaaaaaaaaatagggaaaaaaagcatcttcgaatgaatttacatgtctgtttacaatctatatttctcagggatgtcttcaattttctttagggaaagaggaggtggaggcgacagtttgtactgtatattcttgtcaaagaagtatatttttaactgagtatatgacttttactactaaaaatactcgaaatgtatgtaagatcgatcaccaaaattctaatgcatcatcactgattgc

SEQ ID NO: 48856 - DNA, 496 bp, Glycine max
  Clone ID: PAT_MRT3847_15123C.1
actgtacccaagtacctgtacactcctgtcactgtggtgtgtggtgtgtgtgacccggcttggttggtgtgtgttgggttgttgttggtttcggtcttccttccaagttgaggggttccttagagggttcctgcttgctaaggttttggtattggttcaatgtaagtaagtggggtaaggtcaactgcggctgagtggggctactcagaggccactacacacacccaacagcctaacgtaaactccgcttgtgacaaccacgagggtcgtcgtcatcaccacacttgtgcaagtacccctcttgccaaaagtaagggttgtggtctcattgggcctaggccttccaaactccatgcgcaaagtaggctcatggataaacctttgcatacgattgcaaataataatgcatgagcaactggcttcgtccagctgctttcgaaacggcagctgtgaggctgaatgcaggtgaagctgggctgtgcgccaagttgtatac

SEQ ID NO: 48857 - DNA, 457 bp, Glycine max
  Clone ID: PAT_MRT3847_15124C.1
gttttaacaaatgaaagaagtcatggagtgtgttattaacaaatacacttaatatttaaaatatattccccttgatttggaagtattattgctagatatgttggtgtgtgaaactcacaaccataagggacaacctgaatatcaagataattaaaattcactataattcttcataagaaaaaaattgacgatgacaatgctgatatagaacaatatagaaaaaaaaatattgcacctgaacttacttaactgatgctaatcttgcaaatctcacttcctcaatggctttgtgttggttggtggtaagctagatagttttgggattgaaactaaatcattctctgtattaattaagtgcttttaacttatgcatcaatatccattatatggagccttatatatgagaatatgtgatccaggaccagctgatagtgtaatttattgatgcagcttatgc

SEQ ID NO: 48858 - DNA, 412 bp, Glycine max
  unsure (1)..(412): unsure at all n locations
  Clone ID: PAT_MRT3847_15125C.1
agggttatagatcaagaggtgaggatttataattcaacttattcaaagatttaataatgatatgatactttacaaaaaaaacattcttctaacttaggtacctataaatggttctactagtaaaaaccatcggagtacaaacgatctcaactaagggtgagttgaaatctaataattaatatattgacaatatcatttttgttagcatatgatatagcttgtagtgtatccgtactattaatgtatgtagtaagttgacatttaatgattaatatgttgacaactagaggtgattatttataatatcattgattcttcttattaatccaattcacaaactcatagcttttatgtttatccttttatatgacagaagtncaatctagtgtttatagcccaatctagtcaaatg

SEQ ID NO: 48859 - DNA, 317 bp, Glycine max
  Clone ID: PAT_MRT3847_15126C.1
ccaaataaaaagtgaatgcttggaaaagtggaggttgtggtacttattagccaagcggggaacatgcaaagtcaacatacagtgaaagaagaaaatcattaatgtccacctccatgatgtcaacctattcccgatcagtcaccattatcgacacatccattcggatgggctcatatggatcgctattcttgtcgtcgcctgctttcatattcacgatgtgccaaacatgtcatatgttcatgctgacaaactgtcaacattgtattataagctgatcaagttttgcaagttaaatttatcaattgtgcagtattgct

SEQ ID NO: 48860 - DNA, 321 bp, Glycine max
  Clone ID: PAT_MRT3847_15127C.1
accatgatgacatttgcaggccatgttgtgtagtctaggtcttggaaaatacgagctgttagcaatttggagacttcttgccatactgcttgacacctttcttcctccatctttctttttctttgaactataggttttgcttctcagcatatggagagtttgtgacaatggaataaaatatcggtcaaactcccctaatcaataaatgtcttttgaaccacgcacttgttgatctcgacactgatcaccactggatcgtcctgaaccggatatatcgccttgaaatcagatgtggtaaaagtgattggtggcttttttggg

SEQ ID NO: 48861 - DNA, 1051 bp, Glycine max
  Clone ID: PAT_MRT3847_15128C.1
gcacgaggttgggaagaaaaacttgttgggcgcagacaaggaagaaacctaagcggaagccgaagagcaaacaaattaaacagacacggcgtgtgtgtctgttttagggaacacggcgatggtgttctcttcgaaccccttatccctgagcgtccccgaacccgccttcgagtcatggctccgcgacaccggcttcctcgaagtcctcgaccaccgcacctcctcctccgccgcagccgcctcccccgctccctcctccgccgcctccaccctcttctcccgcctcttgaccttcctctccctcttcaccctcaacgccttcgccaagctcgccgccgatgacttcgccgccgacaccccctcctggtcccgctccttcttcgccttctccgattcctactccttcccttcctccccctcacaggcgcgattgagagttcaggaaaacgtgaaacgctacgcccgcaactacgcctatttgttcattgttttcttcgcctgcactctgtataagatgccggttgctcttgtcgggttggtattgtgtttggcattgtgggatttcttcaagttttgtagccacagatggggattggagcagtatcccttgacgcgccagattttgattcgtgttgtgcaatgtgcaactgcggttattctaatcttttccaatgttcaaatggctctcttttgtgccatatgcgtcagctatgtaggaatgatacttcatgctggatttcgaaagttgacccctgtaaagcaaccttcagtgagcagaggtaggtagttgactaatcaatgaaactgtggtgaacgctttgtccagcacatcttacttcggtgattcaagggcctttgttatagaagattcctgtgcttacaatgtagagtttaagggacaggactttggtacagaagattgagcaatgtacaaaagggtggattatatacttgtggattaacattgatcaattgtttagaataaattctttgaattgttacatatatcaattattgagattattaatttattcatagcacttgactagtt

SEQ ID NO: 48862 - DNA, 964 bp, Glycine max
  Clone ID: PAT_MRT3847_15129C.1
ctataataaagccatggaagctcaaacctggttcttggttattgccttattcctcttccttctactgaatcggcttgcaaaatatctcaagccaaaacctaatgctggtcacaaacttccccctggtccaaaaaagctacctctcgtaggaaacatgcatcaactagcagcagcaggtccactcccacatcgtgcactccgagaacttgctcataaatatggacctctgatgcacctccaacttggtgagatttctgcagtggtagtatcctcccccaacatggccaaggaaataaccaaaacccatgatgttgcttttgtgcagagaccacaaatcatttctgcacaaatcttgtcctacgggggattagatgttgttttcgctccatacggtgattactggagacaaatgaggaaggtgttcgtgtcagaacttctaagtgccaagagggttcagtctttctcttttattagagaagacgaggcagcaaaacttatagactcaattcgagcatcagaaggttcaccaatcaatctcactagaaaaattttctcattggtgagtgcttctgtttccagggcagcaattggtaacaaatctaaggaccaggatgagtttatgtattgggttcagaaagtaataggatctgttggaggattcgaccttgctgatttgtttccttcaatgaaatccatacatttcataactgggtcgaaggccaaattggagaagctgctcaatagggttgacaaggtgctggaaaacattgtcagagagcatctagaaaggcaaataagagcaaaagatggcagagttgaagtagaggacgaagatcttgttgatgttcttctcagaatccaacaagctgacactctcgacatcaaaatgacgactaggcacgtcaaagctttgatattggatgtatttgctgctggaatcgatacgtcagcatcaacactagag

SEQ ID NO: 48863 - DNA, 374 bp, Glycine max
  Clone ID: PAT_MRT3847_1512C.1
ggacaataaaatctttcatcttcattttcttgtttctgtattgcatggatacaaaactaggcagttcaatacatccaatcttacgaggaattttcctcgccatatttgaagaaaatagaaagtaaaaggaaaaaatggaacatttagaagtggaaaatgaaaaagaaaagcggtaaaaaaaacatgatggagatctgccttccctctgagtatgataatctcaagacttcctctttggttaaaaaaaaaagggggaaaattgatctccctttgtttatattatatggtcactttcatcactttctctggttaacaaatttaaatatctttggaagagttatttttccatatttagcaagttgcttccatgccat

SEQ ID NO: 48864 - DNA, 196 bp, Glycine max
  Clone ID: PAT_MRT3847_15130C.1
aaacatcacataataaagttggaataacatctacagaatatacatggttgagtataacaataacatacttttttttttttaatagatgacatcaatagcaaaacactgtacaaaaccattttcttttaaccattgaaaaaaggtacattaccacctcacagttaattaagactaaaaaaattgacacaattttttg

SEQ ID NO: 48865 - DNA, 353 bp, Glycine max
  unsure (1)..(353): unsure at all n locations
  Clone ID: PAT_MRT3847_15131C.1
accttcacgcagcntacgtaanctcggaattcngctcnagttcaaaccttgctctacactacacacnacnaaccaancanntgnattcancatnacnatggctccancgnagactnanncanaccncgncncancccccatnctanagcnacancagcantnncangngccnacggnngnctncagagaagccnncancggcntngtgcacntngaananacnncgcgtgcannnngnnnngcacccngntcnttgnnangtncacgggacagtgcntnnggnggacnacnnancnnaacccnaagncagctnntttgngnttcannnacncangncccngngaagtcngtgt

SEQ ID NO: 48866 - DNA, 308 bp, Glycine max
  Clone ID: PAT_MRT3847_15132C.1
tttagaggtaaacacaggactaaacacgagaaaaacatggcttggacagaccagggctatatggaggtgattagaggtggacgcctgcctgctgatgtacacgataagcgagcacatgagtgagaaaaacatgtcgctcatgatagcctcaaggaccatattactgatgccgacccggtgtattctactaaggatgatagaaattgcaaaaatcatcaaccttacacagagagttgatggtgagtcacaaactggacactgaccccaaggcatgtgagggctaagcacattccggtgtctaatattac

SEQ ID NO: 48867 - DNA, 591 bp, Glycine max
  unsure (1)..(591): unsure at all n locations
  Clone ID: PAT_MRT3847_15133C.1
gcttcgccgtcaccttccaagccatccttccttttcgtcacccaagacaagagaagataatccgtcaagatggctccctccaacctgcccgccctcttcaacgctaccagccaggacattgagaccctcctggctgctcagtgccacctcggctccaagaacctccaggttcacatggagaactacctctggaagacccgtgccgatggtgtcaacgtcatcaacgtcggcaagacctgngagaagatcgntctggctgcccgtatcatcgctgccgttgacaaccccgccgatatctgtgtcatctctgcccgtccctacggtcagcgtgccgtcctcaagttcgccgcccacactggtgccaccgccatcgctggtcgcttcacccccggttccttcaccaactacatcacccgatctttcaaggagccccgtctgatcatcgtcaccgacccccgcaccgacgcccaggccatcaaggaggcttcctacgtcaacatccccgtcattgccctcgccgacactgactctccccctggagtacgtgacgttgcccatcccacccacaacaagggtcggcacgctatcggt

SEQ ID NO: 48868 - DNA, 722 bp, Glycine max
  Clone ID: PAT_MRT3847_15134C.1
cccgggtcgtgagctctcgctctcggatcagaagagaagagaagagtgaagtggtgtttggaactgaaaatttgaactctctctttaacgaaacaaaagcactttccacgtgcttcgatggcttccgttcccggatctcgatccggcggcaaaatcgtccgaacgcgccggagcgccgccgcgaggagccacaccccctacgaccgacccgctcctccgccggagcctccgagccctaattggctctcgcgtttcgttatctctccctcgcgtttcattgcttctggcgccggaaaaatcttctcctctgttttggatctcgacaattctccttctgattcttcctctgctacttgttctctctcctcttcggctaacgattccgatgctgaggaagttggtactttcgatgatgaaaatgataacccttctgaaggtgatgtggcgttgagcaagccttttgtcaggaatagcaaaaacaagcatatgattgagcaactacttatgaaggagtcattctcaagggaagaatgtgaccggttaataaaaataataagatcaagagtggtagatcctgcaaatgatgatgatggggataagaggccaacggatatgtccaacaagattcttggaagtgattcacctgagctccatgatgttgccattatggaggcaaagaaatggctgcaggaaaagaagtcagcattagatacaaatacaga

SEQ ID NO: 48869 - DNA, 1510 bp, Glycine max
  Clone ID: PAT_MRT3847_15135C.1
tctgatcccataagagaatccaatccgttaatgcagttagaggcttctattaactcacttatctgtctatctccttccccaccaaaactcaacacaacaacatcactcttacagcttccgaaccctccatcatggccttgtcaagtccacacatacaaagattcctcttatgcaagcttcatagccgctccaccgccaagaacagacacagaaacagcttcaccgccacaaccaccaccaggagcagttgctgctctgccatagccattgatgctccgtcgtctttgaccgaagtgcccggcataagatgggggtccatagccttgcagggtctccgtgaagagatggaggatgatattattgttcgacctgagggccttcagggcttcacttttgcagctgtgtttgatggccatggagggttttcttctgtcgagttcctcagtgcctactacagggatgagctgtacaaggagtgtgttgaagctttacaaggtgggttactattagtcgagaaagatttcaaagccattaaaagggcattacaggaggcatttctcaaggctgacgcgaggttattaaaacggcttgaaatgaatggagaggaggatgaatcaggtgctacatcaactgccgtgttcattggagatgatgagctgctaatttcacatattggtgactcatcagcggttctatgtagatctggaaaagcagaagttctgactagtcctcaccgtccaattgggagcagcaagacttctcttcatgaaattagaagagtcagagaagcaggtggatggattaacaatggtagaatttgtggagacattgctgtatctcgtgcatttggggacgtgcgattcaaaacaaagaagaatgagatgctgcaaaaaggagttcaggaaggaagatggtcagcaaagttcatttctcgtgtacaactcaacaacgacttggttgttgcataccctgatatttatcaagtaactcttggctcagatgcagaatttgtagtattagcatccgatggcttatgggattacatgagcagctcagaagcagtttctttagtgagggatcaactacgaaaacacggaaacattcagctagcatgtgagcctcttatagctgccgcttttacatgaccaactcagaagcagtttatatagtgagggaccaactgcgaaaacacggaaacattcagcaagcatgtgaagcacttgcagaagccgctttggatcgacgtacacaggataatgtcagcattataattgctgattttcggaggacagactggaagtacgcgcctctggcgcgacatactactcttcttgagctggtccacgctcttgcaaccactgcaattctgtccattggaatctgttcttgcccaaagccttcttaacaacttagtttagtgcaagtagtattcttaacactaatttatcattctgaacttctagcctgtataatcttaattgtacatgcctcacatcttagaatctacttg

SEQ ID NO: 48870 - DNA, 354 bp, Glycine max
  unsure (1)..(354): unsure at all n locations
  Clone ID: PAT_MRT3847_15136C.1
gatcacacaggccccaagcagagcatgaggcagagcagaaccctggcagggagagagctaagatcaacgcaancatacaagaggtgagtgcacgggcaattgacacatcacctgccgcagccgaaaggactaagtcggaaccctaccggaacccaagagaaacgaagaaactagacgatgagacacataatgaaggagacaggaaaatgaacgagaggaagagactgactcgtcaaagacgcctgatttgaacatgagatggaaggagacctcacggtcatatgcggctgagacccttgctagatgcctaacgagtcactagaagatagcacgactaatggaaatcacatagag

SEQ ID NO: 48871 - DNA, 141 bp, Glycine max
  unsure (1)..(141): unsure at all n locations
  Clone ID: PAT_MRT3847_15137C.1
ttttttcttcttccctctctttctctaacagcaantncattctctcactccgantgctgcatcggcttcatggcagttacactgcgcagaccaagagcaacttgcnnccgttaagntcttcgnattgttggcnntcggaag

SEQ ID NO: 48872 - DNA, 372 bp, Glycine max
  Clone ID: PAT_MRT3847_15138C.1
atttcatttatggatggagtgacgctgtcagagatggagcaagggtgcacaaaatggttgaacctcttctgcctctgtttcaacgccagaaatcatcatgtccctctgctttgttctctatcgccatcattgtgcccacatcatcctcctcctcctcttttctctttcaaccacccccacacaccccacatacctaaacccaccaccatcattactactcctcacacctcactacaccaaaaagaaaaaaaaggtaaagaaaattatttagaagatgaacaagatctcaatattccttccactctcatgtgttgttgttgattgaagaaagaaaaaaaaaaagctagccaacatcatcgatatcactttctt

SEQ ID NO: 48873 - DNA, 400 bp, Glycine max
  Clone ID: PAT_MRT3847_15139C.1
acgagcttcatgctatggatgttgattcataatagtgcatctgttgccatctgaaccattatccagtagcttggaaagggctccttggaaaaggaatgaactctcattgtagtccttggaaaaggaatgaactctcattgtagtccttgagattgtaagctttagttttgctagtcattacctcacgaaaccttcatttttagtccgactttacaaaacgttattccctttagtccttgttcattacactttccacttacattttgcaaagaactaaagtgagttagggtgtgtttggaaaccctttttgattggttttgaatgaaagttttacactttccaatgcataaacatagaagcaatgtgagtattggattgatgttgaacacgggttaagttg

SEQ ID NO: 48874 - DNA, 140 bp, Glycine max
  Clone ID: PAT_MRT3847_1513C.1
ctctcttgttcttccaggggggcaacggaaggggtacacccgtccagtggaaaaccaccgcttgtctgcgaacaagtttcgggcgcaagctccgcctgttgccagattgtgactataaccattgctcaatataatatact

SEQ ID NO: 48875 - DNA, 473 bp, Glycine max
  Clone ID: PAT_MRT3847_15140C.1
gtaccaagaaaaatgcgacactttaccctctcttacaaaaaacatagaaaaagtgctaacaacatgcctggatacaaacatatatggagacctgttgccacatattcttggacaaaaagcgaattagatcgttgagacggacactacaatgccataagagagggtcatcctcagctgggcatggggaatgacttagctatgacggggcacctaatggccattacaaacacacaggactttgatggatttgcccgacaagggcggtgcttactcccctgactgttcgttttggaaggaccacttgtaatgggaacccggactttgaaaaagaccactttttgcaaagggataacccctctactgccttgttaagtgacagaactctcttgcaattggagcctcctataaagacacagcccttcggcctttgcctggtttaaacgatgcttcaagtagaggctatctgatgctac

SEQ ID NO: 48876 - DNA, 426 bp, Glycine max
  Clone ID: PAT_MRT3847_15141C.1
cagtttcaggaaacacataaacaccacaaagcatcgcaatttcgttcaagaaatgagcaccgtcagcagatcacagtttcattcaacgaataaaaacctcagcagatcaccagcttcattcagcaaacaaaatcctcagcagatcacagcttcattccacaaatggaagtatctgatactatgtatttcattccaatgcttcctattatcttgttgatatccttcttgttgttaagaagcacagtttgctttagacataagttttttgatgtgaattcttgttatagttatactgtagagctgctgagtgcttatacaaacgacaataagcttctgtttctcatgtggagacatgtgtttaaaataagaaagaaactgtaaggagacaatgaaaagaaaactggaattcatactttcctttaaaaa

SEQ ID NO: 48877 - DNA, 1025 bp, Glycine max
  Clone ID: PAT_MRT3847_15142C.1
acgacagaaggggaacaacgacttaaggcattctctcttctattctattctaaactcgaaacaatcttagagaaagaagcagaagaaaatgccgatttctagaattgccattggaaattcttcggagttgaaccaatctgatgcacttaaggctgcactagctgagttcatctcaatgctcatctttgtttttgccggggaaggctctggaatggcttataataagctgacaaacaatggttcagcaacaccagcagggttagtggcagcatcactgtcacatgcctttgcactttttgttgcggtctctgttggagccaacatttctggcggtcatgtaaaccctgctgtcactttcggtgcctttgttggtggccacattaccctctttagaagcatcttgtactggattgctcagttactcggctctgtcgttgcttgcttgctccttaaatttgccactggtggactggaaacatctgcatttgcactatctcctggggtggaagcagggaacgctctagtgtttgagattgtgatgacttttgggttggtttacacggtgtacgcaactgcagtggatccaaagaagggtgatcttgggataattgctccaattgcaattggtttcatcgttggtgcgaacatcttggcggggggtgcatttgatggtgcatccatgaaccctgcagtgtcgtttgggcctgctgttgtcagttggacctggtctaaccactgggtttattgggtcggcccatttgctggtgctgccattgctgctgttgtctacgagattttcttcattagcccaaacactcatgaacagctccccgtcacagattattagagcttaactctctgccttcctttgttgtcactgctctgtgtttttttgttttgcatttgcttgttttcaaatgttggttctctgaactttgtaacatgaacatctttttctttttttttcattatgaaatgttcatttcatctaaactagaattattgtgttagccaagcttccttgc

SEQ ID NO: 48878 - DNA, 148 bp, Glycine max
  Clone ID: PAT_MRT3847_15143C.1
gaaccaggaagcagcacaagtcataaaggatgcttaggcaaaaggtcttgatcactattaccctatggctgaaagattgaccatcaggtcagaagggaagctgatcatagagcgcacagctgagggtgttgagcttgctgaggctgaa

SEQ ID NO: 48879 - DNA, 629 bp, Glycine max
  Clone ID: PAT_MRT3847_15144C.1
cggacgcgtgggttctattctaaactcgaaacaatcttagagaaagaagcagaagaaaatgccgatttctagaattgccattggaaattcttcggagttgaaccaatctgatgcacttaaggctgcactagctgagttcatctcaatgctcatctttgtttttgccggggaaggctctggaatggcttatagtaaagttcttcctatttatttattcaactttatgttggttggaacatgcatgtagtaatatgtatcaagagttttatacacatccaactataaataagtttactgacttctacgataacacataactacgttaaaagtcacgggaacaatgatttctaattagtaaacatagaaattaaactcgtactaataacttgtgttatgcttgattggacagataagctgacaaacaatggttcatcaacaccagcagggttagtggcagcatcactgtcacatgccttttgcactttttggttgcggtctctgttggagccaacattttttgcggtcatgtaaaccctgctgtcacttttcgggccttttgttgggggccacattacccctctttagaagcatcttgtactggattgctcagttactcggctctgtcgttg

SEQ ID NO: 48880 - DNA, 261 bp, Glycine max
  Clone ID: PAT_MRT3847_15145C.1
ccacatcgaaccactatcagtctcacgttatttatccactctcccgcgtgctttatctgaggagaaaaccttgcgctctgcttctgccaaatcaattaagctctcctctccttggaccaacgcttccttgacttccccaaaccgtttctcgaaagaagtatggggttgggtgaactccaactccaagggcgtcgccctgagaagggacaccctccgagtagtcgtgagggctgaaatgtcccgccaagtgactagaggcct

SEQ ID NO: 48881 - DNA, 514 bp, Glycine max
  Clone ID: PAT_MRT3847_15146C.1
gtataataattgaaacaataatttataataaaataacagtataaaacagtgcatcacattaaactcaaattagaatgtatgggtatatataatatactttcacttatatttgttacaacattgtcaaaaatatttgattccaagtatctggaactccaggcaaacaccaatgaatgcaatctgcatttcttggattggccttttcctcctcagtcaatagctttcccccggtttcagtgtaaacagaggaatgtgcatcaatcctatactctgagatttgtgttatgttgataaatgtcactggaactttcattttcttcaccactttttccaccacgctcatcatgcccttattagagccacttccccaatgattctttttccctattggctttgtctcgttgaaacatttgataccatctttgttgccccagtctaagcttcttgtgtgtgttggggacatagttgtgaagaagacgctggttttgtttggataatagttgaatcaacccaa

SEQ ID NO: 48882 - DNA, 459 bp, Glycine max
  Clone ID: PAT_MRT3847_15147C.1
ttttagaaaatgaacgaatgtttacttaataatgaatgacaaattcatagaggaggaccttcaacatgattgatccgatttgagcattgttatggagccatctcaacgtcagtgtccataagctgcgagatagcaaacgtcaatttgccgttgacctccgtgatctccacttgagtcttggcatgaagctgaccggagataatgagtttgctcaagtccgtaacaacgtgcttctcaatgtatcgtttgatggggcgtgcgccgtactgcggctcgtacgattcgtcgaggatcacgtccagtgctgccgtcgtcacgttcactgaaatctgcgccttcttcaaccgattgatgaccgaatcaaactgcaacagcacgatctgacgcagctccttgcggcccagcgtttcaaacacaacaatgtcgtccagacggttcagcaactccgggcgaatagta

SEQ ID NO: 48883 - DNA, 262 bp, Glycine max
  unsure (1)..(262): unsure at all n locations
  Clone ID: PAT_MRT3847_15148C.1
nacgcananaanccaccgccggtgaacggttaaangccttccgggnaaaatnttanatntnccccgnggaaccccgnggttaacacntnggccaaggggccgnttancnccaagnccttttttgccccccttaatgaaggttggangttnccgncaatnttaaggaaggcntnttggggccngtnaaattgccantaggggtggccaattaaggcttggatgtntgcccttgggtaggtngaaaaatttccgttatnaattc

SEQ ID NO: 48884 - DNA, 491 bp, Glycine max
  unsure (1)..(491): unsure at all n locations
  Clone ID: PAT_MRT3847_15149C.1
tcctctagagcagccgcccttggtttttttttttttttttttttttttttttttttttttttttggggggataaaaacaggaaaggataattttttaatgggatgctcaagcttgtcccccttttaatataagacaaaggaaaaaaacaagtacatccccttctgggggggtggtaacaatgaggcccacaaaaatccatatactagggtggcaatagagactgcaaagtaatcatcacaattttacatgcttttcgctacagcctacgggaaagctcggacaagcaaacttgcttggggagtaatgctgactcgcataagtaggccattacctcacttaaaaaggagggccggatcaatgccttggtgggggcgggacaacacaaatgcanatcatctgtgacacttcttaaaaacgtgaaaaaaaataacccaataaatcaggggaaaaacctactttaacttcctgagccctgagggcttaaatatac

SEQ ID NO: 48885 - DNA, 610 bp, Glycine max
  Clone ID: PAT_MRT3847_1514C.1
atccagcccctttgcatagttctgttgcagaggcctagaatcattgtgccaccaccaagtgaagtgaatctcttagatgatggatatcgatggcgcaaatatgggcagaaagttgtcaaaggcaacccatatccaaggagctattacaaatgcacgacccaaggttgcaaagttcggaagcatgttgagagggcttcaatggatcctaaagctgtcataacaacatacgaaggaaaacccaatcatgatgtgcctgcagctaagactaatagccacacacttgccaacaatagtgcatcccagctaaaagcacaaaagtttgccatacccgacgtgaaacatagttccagcagcaggggtgttactggcaatgagcagcgacctgtggcaagtctaagattgaaggaagagcagatcacatagctttcttagttcataactttaggcgtaaatagccaaattcgtctttgaaagtgtgatgggttgacaaattagtccttaaaagatgaaaattttaaatttaattcttgaatgtacaaaaaaaagtgtgataaattaatgcgccaaaaaaaaaaaaaaaaaaaaaaaaaaaagcggccgctctagagga

SEQ ID NO: 48886 - DNA, 417 bp, Glycine max
  Clone ID: PAT_MRT3847_15150C.1
ccctaacaccctagtgacgaggcacctcccttcccgtgatgatgatacctccttcttgcaatgacatatggttcaccgcaacaattcctccttcttcgacaccacctctttccccttgtaccttcctcacaacatcgtggctctttgtttgccctctttcctttgtgcttcgctattgatgagatcaacacaacaaagatattggaatctccatcatgggttgatcattgataaagcttgaagaagtattgatctgcatatcaaaggtgtattcaatccaactttttatttctttctagttttttttaaatcttggttagggttaccaaaggattttgagttgatagggtttcaactcttgatttttctcttataaggttcaagggaaaagtagatttaggaaattacatgtatata

SEQ ID NO: 48887 - DNA, 269 bp, Glycine max
  unsure (1)..(269): unsure at all n locations
  Clone ID: PAT_MRT3847_15151C.1
cnnnaacaaatcagacnacccaaatctatcgtctctacgctcctcttcaatcangcgngccatntgctcagncgcccaggctgaaaaggantatattangggtgagatgctantagttgancaacatgaantngggagatgaacaacttccatgnttgctcctccctcaaaagatgatatggtttcgngtnttangncnttgnaggctgcttgggtnccctnttngcnngccagagatcttcaagcatgagaccgntccccnnancntt

SEQ ID NO: 48888 - DNA, 681 bp, Glycine max
  Clone ID: PAT_MRT3847_15152C.1
atcatccacatgtatatgacatcgctcacatgacacacttaatagtcttaaaaagaatggtcaattaacaaattaatatgattattgtattcttatagcattttttttcacatgtatcctccagatataatcctattcaaagacatgtttaccagcgagaattcaaatcatggttcgctacattgcggggattctaactccctagcttccactagacccctatgagttatatgcatgcttatagtcttatatataacgtcttaaaaagaatatgctcgcttataaatatgatattaggatgagattatgcagcgtgactttatatgtaacataaaccggtggcttttttataagtgttataaaacggaacaagcatgcatgccggagttgcctacgtcaccaaaaattattaaacattagatggtgaaaaaggaaagagtaaattaaacatacctccggaggttttaaaaaattaatgtcttctttttatttttaaaatctatacaaattctttttaaattttaagtttcgtataagtataagcatttgatagtaataaactatcttcaaaattatttttggttgacaattttgattaaaaaattattactatcaaatgttatatgttgataattttgattaaaaaaaattaaaaaatttgatactttctacaagaaagta

SEQ ID NO: 48889 - DNA, 473 bp, Glycine max
  Clone ID: PAT_MRT3847_15153C.1
tacggctgcgagaagagacagaagggtcatctgtaatacagacaggctttgaatatagctaggttcattacatagtcaactacaatttgtatatattggtgaactcaattcttatctgtttttatcacgttcagaatgcagtgcgacagcaattgtatttgttcgaacttagcctaacttttcaaggacacgtcacctcttctcttcaatagctgcctggataattctatgggcgaaactgccaaagcaaagcagtaccggagggaaaatccaaaacaggaatggatcggagctatacagttttttaccatattacaagtaaaaatactataatgaaagatgactcattaatattaactagtacaaatttctgtaaacgatattttaaaatattatattttatcaattacatatattatttttattttttctgtttacatataaaaaaaagtcatcatgagatctaattcaat

SEQ ID NO: 48890 - DNA, 1284 bp, Glycine max
  Clone ID: PAT_MRT3847_15154C.1
actgaattgttgttacattttttttttttttttgggaccaataacaactatgtatattatatcgtataataagttaaatcgatgaatgctgtaaatccattgggggaaatttggatggagaatattcagccacagcattctcaacagcagtctcattttatacacaaaggaaatactagaaaaatgatggaagaatgaaactctatcagggcgtttgaatgtctgttatgagttattacattgttggcacaacttgacaatagtggactcaaaggacctctacatttgactgaactagtttcttctaccaactaaaagtatcgcgttcaaagttgaatctatcagagtctacactgttgttctttggtttccatctccttcacactgtctaatatgttcttctttggcttccatctccttcccactgtctactatgttcttctttggcttccatctccttcacactgtctactatgctgctgtattttctttgaaaggttctcgttctgctcttcaatttgctcaaatatcaattcaagatgccttttataggccgcagatcgctttttctcagttgccaactgctgagatagttcccgaattttatcttgttcagtctaaaaatagcataaaaaaaaagaggtaattaggataaaaatgaactgaaaaggagtgctgacgtacgatatttactaatctcccaagcagaagcttacttacatgcatctgctggagctgcagaccaaaacgagtaacggaattagggctcgggcactgaaaatgacgatactgtaggaaatgcagattgattagtgatcctgccagaagaatcttgagtcccattatcatgttgatcttggttgtcatttggttcaacagaacttccaccttctctgttgtcatccgctatgctactaacctcacctatagcagtatttcctactgtttcgacagtaccagagccatcaatctcaacctccactttaatcccagcaagcagataatctattgcatacattgattccatcgcattagtgacacgtaataaacatgagttactgaattatatggtctcaaaaataagatcttcgcaatttctatgatggagggaagatgggtgcaacacagcaatcatgactcatatcatctttatctactgcaacaagcattccaaatttcattaagtttccacatgtctgaaaattagatcgtggtggaaacggtgtgtgatgacgatgattatttttctatcctctgtttcgtgctcgagccgaattccgagct

SEQ ID NO: 48891 - DNA, 264 bp, Glycine max
  Clone ID: PAT_MRT3847_15155C.1
gaaagaaagttttttgtttggggggaaagcggacgctaattgttagacatttatttatatatctcctcataccaaatacttgtggcacccaaaagtttttttcacaatcaattgattcgggttttaatcaaccaaagatggccggcatggcgtctaaggtcccaccaggggggccgataattcacccgggtaaagaacacgaatgaatccactcccacaagaagagagccgatttatagattggtgcattttaaaaacagacgt

SEQ ID NO: 48892 - DNA, 795 bp, Glycine max
  Clone ID: PAT_MRT3847_15156C.1
caagtcgttaataaaaccaatggaactagatagtggttgttttgtctaacagatttaaacatatgttaaaagaaatgcattaatcagcaacttcaaaaaaatagtagagggaaaaaaacagaaattacctccactgccaatttaaactaactccccattgagaaacactactaaatctgattaagcataaaaagtaattaagctgactcaaacctacaaaattacaaattaacaagactaacatgaagttcaaaagtaaaaacagaaaatcctgtgacagaataatgaacaataacctactgcactatcctggaatcaaagcatgcaatcagttcttgcaggcagcctcctgaagaaattcagcggcaccgaaggaagcatgtaacgaaacctcggatgtctcaaaacataaattccagtaaagagggccacaacttggaacggagtgacatacagtacagtagcagcaaccagacagaaaatcacaaatagtgatgtagctctaggatcacgccaactcagcaaagattgcagcctttcaccctgagtggccaagtccccaaccacagtttgaatcctaccagcaatgcttctaagtctatcatatctcatcctcacgaggtcatttggccgggaggtcgggaatgtgtcaaattcttcatcaagttcatcaggatgcgctgaatccgcgtgagagagacgcgtgtccatgtgaggagggtgccttggcctccatctatagtaccaaattccaatcaagaagaggtaaaggaaaattgcctcgtgccgaattcc

SEQ ID NO: 48893 - DNA, 773 bp, Glycine max
  Clone ID: PAT_MRT3847_15157C.1
gagtagttttttattttctgctttcaaaacccattgagttgaatccgatgacggcatgactcagtttttcattccataaaatttctttaccttaacttccgtagtagttcatccttacaaaaaatctttcgtagcttctttctcttcctcctttttgggtcgtgagtgtacacgcatcacgcatggcagctttccttcgacgggctcgagcacgatggaaggtgttatcttcaccaccctgacgggatagcaaatctttcatgaaattgagaattgctgctgctaatagacaagcttccattaagatgggggagttcaccgggagtggtgagtatgtgactcacggtgaattaccttcctccaggccaaatcattcaaggaaagttacagttcttcctcttgtgtttctcatcttctatgaggtttcaggggggcctttcggggtggaggatactgtgcacgcagcaggtcctctgttagccctcattggattcttgcttttcccattgatatggagtgttcctgaagctttgatcactgctgagatgggtaccatgttccctgaaaacagtggttatgtgggttgggtttcgtctgctttgggtccctattgggggattcaacaaggttggatgaaatggctgagtggggtgatagacaatgcattatacccagggctatttcttgactatctgaagtcaggaaatccctgctatatgtggcggattgcccagagttattgcaacatgggggcttactatggttcttactta

SEQ ID NO: 48894 - DNA, 457 bp, Glycine max
  Clone ID: PAT_MRT3847_15158C.1
ttcttgttcaatacaatttttattttttttcagtggaaaaatggctagttagtggaatgtggagttgtgaattgtgatagtgccaaacttaagctccgtaaccgtgactgcttaccattgccttgagaagatactgctgatcaagccgtgcaacatggttgtttcagacttgtctgagctctagctgtggccatgcctaacatttaagaacatatttaattcatgtccaggacaaaataaaaaaactgaaacaaggttgtgggttggtagtaaaacaaactgaaatagttcaaccaaaccttgagaccttactttcccaaaaataacaacaccttcagatctttgctttatttttcaagttttaaagctcataatttgagatgagtttctttaagctctatctctctctgttttgtgagttatcctctcttgactcagaagcaccacaaaaaattag

SEQ ID NO: 48895 - DNA, 308 bp, Glycine max
  Clone ID: PAT_MRT3847_15159C.1
gatacaacaaaagaaaattggttttaaaaatacaatggttcactcccacaacttcattgttaacttttggttcaaaattccgagttgtccatcacgggtttgtgacttatgacttatgacactattctcctcctctttcttcacatgtcctccaaatctaaatatgttaaaaattatatatctttcttgttaaaaggctgtataattctaatgtcaacaaaaacatatcaaaatttgtaagattgatttgatagttaaaaaaaaaaaaaaaaaaaaaaaaaaaaaaaaaaaaaaaaaaaaaaaaaaaa

SEQ ID NO: 48896 - DNA, 814 bp, Glycine max
  Clone ID: PAT_MRT3847_1515C.1
aaggaaggggatatatatgtgctccttcaccaaaccgtccttgggggcatttaacagttgacctcctcccgtagcatttagcaatgacgaaggtacacccaaacgctaacgcatctgtgtgtgtgtcggagacggagacggagaagccaaataaaaatagtgatgcaatggcagtggtgctaacagtgtggaagaagtctctgttgccaaactgcaacggattcaccgttttcgacacccaacgagggaatctggtgtttagggtcgataattacgtcgcgcggaataaggatcagatacttctcatggacgctgctggcacacctctcctcaccatccgccgcaagaggctaagcttggtatcagacacttggctggtgtttgaaggagagggctccgtcaaacagaaactgctttttacagccgcgaggaagaacgtcaacgccaagtgtactttggcacacatcttcaacatcaagaaggaagtagcatatgagatagagggatcatacgcccaacgttgctgcacgttttacaacaacaataagataaaagttgcagagatgaagatgaaagaaacttttggcgcagatatcttccgtctcttcgtacagcctcacatggacaccactctcgccatggcctttgtcatcctccttgatcacatgtttccatctccatctcgatcatccttcactatcactttttgatatatatttcggattcccttgtaacccttcaaagttaaaatcctccagcttggtttcttcattttatacaaaatccccagctcgatctcactgaggatgtaaat

SEQ ID NO: 48897 - DNA, 585 bp, Glycine max
  Clone ID: PAT_MRT3847_15160C.1
ccggggtcatgaaaccctaattggcttcgccgttacttgcaattcgcaatcgttgcgatttgcaagactcagaattgagaaatttcttctttgttttgcatttttcatggcaagcgttgtatttagctttagttgaattggattatgaaatcaagaaaggaactgagggcctttgttgtgtttttttttaaaaattgagtgaagtggagtagctggtgatgaaagaattattggcatgagctgcgacaacgtttgtgcgcatcgtgtattcttacacgggttgttgttgcgatgaagaatgtgccaaaatgctaatctgaggctctctcctttcattttaggtttttgatcttatgatttatcgtttcataaggtttcctattatggattatgactctgcacttcctacgatccatttcattctcaataaatcgcgaatgaattttttaaagtcatttggatatttttaattcaaaatatttgtattagtgaaataaaagtgttatttcttcgggtcggcaaaacattctaaagctcctttttattttttttccccccaaaaaaaaaaaaaaaaaaaaaggcccc

SEQ ID NO: 48898 - DNA, 208 bp, Glycine max
  unsure (1)..(208): unsure at all n locations
  Clone ID: PAT_MRT3847_15161C.1
catggcccgacatgttcatcggactcttcataccattgtccagcagcaggaaaatggtatgaagactcgatgaacatctcgggccaggccttagcatcaccacaaacataaagataacctccctgagaaatcaaattccacagacgtgnagctttatccatcatcttgtgttgaacatactcctttcaggtcctctctcgagaatgtg

SEQ ID NO: 48899 - DNA, 408 bp, Glycine max
  unsure (1)..(408): unsure at all n locations
  Clone ID: PAT_MRT3847_15162C.1
accgtcccatcttancgttactcgcccgagaaaagcctgggcggctgtcggtaccttatgcttgaagaggccgacctccgtaaagacccttaccggcatgaccatcaccctagaggtggaagagcctggcaccatagagaccgcttaggcacggatccaggacgagggaggaactcccccagaccggcgaggtgctcttgtcgccggaaagctactcgaggactgcacgacccttgctgactactacattcatgaggagaggacgtgtcacctcgttctccgtgtcccaggtggcgtgcacatccttgccttgacactcacgggaccgaccatagacctagaggatgaaaagatgaagcaccatgcttacgacaagggcaacatgcaggacaagggaggtacaccccc

SEQ ID NO: 48900 - DNA, 855 bp, Glycine max
  Clone ID: PAT_MRT3847_15163C.1
ttttttagaaaatgaaactagcttcagtcacatataacaaaatatctttttacatacatgcacttccaaatctaaagaaacttttgaaccttatcattattccatatcctaagcaaagcataacgctttttaatttagataaatatggtttttcctatccttgtggtggaaaggtcaaaagccttatccatacaatcacaagaagaaaaccaggagaggtaattaattaactcagaggatggagcagctattagggtatggatcataaactacgtgatggtacataggagaatgataggtgccacacatgggaccaggtggaggatagttttcatttgtctcggtttcatcttcctcttctcctccatcttggccaccctcatctttttcttctttcacttcttccacacttaataacgttgcataactgaacttctttctcatccggttggttaagaaaacagcatcgattccttctccagttaccaccaattgatcactggtttcgccttcaaatgctaatgattgaacacctgaatgtttgatatatatatatatatatatataataaatttaacaagagtgacaaaataatttttatgtaatttttaaaaatttgtcgctaaaattttagtaacaaaatttgccaatattgacaaaaagtttgtcggtaaggttttaatttgttgtatatatggccatgacaaagaagaagcacaacgttgttcacataaaattgctgcatatatacttagtctatgaaatatgaatcaagatttaaacactaggtactagctatgtatatgtatttagacctgtcggctatatatcaatcaaatttaaaatctcgtgccc

SEQ ID NO: 48901 - DNA, 276 bp, Glycine max
  unsure (1)..(276): unsure at all n locations
  Clone ID: PAT_MRT3847_15164C.1
gctcctcntagnaagctttctgtaatcncttttcantcaacganctncatacattgtgtcattcccggctgttgtgnactccaagacaacnaccactgttgttgttttnttcaacctcaacttgtttggcgncngcggcggcgtaaactcaaacaacattnggaatncnnnnnnnnnnnnnnnaccagcttcgtcgaaagngaaggnagtggaagtggnagtngangaggagctgccatggnttcaggaaaaggctttggacctggtcgagttcac

SEQ ID NO: 48902 - DNA, 592 bp, Glycine max
  Clone ID: PAT_MRT3847_15165C.1
actgcagtataataaaactcattatttgagaattccgaactttcaccatgtctgtaagcagttgaacggcgagagaaagtgaaataatgcatctggaatcagttcataatgatcggtccctttctatttttccttctagtaacttcctttgtacttatgatttgcaaccacctctataattgatgtaatttctgaacaaaatattgctccaaataattcaattactatcacccctaagaaaaaaaatatatttatcaacaatttttgcaggggaggattatcttccctggttcttccttttgcaaaaataacgctttgccacttgcaagcttatgtaccgaaacaattaatgtattctactctatcataaactgccccccaagagatgaggtcgtgttatcttcccacagttagaggggtcaagcttcctgaattggccacaaatttgcaacacatctttttcctgtattttacccatctttttcagcatgaagattacatactctgacttgctaatgaaaccagtggtgttgatatcagcagcaagcaaatcctggacggtaatttccctatgcaaaaccttgttagccat

SEQ ID NO: 48903 - DNA, 351 bp, Glycine max
  Clone ID: PAT_MRT3847_15166C.1
tttttggtttattttttttttatttttattaatgaaattattatgtggttcatatttttttttttttttttaaaaaaaaagaacccggatttgccctaaaatccaacaaacaagaatttccacgtttgggggataatatgggggacccccttaccccgcaaaaaaaaaaatcccaaggttggggttttttgttttgggggatataaatacataatttttaatgaaaaaaaaatgaaggagtagtttactgggaaaccccctcccctttaaaactggtgtgaaagtttttataaacactgtcggtaaacttagggaggaaccaggtttttcaagcagatattggggggtaat

SEQ ID NO: 48904 - DNA, 284 bp, Glycine max
  Clone ID: PAT_MRT3847_15167C.1
attagtgttagggacttcattatcgactctgtatgagttataacatcagatatgcttacggagaagcttttatacaacacgactatcgatcatgtatctcctgaggcttatgatccatcgtaaccaactgcgaaagtgctgtatcctgatctgacaggctttatgtcctttgaagagcatcatcggaaagaagaactagcatgtggaagtatctgacaacaccactcataatgctttcgcgaacgtgaattatgctagtgcaacggatttactcaaggtagaca

SEQ ID NO: 48905 - DNA, 616 bp, Glycine max
  unsure (1)..(616): unsure at all n locations
  Clone ID: PAT_MRT3847_15168C.1
ctcgagcccgcaattgactgctacttgaagttgcttgttaggctatgttacatatatgatacccggggtggtgtaaaaagagtcaaagatggagcttctcaggaccaaattttgaatgaaacaagattgcaaaacttgcaacgtgaacttgtgaaggacttacgtgaggtcaatacaccaagaatgttggcccgccttatttgggctattgcagagcacatagatatagaaggattggatccgctcctagcagacgacccagatgatcctcttaatgtcattatatcaaatattcacaaggttcttttcaatgtcgattcaactgcagaaacaacaaatagagttcaagatgtacaggcagttctaatatctgctcaacggctgggatcacgccaccctagggctggtcagttacttaccaaagagcttgaagagtttaggaacaatcctttggctgattctgtcagcaagcatcaatgtcgtttgatattgcaaagaatcaaatatgctacaagtcatcaagacaataagtgggcaggggtaacagaagctagaggggattacccatttagccaccacangataactgttcagttttatgaagcatctgctgctc

SEQ ID NO: 48906 - DNA, 236 bp, Glycine max
  Clone ID: PAT_MRT3847_15169C.1
gtggtggttcggcggggaacaagttccgcatgtcgctgggtcttccagtggcggcgacggtgaactgcgccgacaacacggggggcgaaaaaacctctacatccttttccgtgaaagggatcaaagggcgttgaaccgtcttccctcggcctgggttggcaaacttgtgatggccaccggaaaaaggaaaaacccatcttaggaaaagtctttccactggcattcttccccaccaa

SEQ ID NO: 48907 - DNA, 3006 bp, Glycine max
  Clone ID: PAT_MRT3847_1516C.1
tcgacccacgcgtccgcccacgtgttcgtacggctgcgagaagacgacgagggggaaattaaggatgactgaaaaacagaatatgaaaggataagtgatgcagcaaatcacagccaaggttttttgtcaagataacactataactttgaagtgttttcttttcttattctcttcacaatatgaattataaagcatgtaatgtagggccaatttggaataacacaccagcagatgctagcacagatctcatctcaagctgtgcaaacccactctgaacatccattctctatatcagccgtatctgctacctcatcatgtgctgcacaacagctgattccaccctcaatgccagattctaaggtgaaagaatcccttgattattctcactctgaacaaaaattgcagtcttctgtgaatgttgataataagcctaataatgatggttacaactggaggaagtatgggcaaaaacatgtgaaaggtagtgacttctcaagaagttattataagtgcacacgtccaaattgtcctgtgaagaaaaaacttgagcgttctcttgagggtcatgtgactgcaattatttataaaggagaacacaatcatcaacgtcctcatcgcagtaagattgtgaaagaaacacaaacttcaaatgaaaattcagtgtctaagatggatctagggtctagtcaggccacaggtgaacatggatcaggaacacgtgatagtgaggaagtacatgaccatgaaactgaagcagttggaaagttttatgattctgcagaaacacagaagtcaggctccaggatccagcctctttacatagaactgtagcagagactagaatcattgtgcaaacaacaagtgaagtggatctcttagatgatggatatcgatggcgcaaatatgggcagaaagttgtcaaaggcaacccatatccaaggtgatattggttttctccctacactttgattgcttatatttaagtaataattatggatgagcaatatcattgctaaaagtaacaagtatgagagaagaagacacgattgagtacgaataaacaagttgaacaacatacaagtgagatgacctcatactttaatgttttaaggcattaagttagatatgatgaaagttcatttaaattgttagattgtgaatcgttaatgaaggtatctcccacctttttaatcagcttgtatttcctaacattgtccataacagctttcaagaaatttgattcccataatgcttaattattcaccatactcagattatgatactccatatattatggtgtacatttccacgaattttcccactattctgcttttttattgtttgacttgtctaggaaaagaaggtgatgcatgtttttatgatatgtaggagctattacaaatgtgcaacccaaggttgcaatgttcggaagcatgttgagagggcttcaatggatcctaaagctgtcctaacaacatacgaaggaaaacacaatcatgatgtgccggtagctaagactaatagccacacacttgccaacaatagtgcatcacagctaaaagcacaaaatattgccatacccgacgacaagcatagtttcagcagtaggggtgttcgggggaatgaacagcgacctttgggaagtctaagattgaaggaagagcagataacatagttttcttagttcatagtctaatctatctttttctcataattcgacatatatacaataggcaagattgtaaaattggtcccccactttatctccaattacggatttggtccccctataatttaattcacaaatttggtctctcaattttataaatttctgcaaaattggtcctggaagtccgatttggacattgaccgttaatctcagacgttgactgtcacatgtcaatgccacgtgtcaacgtctaagtggtttccggtaaaggtttcattttttgtaggtaaaattacatttttggtccctcagttttactccaattttaattttggtcctctttaatttaattcacacatttggtccccccaattttataaatccctttataaattgttcctacaaaattggtcttttgaatggtttagccactggtactagagacatgatagaccttgataaattttgcactccttttttatcgcaagtttttcactcacttggaacccagagaaaaatcactctttatctctctcccaatttcggggttattcaacttgagaaagtggcgtatgaatcccagcctaggtccgaaattttcaaatctcttgctttaacaggttttgtaataaccccccccccccctttttttttcgttttttgctcccccatgtggtattatgtgtatacgacttaagtggtctatgtatgacaatgatatttttgtttgaaatttgaaatacgacttctccagtaatgaaatttggttgaatttataaaggaatttacaaaactgagggaccaaatgtgtgaattaaattataaggggatcaaaatcgaaattgtagcaaaactgggggaccaaaagtacaattttacctacaaaaaatgaagcatttacagagaaccactcagacgttgacacgtggcagtcaacgtctgaggttaacagtcaacgtttaaatcgggcttctaggaccaattgtacagggatttataagactgggaaaccaaatttgtgaattaaattataggaagaccaaatccaaaattagagataaactaggggaccaaaagtgaaattttgcctatacaatattatgttcaactcaccgcattactatacaacacaacaaacttgttctatacaactcagaaatttgatgtcaaagtaacaaaatgaaatgaagcacaaaacgaattgaatggtaaatagccaaattcgtctttgaaagtgtgatgggttgacaaattagtccttaaaagatgaaaattttaaatttaatttttgaatgtacaaaaaaaagtgtgctaaattaatgggccaatttaatgat

SEQ ID NO: 48908 - DNA, 3466 bp, Glycine max
  Clone ID: PAT_MRT3847_15170C.1
gaaacaaagaaggcatttgatttaaacatgcaagggataatcacacaaagcactagctgcagattacatattatacacagttaaaacctagacaaacaaacccaacaaaataataggattgaaggctaaattagtttcactatatgctacagctaaattatacatccatacagaaaatagaacatttgctggtttgaattcaatctaaaattatccttgagggaaggtgtacaccagcagcttgctcaggacacgtagcaagttttacaatagaactagcagtgaggttgtaccttctctgtatttctgtaaatccttcacatagaacttcctccacccagttctccacctccgtatcccggtctgagacatattgagctgcaagaaattggtccatgacttctgtctggatctgcaatgcacacttggatccgagaattttgttgaagttacttctgatcactttcaacactctatctgcaagagcatcaaaatcataaggtttaaaaacaactgtttcatcaaccagatcacacaaatcttgcaaccaaagcttttgattctcagtcgagacaacatgatcagagtttccatcatttgtttgtttctgttcattctcttctgctgggagattcaaatctaacagccaatttgatgttgtatgtgcccttttagctgtatcaaagagtaaatgcggatcatgaaattcattgtcaccaatcaactttcgtttgcttaggaaatttagattaggaatggcatctattgaattgtttgttagactgatgctttggcttctgatgtctccaatcacatgttcaacttttatcttgatacctcccccttttgccctcagtattctctcctcagaatagttagaaggttcccctcttggcatcgaactgttttggtaatctgagaaagaaaaaacaaacattgtattgtttacactaacttctcgtccatgcgagtctgtaatttttcctgtcttgatggcttgagacaaactattttgagctagaatatctgccttgtctacattttcaaggaaaaccacggacaagggtttcttgcaacactcccctacaataaaatcaagggtagtcttccctctgaatttcacattgcatcctttcatttcttcagaacttagatccacaaaaataaagctctcccggctaccgtataatagctcagctagagaaacagcaattttctttttaccaagtctatcatgtccaacaaaattcatccagatgtccccaggctgatttggtccacggtgtttaaccctctttgtagggctgcaaacaattgttttgacgatagcccgtaaagcttcatcttgccagcttacctccttggaaagagcttcaaaaagaattttgggattttttgcatcaacttgtccacaatagtcaaaacttaagcaggatgaagactgtgatggatgcttcaacatattcccatcagccacattattgtttggagaaaatcgacttgggatttcctttggaggctccattgtatattgaacagcaggtttcttcaatttattgcaggtaggagaagagcatattcctaacccaagatctgtggttacagaagttacagatgtgggagacatttgactgccatcacatacacttgaattggacatgttgcatgatcttcggtcacctgaatcgtgatcttccactttctggaacatctcagcaagttttgaattatatttctcctgctttgccttgaaaactgcaggaaaaggactacttgattgtgatgtaggcatcatttgcatgccaacaggtacatgggagttgagattgatgtattcactaggagatttgctgcggcaattgtcaacgtcttccttcttcttttcagcaccacaatgaaaccccacaacagttggaaaagtatttgcatctcgatggagcagatgctgggataacttgtctaagttcttatgcagtggcccagattcactactatcgagcaaaacaccattatctttggtcttaacattcaacccttttgttgagccaaattctgcaatctgcaaccaaggaggcaagctagattgatgcggatcagcagctgaagaagcacaaaacctttccttggaagcagcaaggacttcatgttcacacctttccccacactggtgacagtggggaacacaataaaacgagctattcagtggagctttcaaatcagactgtgacgaaaaaaagccaccaaacggtacaaatgaatccattaagctggacctgggacggtgataggattcagaaggaggcttaacagaggtaataggcagaagctgcaaatcccaatctttctctatagaaggaaacttccccacgaaattcaagtaactctcgtaagtagccgcagcaccaatcaaccaaaacttgtcataatgaacctgcaacaacttcgctaattctccaaccacacccctcaaactctgtccctcaccaccaccttcttcatcgtcgctcacaaaacccttcaagtccccgaaactcaccacaacaccgggccccacacactgctccgccaaattcccaatctccctcacgcgcctccccaccacctccgcatccccacccgccacctcctccgcaatgcaaaccacgcgcagccccagcaactccaccggcaaagccccttctctccgtttctccaccgcctcggcaaagccacgcagagcgtcgttcgcgcacgcgccgagaagcagcggattcttcccccggctccgcaccagaacctccccgattcgccggaaattctctccgccgccgtcctcgtcaccacagccgaagaagaacgggaagcggcgcggcgactcggataaattgcagaggaaaatcggcgagccgcgggggcggagagggcggaggatggcgagtttgatatcggagctccggaaaccggcttcggcgaaaacgcgactgacaaccgggtcgtctaggattgacaagatcaaatgctgaagctctactttgacagaggaaacagaaaacggctgttgctgttgctgttgcttctggcaaccccgatctaatggtgagtaagacccttgggagaagtggaagttgtcagggtggcgccgctggttggcctgagagcgttttatggcggccatgagggagtttgagacgggagggtcgtggtcggcggaggagtggttgtgggaggagggggcgcggtcgagggagacggagaggcagaggtccagggccttgaactggaggcgtggggaatacgcgcagtttctggcgcgggagcaggcgtcgcggaggaggggtgaggatgggagggagaggagggcggagacggcgtggagcgacgtggtttgggcgtggccgcggcggcgggcgacggagacggcctcgtcgagggcgcgcgcggcgtcgggagttaggcattggcgcgcggctgccacgggcgtcggcat

SEQ ID NO: 48909 - DNA, 3468 bp, Glycine max
  Clone ID: PAT_MRT3847_15171C.1
cataaaacacaaacctcttatttttgggtctttaccgattcatcaatatatgtattaatcaattacatcaagcaacagcttagaataaaagaaacaaagaaggcatttgatttaaatatgcaaaggataatcacacatagcactagctgcagattacatattatacacaattaaaacctagacaaacaaacccaacaaaataataggattgaaggctaaattagtttcactatatgctacagctaaattatacatccatacagaaaagacaacatttgctggttgaagtcagtctaaaattatccttgggggaaggtgtacaccagcagcttgctcaggacacgtaaaaagttttacaatagaactagcagtgaggttgtaccttctctgtacttctgtaaatccttcacatagaacttcctccacccagttctccacctccctatcccggtctgaaacatattgagctgcaagaaattggtccatgacttctgtctggatctgcaatgcacactcggatccaagaattttgttgaagttacttctgatcactttcaacactctatccgcaagtgcttcaaaatcataaggtttaaaaacaactgtttcatcaaccagatcacacaaatcttgcaaccaaaggttttggttctcagttgagacatgatcagagtttccatcatttgtttgtttctgttcattctcttctgctgggagattcaaatctaacagccaatttgatgttgtatgtgcccttttagctgtatcagagagaaaatgcagatcatgaaatttatcgtcaccaatcaactttcgtttgtttaggatatttagattaggaaccgcatgtattgaattgttagttacactgatgctttggcttctgatgtctccaatcacatgttcaacttttatcttgatacctcccccttttgccctcagtattctttcctcagaatagttggaaggttcccctcttggcatcaaactattttggtaatctgagaaagaaaaaacaaacattgtattgtttacactaacttctcgtccatgtgagtctgaaatttttcctgtcttgatggctagagacaaactattttgagctagaatatctgccttttctacattttcaaggaaaaccacagacaggggtttcttgcaacactcccctacaataaaatcaagggcagtcttccctctgaatttcacatcgcatcctttcatttcttcagaacttagatccacaaaaataaagctttcacggctaccatacaatagctcagctagagaaacagcaattttctttttaccaagtctatcagatccaacaaaattcatccagatgtccccaggctgatttggtccacggtgtttaaccctctttgttgggctgcaaacaattgttttgatgatagcccgtaaagcttcatcttgccaggttacctccttggaaagaacttcaaaaagaattttgggattttttgcatcaacttgtccacaatagtcaaaacttaagcaggatgaagactgggatgaatgcttcaagatattcccatcagccaaattaaagttttgagaaaatcgacttgggatttcctttggaggctccattgtatattgaacagcgggtttcttcaatttattgctggtaggagaagagtatattcctaacccaagatctgtggttacagaagttacagatgtgggagacatttgactaccatcacacacacttgaattggacatgttgcatgatctttggtcacctgactcgtgatcttccactttctggaacatctcagcaagttttgaattatatttctcctgctttgccatgaaaactgcaggaaaaggactacttgattgtgatgtaggcatcatttgcatgccaacaggtacacgggagttgagattgatgtattcactaggtgatttgctgctgcaattgtcagtatcttcctttttcttttcagcaccacaatgaaaccccacaacagttggaaaagtaattgcatctcgctggtgcagatgctgggataacttgtcaaagttcttatgcagtgacccagattcactactatcgagcaaaacaccattatctttggtagttacattcacaaatgatctgcaaggatgtcttgtaggaaatgctttccaattcgctgtttttgcattaattgctatttcatttattttattgattagtgtacctgttgtatttgcttctcctgaaggttggtcgaataacaaaaatgttgtattttccggtacatcattatggattggattagtgtttctcatgggtattcttaattctctcattgcagctgaagaagcagaaaacctttccttggacgaagcaaggacttcatgttcacacctttccccaccacactggtgacagtggggaacacaataaaacgagccactcagtggagctttcaaatcagactgtgacgaaaagaagccaccaaacaacaacttcgctaattctccaaccacacccctcaaactctgtccctcaccaccaccttcttcatcgtcgctcacaaaacccttcaagtccccgaaactcaccacaacaccgggccccacacactgctccgccaaattcccaatctccctcacgcgcctccccaccacctccgcgtccccactcgccacctcctccgcaatgcaaaccacgcgcagccccgacaattccaccggcagagccccttctctccgtttctccactgcctcggcaaagccacgcagagcgtcgctcgcacacgcgccgagaagcagcggattcttccccctgctccggaccagaacctccccgattcgccggaaattctctcctccgccgccgccgtcctcgtcaccaccgccgaaaaagaaggggaaccttcgcggcggctcggataagttgcagaggaaaatcggcgggccgcgggggcggagagggcggaggatggcgagcttaatatcggagcttcgaaaaccggcttcggcgaaaacgcgactcaccacggggtcgtccaggattgacaagatcaaatgctgaagctctactttgacagaagaaacagaaaacggttgctgctgagtttggtggtgagggtaaaagtggaagttatcggggtggcggcgttggttggcttgagagcgttttattgcggccatgagagagttcgagatgggagggtcgtggtcggaggaggcgtggttgtgagaggacggggcgcggtcgagggagacggagaggcagaggtcgagggccttgaactggaggcgtggggagtacgcgcagtttcgggcgcgggagcaggcgtcgcggaggagggggagggagaggagggcggagacggcgtggagcgacgtcgtttgggcgtggccgcggcggcgagcgacggagacggcctcgtcgagggcgcgggcggcgtcgggggttaggcattggcgcgcggctgccacgggcgtcgg

SEQ ID NO: 48910 - DNA, 3575 bp, Glycine max
  Clone ID: PAT_MRT3847_15172C.1
ttaaaggaggctttgaatcctaaagccatggagtggaccaatgagaaatgccatgattttcactctacaagttctaaatttagctccattatgctccctatgctttgaggttacttctgttggatgagaaatcgcagcttttcttttctccttcctatcagcagcttgctcaggacacgtaaaaagttttacaatagaactagcagtgaggttgtaccttctctgtacttctgtaaatccttcacatagaacttcctccacccagttctccacctccctatcccggtctgaaacatattgagctgcaagaaattggtccatgacttctgtctggatctgcaatgcacactcggatccaagaattttgttgaagttacttctgatcactttcaacactctatccgcaagtgcttcaaaatcataaggtttaaaaacaactgtttcatcaaccagatcacacaaatcttgcaaccaaaggttttggttctcagttgagacatgatcagagtttccatcatttgtttgtttctgttcattctcttctgctgggagattcaaatctaacagccaatttgatgttgtatgtgcccttttagctgtatcagagagaaaatgcagatcatgaaatttatcgtcaccaatcaactttcgtttgtttaggatatttagattaggaaccgcatgtattgaattgttagttacactgatgctttggcttctgatgtctccaatcacatgttcaacttttatcttgatacctcccccttttgccctcagtattctttcctcagaatagttggaaggttcccctcttggcatcaaactattttggtaatctgagaaagaaaaaacaaacattgtattgtttacactaacttctcgtccatgtgagtctgaaatttttcctgtcttgatggctagagacaaactattttgagctagaatatctgccttttctacattttcaaggaaaaccacagacaggggtttcttgcaacactcccctacaataaaatcaagggcagtcttccctctgaatttcacatcgcatcctttcatttcttcagaacttagatccacaaaaataaagctttcacggctaccatacaatagctcagctagagaaacagcaattttctttttaccaagtctatcagatccaacaaaattcatccagatgtccccaggctgatttggtccacggtgtttaaccctctttgttgggctgcaaacaattgttttgatgatagcccgtaaagcttcatcttgccaggttacctccttggaaagaacttcaaaaagaattttgggattttttgcatcaacttgtccacaatagtcaaaacttaagcaggatgaagactgggatgaatgcttcaagatattcccatcagccaaattaaagttttgagaaaatcgacttgggatttcctttggaggctccattgtatattgaacagcgggtttcttcaatttattgctggtaggagaagagtatattcctaacccaagatctgtggttacagaagttacagatgtgggagacatttgactaccatcacacacacttgaattggacatgttgcatgatctttggtcacctgactcgtgatcttccactttctggaacatctcagcaagttttgaattatatttctcctgctttgccatgaaaactgcaggaaaaggactacttgattgtgatgtaggcatcatttgcatgccaacaggtacacgggagttgagattgatgtattcactaggtgatttgctgctgcaattgtcagtatcttcctttttcttttcagcaccacaatgaaaccccacaacagttggaaaagtaattgcatctcgctggtgcagatgctgggataacttgtcaaagttcttatgcagtgacccagattcactactatcgagcaaaacaccattatctttggtcttaacattcaacccctttgttgagccaaattctgcaatctgcaaccacggaggcaagttagattgatgcggatcagcagctgaagaagcagaaaacctttccttggacgaagcaaggacttcatgttcacacctttccccaccacactggtgacagtggggaacacaataaaacgagccactcagtggagctttcaaatcagactgtgacgaaaagaagccaccaaacggtacaaatgaatccattaagatccagttgttgggaaaagggtgaaaggaaggaagaaagtttgcggattgaaatcctccaactaacatttctaacaacctggacctgggacggtgataggattcggaaagaggcttaacagaggtaataggcagaagctgcaaatcccaatctttctctatagaaggaaacttccccacgaaattcaagtaattatcgtaactagcagcagcacccatcaaccaaaacttgtcataatgaacctgcaacaacttcgctaattctccaaccacacccctcaaactctgtccctcaccaccaccttcttcatcgtcgctcacaaaacccttcaagtccccgaaactcaccacaacaccgggccccacacactgctccgccaaattcccaatctccctcacgcgcctccccaccacctccgcgtccccactcgccacctcctccgcaatgcaaaccacgcgcagccccgacaattccaccggcagagccccttctctccgtttctccactgcctcggcaaagccacgcagagcgtcgctcgcacacgcgccgagaagcagcggattcttccccctgctccggaccagaacctccccgattcgccggaaattctctcctccgccgccgccgtcctcgtcaccaccgccgaaaaagaaggggaaccttcgcggcggctcggataagttgcagaggaaaatcggcgggccgcgggggcggagagggcggaggatggcgagcttaatatcggagcttcgaaaaccggcttcggcgaaaacgcgactcaccacggggtcgtccaggattgacaagatcaaatgctgaagctctactttgacagaagaaacagaaaacggttgctgctgagtttggtggtgagggtaaaagtggaagttatcggggtggcggcgttggttggcttgagagcgttttattgcggccatgagagagttcgagatgggagggtcgtggtcggaggaggcgtggttgtgagaggacggggcgcggtcgagggagacggagaggcagaggtcgagggccttgaactggaggcgtggggagtacgcgcagtttcgggcgcgggagcaggcgtcgcggaggagggggagggagaggagggcggagacggcgtggagcgacgtcgtttgggcgtggccgcggcggcgagcgacggagacggcctcgtcgagggcgcgggcggcgtcgggggttaggcattggcgcgcggctgccacgggcgtcggcatggggagtgaggctgaggggcgcgggtgggtggagtttccttattcaggaaaaacattaacggctgcctttttattttgggcaagtaagaaatttcgaaaaggagttttgtggggaaacctaattttgcgttttgcctcgagcc

SEQ ID NO: 48911 - DNA, 300 bp, Glycine max
  Clone ID: PAT_MRT3847_15173C.1
gggagctctatctaactgttggaataattataaaatattaaatgaatgcagaatgatagtaatcatcatctaactcaaaggccaagcgttgtcttgatccatctccccactttgtcactgaaattcagaaaaatgggctgcccctctatacgatccaacattacctccgcctgcatgcaacgtgcttcttcttttattgtgcaccctaaacaaatctaaatctccaacccttacaacatgtctactggtaaaacccatacctaacccaactgaatcggctgtcagcacacatctctcatg

SEQ ID NO: 48912 - DNA, 355 bp, Glycine max
  Clone ID: PAT_MRT3847_15174C.1
gtatttcttcttttatatagattttatcttagataaaatatttactttagggatattaatatttattaatataacgcatctaattacggctgatcgaagatttttcttatatccgagctataaatattattaagttatctttttttggggaagaattatcaagatatcttgtgttatgtacttatgtataacatttactgtgtccatgaatgtgaacttagctaccgttttacatcacaggcattgcatggtggcggtgcggtgcaatgaataatcaaggtgaactattgttagttgaaaacacacccactatattatgcctggcgtagccagaatgatatatagattgatcgta

SEQ ID NO: 48913 - DNA, 441 bp, Glycine max
  Clone ID: PAT_MRT3847_15175C.1
cccacgcgtccgggggcctcagcacaatccaaaggtgcctactttttttgtcccttaatttctttattttactgttatattcagcatctctcatcaataatttcatgagaattattcgcatagatattattggagttaatatatgtggaattttttttttttgaaagatgatatttgtagaattagacaatataacacctttcttattttattttctggggtgagtaggttaggaccttgtaatttgatttctcgctgttacatctattattgcttttctttttttcttttgctatgagtgtggcttttctgttcactttcatagagatttttgcttagaataattgccccctaattcattactgcttctttgttgtgatggaactttattatctgcatttattgaaatatgggtctcattaacgtgccttttttttttcc

SEQ ID NO: 48914 - DNA, 238 bp, Glycine max
  Clone ID: PAT_MRT3847_15176C.1
gaactgcttcagatggctgggcgtgctggacgcagaggcattgatgaaaatgttcatgtatttctcatccaaactcctaatgaaggtgctgaagagggctgcatagtactgttcgctggactagagcctctagtgtcacaggatactgcttcatatggtatggccatgaatctacttgctggtgtgaaatccatacataggtcaaatgaatcagatgacatgataccttccacaggta

SEQ ID NO: 48915 - DNA, 379 bp, Glycine max
  unsure (1)..(379): unsure at all n locations
  Clone ID: PAT_MRT3847_15177C.1
ggatttacagcagagcaagttcaatcacctcctgttcttcgatcacactcataaagccacagaaaccaaatactagaaaaaccctctctacgctaataacttaacaaaataaaagtaaagctttattagaattatctcaatttcagagttttcctaaatcgaagaaaataacccaaaaagctagttcaaagctagaagaacacttacaataaatcccaagaancataacactctttaatacctagaaaatactcacacttcacaagcatttttaattccagacgcaaacaaaaccaaagtttattttgataaagcagctaaatactttcagcaagctattaataaaaatccttcgaataaactttaccacaaatcatta

SEQ ID NO: 48916 - DNA, 430 bp, Glycine max
  Clone ID: PAT_MRT3847_15178C.1
ctcacagtgtatatataattgcgctacgtttctaacaaagtttatgagcgggtgcacccccaattaacctaaaggggggggtgactcagtttgagcgtgaaacacttcctaacagtttgaaacaccctctcttttcatttacatcactgaggaggagatcgagacaaaggacgctaacaagcttcgaagtgcggtattcagcctaaaggtcagaataatcttagatgttaagcgccgttttgttgttatactttgggacaaaattgatcgcaacacctttcctttcaaacgtcccactacgaccaatacgggggagatagggctcaggctgtgcagggagaataaaggtttattactagagacccttggcttgcattcttaccatgagccaaagtatcaggggtttttaatacaccggaagagccaaaac

SEQ ID NO: 48917 - DNA, 156 bp, Glycine max
  Clone ID: PAT_MRT3847_15179C.1
gagcttgacgtcgatgcgcgcgttccttagcttggaatttgggttggggaaataattaattaattggaggtttcaaattattaaattaaggttccaaaattttaatccatggttttagtcgtttttttttcctttccggctcccagataataaatt

SEQ ID NO: 48918 - DNA, 394 bp, Glycine max
  Clone ID: PAT_MRT3847_1517C.1
cggaaaaagaaaggaaatttcaaggttgatagaaatttaccccctcaactttcccgataatagaaattgaaaaacccttgggcgggtttaatagcccaagaaaaacccggggattggcttttaacccctcattggtcttccatccctaaagaaacaaataaatttaaacaaaactggcaaaacaactctcccaggaactagttttttcctgggatctcaaaaaactttggcatttttaaaccaggaccccacttgtgatgggggaggagacctagtcttttggatagaacccattcctatgaagctggaaaatttatacccaggggttattgggggggtttttaatcccacccgcaaacttattgggcccaaaggggtgaaaatatgaatcggg

SEQ ID NO: 48919 - DNA, 791 bp, Glycine max
  unsure (1)..(791): unsure at all n locations
  Clone ID: PAT_MRT3847_15180C.1
ggagtcgcaataaaaattgtcataaagacaaaaacaacttcgaaaacggtgcgttggagcgaagcgttcgtcgtcctcgttcgtcgtggatctgaattctgaattgtgaagtctgaatccctgcgcttcttgattcacctccgctgtagttgaactggttcatcgattcaccatcttcaccgagggatttaagtcctacactacacgtacataagatggtggtctcatcctctgcgcgcgattacatcaatcgcatcttgccagacatctccggcatgaagattctcatcctcgattctcaaacggtaggtattgtgagtgtcgtgtattcacagtcggagctttttcagaaagaagtgtttttggtagagttggtagattctatttccaagtcaaacgaatcaatgtcgcatctcaaggccgtctacttccttcgacctacatcggagaatatccagcttttgcgccgccagctggctagtcctagatttggagagtatcatctatttttctccaacatattgaaggacactcagattcacttacttgctgattcagatgaacaggaagttgtccagcaagttcaggagttctatgcagatcttgttgcaattgatcctttatcattcactttgcacgtgccttcacattacatatatatgctcccagctgtggtagatcctttcacagtgcagcgcttctctggaccgggtgntgatggtctttcagctcttttttttgcattanagcgaagaccagttattangtatccaaggacatctgacattgca

SEQ ID NO: 48920 - DNA, 131 bp, Glycine max
  Clone ID: PAT_MRT3847_15181C.1
aaaacactagaaatattatagcaagttgaattggcttttagtgcacttaagggaagaatccctcagaaaaagattgcctctgccaaaaaaccaccgaaaaaatttaaaagggcccaataataattataaat

SEQ ID NO: 48921 - DNA, 239 bp, Glycine max
  unsure (1)..(239): unsure at all n locations
  Clone ID: PAT_MRT3847_15182C.1
atttccatttcctctctcacagattccaagaatcttaattcatttagagaatcntacccaaccgtgagcgctgattaccagaaggccgttgagaaggcgaagaagaagctcagaggcttcatcgctgagaagagatgcgctcctctaatgctccgtttagcatggcacactgctggaacttacgcacgtaagctcgaaaaccggtggatgcctcggaaccataaagcacccctccgaac

SEQ ID NO: 48922 - DNA, 761 bp, Glycine max
  Clone ID: PAT_MRT3847_15183C.1
ctttcttcctaagagaaaaaaacaaaaagaagaagaagacgaagaagcagtgttaaagaaggaggagatggaaggcatcaccgccagcgtgtgcaggggtgtgaaagactattggaggaggaagggctacaagaagctaaacgggtcgggtcggagaaggcggaaccgggtggagcttgggagcacccgaaccgggaagggtaggttctggaggtggaggatcagactcgcacccaagatccgaatcaggaaaatcccgtcgcccaagaaaatgttgctgtgggttcgggacgcgtacgtgaggatgatgctgggcctggccaactcgcgggtcatgacggtgaacgccgcctcagcttcgggcttcggtggggccctctcaggtgtgggcacctccttaggaactggcttcgggctggccccacccaaggagtacgacgagaagaccatcatccagatctacaagtccctcctcatggcgcatggcccgttagtgtctcccgacgccgccgcagcacaaatccggtgaccgtagcgccaacggtaagggttaaaccgtcaaagcaccttcttttttctcatcaattgttcaatacttgtcctcccaatgccttcatcaccttcttaaagttaatctcttactgtcattccatatatgtactattttctgatggggtttatttactttttaatgtcattctatcaactcgatagattcttcttttctcatcgcccaattcctaaactacatgccaacatct

SEQ ID NO: 48923 - DNA, 336 bp, Glycine max
  Clone ID: PAT_MRT3847_15184C.1
aaggggggttatttgttttatttttttttttttttttttaattatttttttgtttttgcccaaccaatcccccccctttttgggggcgcttggggtctccccggaaattagggccgggacccggcgggccgcccgcttttcctttgaggggaaggcttaaaggacgcgccggaacacataaagagcaaagcctggggggcaaaaggagggccctaacaatctacaaaaagattcggggcgggaattaaaatttataacccaggggcccccagtggagggacaaacgaacctttaattgcgtgagcacacgaccccggataaaaaaaaaaaaacaag

SEQ ID NO: 48924 - DNA, 207 bp, Glycine max
  Clone ID: PAT_MRT3847_15185C.1
tcggtaattcgggctcgaggcaatagttttaggaaatatgaatcgggacctacttcagtgtagagagggaacaagaggcgagggggaaaaccaaaatctcattttgaacgtgctgctatcaatgatgccacagagcttttactttctattcgggaagcccataaaaacactaggcgggggtaagattctcttagacggactaggtgc

SEQ ID NO: 48925 - DNA, 388 bp, Glycine max
  unsure (1)..(388): unsure at all n locations
  Clone ID: PAT_MRT3847_15186C.1
gggttcgacccccgccgtccggtgcggggattatgtctacgtcaaggtttacgtcgccgtccacaatgataatgccttacatgtttctaccatggtccgcacctgctcgcgtctggcatgtcaccatnacgttcttgtgggtttgaagtcatcaagcaggttggcaatataattataaggaagcagatgcacctgcgtgtgtacatgctatggcattattgtgcactgattagttccgccttagcaagatcaagattgattacctgaaggttgaggccagtggccagggtgagaagatcagcacctagagacagcctcagggtccgaaacctggcttcatggccgagggggcaacgaaggcaacatctacccctattccctatgatgt

SEQ ID NO: 48926 - DNA, 170 bp, Glycine max
  unsure (1)..(170): unsure at all n locations
  Clone ID: PAT_MRT3847_15187C.1
tcaagggtgattgtctttcccgtcaaggctaagatacaggacaaagagggtatccctccagatcaacagaggcttatctntgctggaaagcagcttgaggatggccgtactcttgctgactacaacatccagaaagagtctactcatcatctagtgttacgtcttcgtgg

SEQ ID NO: 48927 - DNA, 302 bp, Glycine max
  Clone ID: PAT_MRT3847_15188C.1
gggtgggggtttttttttttttttttttttttttttttttttttttaaaaaactcttgagcattgttgctttggtgcgtggggaaaaaacagagcagctgttgggaccaagctggggcttaggctgagtggagaaaacaatatacccctctagagggggagcgaatggggctaaactccgaccttggcggaaaacctaacgcccagaggagactaggggtctggagcattaggaatgaacttaaacagaataaacaaacacgaacttttaaaagaatgtttgttttcttggggcaaacacaa

SEQ ID NO: 48928 - DNA, 474 bp, Glycine max
  unsure (1)..(474): unsure at all n locations
  Clone ID: PAT_MRT3847_15189C.1
aaacactcgaggctccataaacaggagaagatgctacacccctgaatcaagaagtcatttccttttcttaaaaggaaaaagcacaaaaatactgaatacacacnnacctaaaatgacactaagcccaaaattaatatggggtgatgatgataataaacagggcgacactttaccataaagattaaacgcatttgaagactatcgtcttggtctacgacccgcatcattagatgctgcctctttctgcatctccttctctatgttctcttcattctcttcactaccttggctattggaagcttcggcgcgcattggttgcttctccacctttggaggattattgccaccatgtatgagactcatgaaaagatgactcgaagacaaccacnnctgctacaagnattgctattgtgagantcggctgatnntcatctttcnnaatgnnacctacaagcttacatttgtgnnnnntca

SEQ ID NO: 48929 - DNA, 249 bp, Glycine max
  Clone ID: PAT_MRT3847_1518C.1
atcttatttgccttgaagcatggaaaatgaaagacccttatatctttgctaaaagtatggttgccaaattcttcacttttgactgccatgaacttttgagcatcatcctattctcttatttaacctttaaccactataattgattcaaaccctaaataacctgatgttcctcaagataaaattgtaataaggtatatttttcaaccatgtgttaaccctgttgaagtcgaaaccatggctgccttaatt

SEQ ID NO: 48930 - DNA, 263 bp, Glycine max
  Clone ID: PAT_MRT3847_15190C.1
attgaaagatagaaattgatatctgtgaaaaatgacactagaataacaaccttagtaattaaatatgtaaggctgttttatggagaggaagatttccttgtttttgtgtatagagattagagggagttcaagttgtggttaatattcttgtatatttgtagatgcatgatacttttaatttcgagatgtttaatttctatcagctaatctcatctctttatcatctgtaacatgttattattccttcctcctttaacttgtgg

SEQ ID NO: 48931 - DNA, 974 bp, Glycine max
  unsure (1)..(974): unsure at all n locations
  Clone ID: PAT_MRT3847_15191C.1
ctgggctcaacgattatccaaacacagcttaactcgtcttctttctttcgctagctcgctcaagttctctctcgctgaaaaataacaaagttgcaaattgctctctctctgtttccagtgaaagaaaaggatgtcaagtggagcaacatactggtgttacacatgcaggcagccaatctgccttgcaaggagggatcacatttgcccctactgtgacgaaggcttcttgcaagaacttgatgaattgcaaggaggtatggaacaaagaggttctgaaccaagaatgggtggaagatacataaactttggtgttaggaggcctggttctacccctcttcctgaatcatggactcgaggtgtgttcatatttcccaatcaagaggtggccgcagatcgggaaggattctttgaacaacacattacaaatgacccgcttggtgcatcacaatcttcaattgatgcaatgccaactattaagatcacacatgaacacctctactcaaatccaaagtgttcagtttgtatagaaagatttgaagtgggttctgaggccaggaagatgccatgtgaccacatttaccactcagactgcatcgttccatggttagttcatcataactcatgtcctgtttgccgtggtaagctgccacccgaaggacatgttagttctcgtggtagtcaaatttggagaggaaggaatgtcaatggtaatagtgaaaatgatatctataggggtagggagaatagacagttcaacgatggatggagaaatctactatcatttttgaatttttgcggccaatcctttcttctaattcaaatacttaatcgnnngagctgagactggggatactactctcctacaactctttgaccagaacaatggcagaagttaactgagtttcatttcttctccagctgtcaaataannnnnntttaaatgacatgaataaagcttctgaatgctttgaact

SEQ ID NO: 48932 - DNA, 350 bp, Glycine max
  unsure (1)..(350): unsure at all n locations
  Clone ID: PAT_MRT3847_15192C.1
tcgcactatctaaccctngcggcttgttttcttttaacaagaggagcgccaaaacccannccctcaccaatcccaacctcgattgtgtttcggcgaagaagacgaagtagcgcaaggcttcatatttataacaagacgccatgccccccgccgcttacaacaactattggtacaacgaaaccagcttctaccttattcaacccgaacttgctttcagagaatacgactacaaaaattataagaaaaagatgaaaaaggttgttaactccgaataaaaggaacagcctttggtcacggatgctaatggagaaaaaaaagaggatcctaacgcgctttacaactttaggatt

SEQ ID NO: 48933 - DNA, 467 bp, Glycine max
  Clone ID: PAT_MRT3847_15193C.1
cgcccgtaagctcggaattcggctcgaggcgagaagacgacagaagggatacctatatatttatgcccacaattattacttacactttcctcaggtaaacagatcaggaaaaaatatcaattaaggaatgttataagtaaatttagaattcattcttaaatcatttaaatataaaccataacattaaaagcaacaaagcataaccttcggtcattcaaacacatgtcataactaaacaacgttataaacgtaaccatctaacattaaataataaaaaactacatattcacttacttataacaaatttaagaagaaatttatcaaataaaattaaatatgaagccttggaatttgaagcaagactaaaaaaatgttaaacattcttttatcataggcttgtaaatctgaccgagtttaggcacttgcagggaaattgaaagtgtgggatttgacaaattaaggcagac

SEQ ID NO: 48934 - DNA, 391 bp, Glycine max
  Clone ID: PAT_MRT3847_15194C.1
cccacgcgtccgctcaaataaaaaaaaaaaaaaaaaaaaaaaaaaaaaaaaaaaaaaaaaaaaaaaaaaaaaaaaaaaaaaaaaaaaaaaaaaaaaaaaaaaaaaaaaaaaaaaaaaaaaagatagggaaacataaaaaaaaatacactgaactggccgtgaacaacaaaataaaaggccctgaaaaaaccctcctaaaaaccaaatagagggcgggtagcataacaaaataagacaggggaaaaaaaaagaaagaaaaaaagaaaatatccgaattccaaacacaagcgtagtccgaacgggaaaacgaacgaaacccgctccgaaacattaattcaaacgcgggggcaacgtaaacacccaaaaaaagccccactaaacagggggataa

SEQ ID NO: 48935 - DNA, 236 bp, Glycine max
  Clone ID: PAT_MRT3847_15195C.1
gtggtcgtcttttcctcttttttgccgttaacggtaattaaagcctgtaccgaaaaatcacgaaagggtacattccacaggtggggaacccatgaagtcacatgaacagatttcctagaaatctagcgaaaatgaaataaccttaaaaaagtccgggcctaaatttaagtttacctatcgggctacattccccaatgaaaaacgtgaggataacctctctatttcctgaacccttt

SEQ ID NO: 48936 - DNA, 208 bp, Glycine max
  Clone ID: PAT_MRT3847_15196C.1
tttttctttctttttttttttttttttgttttgttcattgttcaaaaaaaacatgggttattttttttgcaacacgtttgttgaaaaaaacaccatgttattaaacacactccattcttttaaaaatctatccaagaccacgctgccgcagggatgattgtaccccccacccctggagggtggaggccttccggagggacttaatggg

SEQ ID NO: 48937 - DNA, 404 bp, Glycine max
  unsure (1)..(404): unsure at all n locations
  Clone ID: PAT_MRT3847_15197C.1
tggtacgccctgcaggtacccgggtccggaacctcccgggttcgaccccacgccgctccggcagaggctagactngagggatgagcatccctaatcatgtgtactggacaaccagggccgaactctagagtgccccacgctggctgagacaatgacgcgtggactacttcacggtgatcgatcatagctgtcatcttgggtcgtacgcgatgcctggtgcagtcatcatcatccacggaatgacctacgttttcctagctgttccaccattcatatgtctatagcgagagcagctctatctaggatgatacgaatataccctgtgatggatgtcgtatcgtgtcgacaaggtaatgggttacattaatctccatctgcactatcatttccaatattacatccaa

SEQ ID NO: 48938 - DNA, 483 bp, Glycine max
  Clone ID: PAT_MRT3847_15198C.1
ctttatgcttctttcctgctccaatgatcgcagcaagatttcgaccttcttttctgcaaaatactgtcagctcaaactctttgtgggttttcggctgaaccccttcatatatggccactgaagcacatcgttttcccaagattaataatgaccaaggctcttctagtatacctcataacccaattcaaaaggatgtagagtcatccgaaataactgaggaactccctagtagacatgcacatggtagaaggaaaaaccttatcttggagataccaacaagaacactagatgaaacaagagaggaatttttcagaacaaaccaacctccaactccatctcctagaagccaaatcaatgagttccaaggtcctttgtcaaccaaaaatattaaatttcacaagataagttcagatgttgaagaggcttccatcccagcacttgacggttcccccccggagccactgcaagagcctatgatttcaa

SEQ ID NO: 48939 - DNA, 570 bp, Glycine max
  Clone ID: PAT_MRT3847_15199C.1
ctgattctgctgaggccagtaaatgcaacattcctgtaatgaagagaaactaccggtggcaaaggaaacatgggatgtgaaatctttcaggcagagagcagaggcacttgaaaagctcttggagttgtctgcaaagttgctgcagcaaaacagattggaggaacttcaagttgttctgaagccctttgggaaagccaaggtctctccaagggagacagccatttggttagccaagagtctcaaaggaatgatgtctgaggaaagtgggggacgctcttcatgatgaggtatctccattagtcaattcttatgtgataagtttcactttgtattttatgtttaaaatttgctctttatatagttcatagctattcaagtaccacttgaattcataagagagaacatgttggctttgtcccttctttcattgttgtaattcttacagtgcttttatgctgttgtaaatagtgaccatacaaattactaacatcaaattacgatcaattgtatggacattccgtgccccggcataggtgttaaatattaatgtaccaaagagttgctatgatt

SEQ ID NO: 48940 - DNA, 347 bp, Glycine max
  Clone ID: PAT_MRT3847_1519C.1
gggaataaacggaaggttttgtttctcacattgggaaacaaactgatgctcagttaaatctggctaactaacccaagggtgccttattaaactctcacattaagaagtgctccttttttgaaaagaaaacaaaaacatcttgggtgtcactggggagaattaatggatttaagttgcctacgacagatattgccagaccttcattgacaactacccgaagctataacagttttcttaacaaactagccagcagtttgattaccatgtgtgagaccctacggctacacatttggactttgggtgtccagacccacatctttacatgctttacaacactaaacctccat

SEQ ID NO: 48941 - DNA, 246 bp, Glycine max
  Clone ID: PAT_MRT3847_151C.1
ggattgggttgaaataaactttcctttgccaggttccttgttgcaaatttaacaaatcattttgaaagactgaaactgttgttgcacaatacttaaacaactaatgtaacaacttgttgttttcatttggctgttgctcttattttgaagttaagaatattaataaattacaatttttaatttacagttaccatatttgatctaccttaccttgttttgtttttgaattttatttacttgcaactt

SEQ ID NO: 48942 - DNA, 339 bp, Glycine max
  Clone ID: PAT_MRT3847_15200C.1
gatattcaccattcaaaagagatcattagttttcgtaactatgagactcatgggcatatgctgattcaggactaggcgcatattcagtttctaaatgcatcatgttcccagtcaaatggtggaacaaagccaccctgatccttttgaaggacggttggaagcattcactcccgagagagagcattcgtatgtagcttcaaaaaatgaggatcaatggagatgggaaagagatgagtctaagatgccaaattctatgacctctcacatgttcaatgaaggtcaaagtcaagggggtgatgccacaagatcatactttcaaggtcagagacctaacccaaa

SEQ ID NO: 48943 - DNA, 430 bp, Glycine max
  Clone ID: PAT_MRT3847_15201C.1
cccacgcgtccggttttgcaattcgtcgcagctgacgcattccataccaagccgaagcgaggagtgattgaaaggattgcctagcgcatcactcgacagagagagatgggaagagacacagagacctcagaggcaacttacgcagtggagcaccttgcagccttaaatcgatacaaacccgatattcaagcagatctcgaaaactatgtccacgaccacggctcgacgcaaacttatagcccggacgcgaatctctgccttcttctactctgccaaaacgaacctgagaaaatgagttcccagattgaggcccgcatattggtcaaggctctcatggccatgccggcgccagatttcaacctatgactctctttgataccaacaacgcgtgccgacggaggagcaattccaagactttgacagatctttc

SEQ ID NO: 48944 - DNA, 1150 bp, Glycine max
  Clone ID: PAT_MRT3847_15202C.1
aagtgacaagaccattgacggaagaggagttgatgtctaccttgctggtggggctggtattaccatccagttcatcaagaatgtgatcatccatggagtcaagatttttgacattcaggttggtaatggtggacttattatagattctgagaaccactatggtttgaggactatgagtgatggagatggcatttccatctttggctctagcaatatttggattgaccatgtttccatgagaaaatgcaaagatggattgatagatgctattcagggttccactgctattaccatctccaatagccatttcacagaccacaatgaggtgatgttgtttggtgctagtgacagctatgatggtgatacgataatgcaaatcacattggcattcaaccactttggcaagagattagtccaaaggatgccaaggtgcagatatggttttgtccatgtggttaataatgactacactcattgggaaatgtatgccattggtggtagcaagcatcctaccattattagtgagggcaacagattcattgcccctgacaacattaatgctaaagagataacaaagagggagtactcaccagagcaagagtggaaaagctggcaatggagatcaatcaatgacgagtacctgaacggaggatttttcagagaaggtggtgctcaactaacagacaggccatactcaaggcatgacatgatgacagcaaggcctggatcatacgtgggaagactcactcgttatgctggaagccttaagtgcatggtgggaaagccttgttaattagtagccatcattctttggaaaaagagagaagagcaagacaagaagaaaccgagcaatcaaatcaagatggtggcctctgtaatatatcatacctttgtcataatttttccttagtttgttggaaagaaaatatgttagttcatcacataattttattaaatggagatgtttccctgtattagcatgcaatgtaagctatggtgtccatttgcatacccatacatgtatgtacatgtagatatagacaaatagattgttatatagctgtatttggcaactggtacttggttttagttgtttatgtatcaatgttatatttataactattaataaagacaattattttctttgatg

SEQ ID NO: 48945 - DNA, 145 bp, Glycine max
  Clone ID: PAT_MRT3847_15203C.1
gggctttatagtgtctcttcttctttttcttcttcttcttctttgtcgaatcgcgattattctgtggtgcgagggattttagagagagggaaaggggcgtttgctttctacgatttctgattgcctcttcatattcctgaatgaa

SEQ ID NO: 48946 - DNA, 191 bp, Glycine max
  unsure (1)..(191): unsure at all n locations
  Clone ID: PAT_MRT3847_15204C.1
aagaaatgnnnnggggataccccataaaattggaagcaaacttttagtattttaagatatatttttaaaaactttttaaaaggaataaaaacctggaaatgaaatttacccttttggtgaattcacaaaacttaaaaaatctttttttgaaccaagtgtcctctttttacccctaattactaacattattc

SEQ ID NO: 48947 - DNA, 281 bp, Glycine max
  unsure (1)..(281): unsure at all n locations
  Clone ID: PAT_MRT3847_15205C.1
tgctcccgccgtttactcaacatgattcatttccacccanccacgncnnccggtcagtncagatctttaacaggaggggggggcgggccccacaaacaagacccacacccaccaccgcaagggccccttcaaattcaaaagccttgacttcggcgaaagaaacggataccttaaaggcgtcgacaccgagatcatccacgatccaggacccggtgctccgctagccccagtggcgttccctcatcctttccgatacacgaagcataatgagctttcaccag

SEQ ID NO: 48948 - DNA, 270 bp, Glycine max
  Clone ID: PAT_MRT3847_15206C.1
cccaaaccagggccggtgtttattggggcagggcctttaaaacccccggcccatatttagaccaataatcagagagctttcaccggggggggggggcaaccccataaaccgaaaggggcgggccattttttccgggatttttctccaaggagggatactctttttggaacccaaaaaagcttgagccccgggggaacatacttgtaataacggtaaccccgtgggggaaaccggtgctctgaagatgcttggccaaaaccccctgggccc

SEQ ID NO: 48949 - DNA, 413 bp, Glycine max
  Clone ID: PAT_MRT3847_15207C.1
ttgggaaggtacttaatctaaacacagctcataaagccttgccactggctcgtctcttagaatatgtggaaaggctttatgagcttgggaaggtacttaatctaaacacagctttacttttgtctgataattttttatttataataatatttctattcatagtcaaaatagttcgaatgaatctctgttcttgacctgaatgatccaaatccttccaggaaaatgcacataacttcatagtcaaaattcactgtgcttattattctcattcagtggctggtggaccatgaattgtttattgttcttggaagttaatgttgctttttggatataatgctagtggttatttggagaggacattcttgagtcctgcatccatgagggcaatcaatttattcgtaaatgaatggagg

SEQ ID NO: 48950 - DNA, 493 bp, Glycine max
  Clone ID: PAT_MRT3847_15208C.1
caaaatcatctcccatctaaaacaaaagtcacaactcctctgcaatcttctaattcaccctttgtgggacctaccccttcacctcccctggctccatctcctatgccaggagagtctgagaagtctattccttgtgtttcatcaatatcaaatgctgcaaatattggacttcaacaaacagggggtgcagtagcaccagctcaatcccttgccattgggactcctgggatatcagcctctcctttattggcagaattcagttgtcctgatggtgcgcatggtaatgctttagctgccacttctgggaagtcaactgttacagagcagcctcttgaacgcctaattaatgcggtgaaatcaatttcgcgtaaagcattaagtgctgcggtcatggatattggttcagttgtcagcatgaatgatagaatagcaggatcagctccaggctagaaatttcattgcacaagatggttccaatggaattaagaggatg

SEQ ID NO: 48951 - DNA, 805 bp, Glycine max
  Clone ID: PAT_MRT3847_15209C.1
taatcatgcccttttggaaaaataagggagattaaccaccaacttattgaccggtagtagacataagcaatgaagatgttgatccaacagctgctgttgctgctgctgaaggggcagaagggatcattgtcaaatgctctttcattgccgtggctctcagccctagcttaaaatcccaatatgcttcagcacagatgtcacctattcagcccctgcgtttgctggttcctgcaaattatcctaattgttctcccatactcctagacaaatttccagttgaatccagtaaggagaatgaagatctttcagtgaaagcaaggtcaaagtttagcacatctttacgcagtttatcacaacctatgtcacttggggagatagcaaggacttgggatgtttgtgctcgccgtgttatttctgagcatgcacaacagagtgggggaggaagcttcagctctaagtatggaacttgggagaattgcttgaccaccaactaatgttccttattgttccatgcagacctttttgtttcggcccaaacatactgtttcggttaatataagtaatttattggatgtagataaaagcctagttatgaagtagcagaccatggagtttgtcaatttctatatattgtttttgcattttgcaagggaataatcattattaggccgtaagggtgaaattatataaagcataaccacatattaagtggaaaattgtttcaataattgtttaccttttctatttcattttagctttataatgtataaaattttgatgagattaatttgatttttctataggc

SEQ ID NO: 48952 - DNA, 409 bp, Glycine max
  Clone ID: PAT_MRT3847_1520C.1
gggttgatgtaactgagtttagaagattgattggatctttgagatacctatgcaatagcagacccaatatctgctttgcagtaagcctgatcagcagatttatgaaaaggcctagactgtcacacatgcaagcagccaagagagtgttgagacttatcaaagggacaattggtagtggtgtgttgttcccttttaaggctaaatcaggaaaaccagacctgcttggctacacagactctgattggaaaagggatccagaacaggagaaaagcactggaggatatctgttcatgtataatgatgctcctgtggcttagagctctaagaaacaggatgtgatagccttatccacttgtgaagctgagtatgtggcagcatcacttggtgcctgtcaagcagtttggatgat

SEQ ID NO: 48953 - DNA, 452 bp, Glycine max
  Clone ID: PAT_MRT3847_15210C.1
aatgcatataatcatgcattggaaactgcaaaactgaaatatatagaatcccttagatattatggggcggcaaggttagaactgaatgccatcaatgaacatgatgattctgttacaagcagcttgaagaatgaggcacatacacagtttgctcatacttttctgcggtttggaatgcttttggcaagagaaaatactactgcaatttatgaaactggatcactggaaggtacatgggtaagtcacaccacgccccatgacagaaaatccaggaaagatttgagaaagcatgagatttcagctaacgaggccattagagaagcattatctgtgtatgagtcgctcggtgaactgcgcaaacaggaggctgcatatgcttacttccaattggcttgctatcagagagactgttgtttgagatttatgaattctggcaataagaaaagcatttt

SEQ ID NO: 48954 - DNA, 4133 bp, Glycine max
  Clone ID: PAT_MRT3847_15211C.1
cacatcccttgcaaccccacttgcaacaacgactacacacctcaagtccctgacttctaaaatcacattctctctctcatcaaattccttacccttattcacaatgtccactcgtccaatcttctataccttctctgaattcgctagcacccactgcccatcccagtggatgttcaagacaagaagacttgtatcaaaaggatcactctatgaaggaaagttacttatcagcgatgaatgaaatgtaccacaacatagctagcccacgtcagtagcatgattcccttctccgacagcccaagacatatagagttgactagttgaaggtatttaaaatgatgttggtacgaattataacattccttcaggtttgctagagcacagcctcttctaattctaatgagaaactgaaatcaaatgagaagaagattataaattttataaatacaaattgacctaggaaaaatatgcctggacatcttctcccacctcatatgcattccatgccacaatcacactcccaagttactcaagtgcagtctcatgaaaatcaaatgaaccctcagttgcaaacaacaaatatgcaaggctctgtagcaacaatgcagcagaataatatggcaggcatgcagcataattctctgtctggtgtatctacagtacaacagagtaagatgaattcaatgcaaccaagtaccaatttagattcaggaccaggaaatgctgtgaactccctgcaacaggttccagtgagctcacttcaacaaaaccctgttagtgctcctcaacaaactaatgttaactccttatcttcacaagctggggttaatgtagtccaaccaaatcttaatccccttcagccaggttctagtatgcttcaacaccagcaactaaaacaacagcaggaacaacagatgttacagaatcaacagttaaaacaacaatatcagcggcaattgttgcagagaaaacaacagcagatgttacagcagcaacaaacagcaagcagcagcagcaacaacagcagttacaccagacagcaaagcagcagctgcctgcacagttgccaacacatcaaatacaacaacttcaccaaatgaatgatgcaaatgacataaagatgaggcaaggaatcggtgttaagccaggggtctttcagcagcatcttacttccagtcaacgctcaacttatccccatcaacagatgaaagggagtccttttcctgtttcttctccccaactccttcaggccacatcttctcagattccacaacactcatctccccaggttgaccaacaaaatcatctcccatctaaaacaaaagtcacaactcctctgcaatcttctaattcaccctttgtgggacctaccccttcacctcccctggctccatctcctatgccaggagagtctgagaagtctattccttgtgtttcatcaatatcaaatgctgcaaatattggacttcaacaaacagggggtgcagtagcaccagctcaatcccttgccattgggactcctgggatatcagcctctcctttattggcagaattcagttgtcctggggacctaccccttcacctcccttggcccaatctcctgaattcccgggatctgagggcgtccgtccttgtgtttcatcaatatcaaatgctgcaaatattggacatcaacaaacagggggtgcaatagcaccagctcaatcccttgccattgggactcctgggatatcagcctctcctttattggcagaattcagtgctcctgatggtgcctgctgaagggacagaagggaccattgccaaatgttcttacaatgttgtggctgtctgtccgagcttaaaatcccattatgcttcagcacagatgccaccaattcgacccttgcgattgcttgttcctacaaattatcctattgttcactatactcttaggcaagaatccagttgaatcagtaaggatcatgaagatcttactgagaaaacgaaacaacagttttatacacctgaatgttgtaccacctgccggtagcctgaagggtagattgaaacagtttactgctttagtgacttctgatctggtgtcaactacacctccagtgccaagaagccaatgtcagctgttaatcatgcccttttggaagttcctagagagcatgatcatcattttcttgacatgctagtagacataagcaatgaagatgttgatccaacagctgctgttgctgctgctgaaggggcagaagggatcattgccaaatgcactttcattgccgtgcgtccagcccgggcttaaaatcccaataggcttctcactgatgttaccttttctgcccctgcgtttgctggttcctgcaaattatcctacttgttctcccatactcctagacaaatttccagttgaatccagtaaggagaatgaagatctttcagtgaaagcaaggtcaaagtttagcacatctttacgcagtttatcacaacctatgtcacttgcatggtaatgctttagctgccacttctgggatagtcatgttatttttaagcgcctcttgaacgcctaattaatgcggtgaaatcaatgtcaagtaaagcattaagtgctgctgtcatggatattggttcagttgtcagcatgaatgatagaattgcaggatcagctccaggtaatggatccagagcggctgttggtgaggatttggtttccatgactaattgtcgtctacaggctagaaatttcattactcaagatggttccaatggaattaagaggatgaaacgttacactagtgctacacccttgaatgttgtatcatctcctggtagcatgaatgatagtatcaagcagttaactgctgaggcttctgatttggattcaactgcaacatctagattcaagatgccaaggattgaggctaatcattcccttttggaagaaattagggaggttaatcagcgacttattgacacggtagtagacataagtaatgaagaagttgatccaacagcagctgctgctgctgctgaagggacagaagggaccattgtcaaatgctcttacaatgctgtggctctcggtccgagcttaaaatcccaatatgcttcagcacagatgtcaccaattcaacccttgcacttgcttgttcctacaaattatcctaattgttcccccatactcctagacaagtttccagttgaatccagtaaggagaatgaagatctttctgtcaaagcgaagtcaaggtttagcatatccttgcgaagtttatcacaacctatgtcccttggggagatagcaaggacttgggatgtttgtgctcgcactgttatttctgagcatgcacagcagagcggtggtgggagtttcagctctaagtatgggacttgggagaattgcttgaccacatgatgatccttgccgttccatgcaaacaaacatcttttttcttctgaaatttgccaaaacttgtgtcaatcattggaatcggagtttttgggtgcaggtgaaaagcaattttgcatcaggtcaaattggttccgtttcagtgaattgtgtattccgttagtatccattttcttgtttatttatatctcaaattgcgatatttaccgctgcctaagatatgtggtagatttgtgtgacttgaatcaaattgccttcaccaaggctttgttcataactaatatagtagctcaacagtttaggcccgtaatttctgcataagaacaattcttccagatgctcataattaaattgttagttatgattagttatgtatcttaaaaaactttttcatgtgaagtgagttatgaatacttattaacttgggagaattgtttgaccaccaactaatgttccatgcaggcctttttgtttcgacccaaacattctgcttctattaatataagtaatttattggatgtagataaaagcctagttatgaagtagcagaccatggagtttgtcaatctgtatatactgtttttgctattggcaagggaattatcatgattaggaagtaatacttaaattatataaagcataatcgcatattaagtggaaaattgtttcaataattgtttaccttttctatttcattttagctttataatgtataaaattttgatgtttgatg

SEQ ID NO: 48955 - DNA, 267 bp, Glycine max
  unsure (1)..(267): unsure at all n locations
  Clone ID: PAT_MRT3847_15212C.1
gtgaaaatctaaatagcagagaaggatcgaattttgagtctaatggtcgcgtctcatgttgttagtacttcatttctgcgagtctcagactcaaactcaaaatcttgcctcgatccttacccttttctctttcagttgagcttccatcaccaaacccaatnctaagatcaaaatgggtttccttttccagttccacnaatgcctctccngcagtgcaagnctgacaacacttcattggcattttctgcaatgcgaggcttcancaga

SEQ ID NO: 48956 - DNA, 726 bp, Glycine max
  Clone ID: PAT_MRT3847_15213C.1
gttaataaactggatctacttaaaacaaattatagagtatcgtctaaatcaaattatatatccttaactgcataaaggaagtacataggatgataagaagcaccacgaaatttcatttgttcatttaatcgaagaatttcatttgttgaatgaaattgtgatatgttgaggtgtttattaggctgactccaaacccttttaacacctcctcttcttcacaactgaaactaatgggtcctgtctttgctgtaacattgattttaaaccttttcatatttttggccatgctatttaggtagtgagagcatcgctggtcgtacatcacacacacatgatctgattttgttgagtctgacttgttcatgtacattttcgtgctgcctttttcgccttcaccctcacaatcactgatagtaatgtaaagtatcaatttatcatcacgttttgagtccttgggaacaatgaagcagaaaatgaaacccaactgatgggaaagttgaccagaaaagagatcaatgaccacatagtcatttgttgtcttatactctaaccactttggaaatgtgcttcctgggtacgcgtacgttgcttgataagaatcacactcttcataaccactttggagatcatgaatgactacataatcattgtaatcatcaaaatcaagttctggtgctgggaaatgctgacatgcaaatttcatcacgttgatttgcacattcaact

SEQ ID NO: 48957 - DNA, 615 bp, Glycine max
  Clone ID: PAT_MRT3847_15214C.1
aattcggctcgggacacttttctctctcttgcagacctgctcacattccccattatataagaccttgatttggggacaagtttctcctcactcctcgtcctcttttttctcctttgaaaaaatcacggggagggatcgaagcccgagaaaatgggtttgccattagtacatgctctgttcttgactctgtttctgctctgcctccaaacaaaagcagaggattttggtgcaaccaggaagctcgcaggaacatgcaatttgttcagtggaaaatgggtctatgatgcttcaaatcctctctatgacccttctacttgccccttcatagatccacagttcaattgccaaaagcatggtcgctcagataaactgtaccaaaaatataggtggatgccattttcttgtcccttgccaaggttcaatggattgaactttttgcagagatatagtgggaagaagattatgtttgtcggcgactccttgagcttgaaccagttcaattcattggcatgtatgcttcatgcttgggtgccaaaatctaggagcactctcagccagagggatgctctctccaaagtggcatttgaggactatgggcttgagttgtatttgtac

SEQ ID NO: 48958 - DNA, 763 bp, Glycine max
  Clone ID: PAT_MRT3847_15215C.1
gtaaattcatgcagttcctagctttcgattgttgcagtggtatatagggttgcctgttagagggatgttgatataggatctatgcaacgttatatttcccattgaagatgacgttatatttttagtgtataaataaatagcactacactgtctaaatctgcttgatactgaaattgcaaaattggacgctaaaattatattatccagagtaacaatttgcaaagcggggctagttttcaattatcaaacaaatgacaaattgaaaacagcaatacaattcatgaaagcaaaaatttatatagcctaaacccaaaaaccttaacaaacattattttcctaattccttccaaatactaactagtccacttaatcaacctcctcaatcttggggccagcaccactaccaccagcaggtggagcatcatcatcgacatcaccaccagtaccagctccgccttggtacatcttcgctataatgggattgcatatgccctcaagctccttcatcttgtcttcaaattcatcagcttctgcaagctgattggtatcaagccattgaatggcctgctcaattgcattatcaatctttgtcttgtcttcagaggaaagctttgaactgatcttctcatcctttattgggtttctcatgttgtaggcatagttctccaaggcattctttccctcaaccttcttcttgtgctcctcatcttcagacttgtatttctcagcttcttgaaccatcttctcgatttcttcctttgac

SEQ ID NO: 48959 - DNA, 301 bp, Glycine max
  unsure (1)..(301): unsure at all n locations
  Clone ID: PAT_MRT3847_15216C.1
ggnacaaataaagggtggtttttttattttgggcccaaaaaaaatgggtctttaattaaaaaaatccccaaaatttggtcaagcaactacaaacaacgttaaaatttactaaattaatatttccccaattttgtctccaaataattattacttaaagtccccctcaataactctattggccccattttctactaatccaaaagcatcttttaaaattagagtttttttcataatccccctcccaaacccaccattgccttttttcatcatggaagaaaattccccataaattattccccca

SEQ ID NO: 48960 - DNA, 141 bp, Glycine max
  Clone ID: PAT_MRT3847_15217C.1
atttagacagcggatcgaagagggtgttgatgaaattctccaccgctccgtaccactggttcgtcgcaacacgtgacgataatggcttcgaagaattctcaacgagacacgcgcttagcggtaatcgactctgcaatccga

SEQ ID NO: 48961 - DNA, 377 bp, Glycine max
  unsure (1)..(377): unsure at all n locations
  Clone ID: PAT_MRT3847_15218C.1
caataacaaatatgctggtatacttcagggccctanagacaattctttggaacatntaaaagctacaacgggatttcttatatatattaaatgaaaatgatctattaaggatccatacaaggaatacaaattacaaagaagaccagtttatgaccatctcaatcaaccgctgcacattatgattgagactgaattacctgctaatgtttttaacataatgctcatgcaagctcaagaaattattcaagaacttctcaatcctttggatgaatcacaggactatatcaacaagcaccaattgcgttaacttccccttcctgaaatcaaacttcagaaaaaaaagacctctgcccaatattattgtgcccccaatcaac

SEQ ID NO: 48962 - DNA, 379 bp, Glycine max
  Clone ID: PAT_MRT3847_15219C.1
ggctcgagcagagatgtgtagctgatggggagctttatgaggaggatgttgctgctttggcgaggatgcgtgtgatgctctgcataccccaacacattgttgaagcaactaactcatatatctgtggcagattgatgcaaagggtggcctagcggcaatcccataagcgggagatggatatcatcgctgaactcctacacctattaagagcaacccaacacacgcactgcgaaccactagggaagatgctaactctattgctagcaaggcagagacgacgaatgtgatcacatacataaaacggaccctgacagaccgagatttgcccaggaaatggaagggaactagttacaatgtctatgctgaagaccgaaaactc

SEQ ID NO: 48963 - DNA, 194 bp, Glycine max
  unsure (1)..(194): unsure at all n locations
  Clone ID: PAT_MRT3847_1521C.1
gngcangcngcgtagtnagctcggnattcggctcgagcnantnctaataannnanngacagcngagganaatcaacagcgggctacaannggagctgcaacgcctatcngttgaagnttagaantccatgctnaccccttcctttanantcttctaccctttatccattttctantaccccatctctctccctt

SEQ ID NO: 48964 - DNA, 462 bp, Glycine max
  Clone ID: PAT_MRT3847_15220C.1
ctcccaaagactcatttttctttgtacatcttaaagccttcataaattttaaaattcccagtggaccccacaaggcataacttgagaaaaatacacatggcaagttttgggcctctttgctgcaaagctctagtgatagccgtggtggctatggtgatgggtgcaccaagctatggccaaatcagcacgccatgtaacgcttcaatactaggcactttcttcacaccttgcatgaattttctgactaatagcagtggcaatggaacctcaccaacaacggagtgctgcagtgcccttaaatctctcacaagtggtggcatggattgtttgtgtctcattgtgactggcagcgttcccttcagaatacccgtcaatcgaaccttagccatttctctccctcgtgcatgcaacatggccggtgggccagtgcaatgccaagcctcgggttcaccactccctgct

SEQ ID NO: 48965 - DNA, 539 bp, Glycine max
  unsure (1)..(539): unsure at all n locations
  Clone ID: PAT_MRT3847_15221C.1
accccggagccgggtccctcggcnggtntctngtggtccggnncctccctcccctacgcggaagagacttctnatactngcttactgctcctaacggggtaacagccccggttctcgtgntcgttttattcctacttctcgtttctgcccgngcctgaagacactagctcgcagctggacgcccgcccatagtgtctagacgcgctacttttttttcagtccaaccttnnnaagacttcttggccgcgagtgcccgcaggtcnntgacccgtgagctgtctccccgctcgttgtcctcccnggagacgggcttcccaaggttcttattgcgtgcagttccagcctttgcgtcncgcgtgcttggtctgctctcgcccgcnnnggcggtggggaccgcctcgtcttcagtgtggccgagagttcccttcggctggccctctggttcctccttggtggcgttgttaatttcgtcgtgggaggcttccttctccggcctcgctgggaggtcgccacccgggacctccccggcgggaacccgg

SEQ ID NO: 48966 - DNA, 377 bp, Glycine max
  Clone ID: PAT_MRT3847_15222C.1
gaggcggccgccctttttttttttttttttttttttttttttttttttttttttttttttttttttttttttttttttttttttttttttttaaccaggaaaaaagcaaaagcccttaaaaacttggggcaggggcacggttatctaaaccaaaaaacgggggttgacataataagaacgggctttaaaaaacccggtgttcaaaaaatagggtaactttaaaaccgggaaagggggtaataaccaatggggggttatccaaaaaaagggggaaaaaaacccaatctagcggaaggcgggggcttaaaaaaagcctgggattaggggttttaaaccatttccccaaaaaattctaagagcccagaaatttttcccaa

SEQ ID NO: 48967 - DNA, 189 bp, Glycine max
  Clone ID: PAT_MRT3847_15223C.1
ataatttttttttttgaatgccccctttaagaaaataatttactagctattaccctaccaaacaatattaggacagtaagactaacgcatattgaaaaaaatcatatttaaaagaagattaaactttacacgtattcagagaacaatacggagagtctgcctaaaaaaaaaaaaaaaggacggtgggtc

SEQ ID NO: 48968 - DNA, 236 bp, Glycine max
  Clone ID: PAT_MRT3847_15224C.1
gcaatgtttggggaacttacttttattatggaggtcctggaaggaatgtgagatgtccatgaagatatagtataatatattggctcctattataaataaataaatatattttttaaaaaaaaaaattaaaccccatttcactacattcctaaaaaaaaaaaaaaaaaaaaaaaaaaaaaaaaaaaaaaaaaaaaaagggcccccccccctctattaatctctccaccccggaattt

SEQ ID NO: 48969 - DNA, 397 bp, Glycine max
  Clone ID: PAT_MRT3847_15225C.1
cataaataattccgtgccctttttcatgacccaggttaaaatttaccattcttatgagtgcaacagtcgctcacgacggcagtaggtctttatcaacatggactgaccaccttgcctaacatggaaaaggacagaaagaacggttcccagtactccaggctatggaggttgtgaggcttgcttcaaaaagataaaacatgtccccacatacagttgacaatgaacacccctaaatctaaattcgcgccttgataccatcgtctgtgtggatctctgattctcgttcatctctgggaggaggttctttctctgcatcaccaccataattggaagtgttttgttccaacaattgtgtcggagattctggtagcttggattcttctaaatatttagggct

SEQ ID NO: 48970 - DNA, 683 bp, Glycine max
  Clone ID: PAT_MRT3847_15226C.1
cagtgagtcttgtgatgtttctctcccaggtgacaacgatccttattggttggcccatatcggcatgggacattcagtgtatttcactgtacctgagaattgtcacatgaagggaatggctttgtgtgttgtttatttatcaacccctgaaaagacagcaactgaatgtcttattagtgtcttaatggttaattacactaagtgcagcatcctgatatgcaagcgagacacagtaatttcctttaatgatgaagattgggagggcataatgtcacatttgggatctggagacaaggtggagatttttgtggcttttgggcatggattagagatcaagaagacagctgtctatctaatgtgtgatgaatcaattgacatgaaaatggtgccttctcctgagccaaagaaagtgtcaaagaaaaatgcctttgtaagaatcataaagaaaattgtaacgagcaagattcaagagcagtagaggtttcaaccaatttttactgggcatgccaaagttgtagtatagaatttccatactttttcatagagaaaggagagaataacttgtgttggttgattgaaatgattcataagttattttaggtttaatcactcttttggtttctatagttacaacaacttttcattttagtccttacagtttaaaatatccaattttgatttct

SEQ ID NO: 48971 - DNA, 559 bp, Glycine max
  Clone ID: PAT_MRT3847_15227C.1
gctgttgatgatgaacacccttaatcaaatacaggggacgctttcaaataaaaagggtttttgccaccatattccattttcttcacggtggttgttacttgttattgctgtgcgaaggtgaaaaaaggaagaacattggaggaagcgacggcaaagtgttgctggatggaagtggaggataagctgatgaggctgcaatctcttctattcggcgcatagcgcgctctagagaacaacgactttttctggggttacatgctcgcgcttcgtctcctcggattcctcgacgtgaattcccactccaacgtctacgaagccttcgtccaaccgattagacgcgacgctctcgccaaacttcacttcgttcgccaatccctgactcctcaatctgatcgccaagcttttgaacaagcaaagaaatctccaggacgcatatttggcacaacaggagatattgacattgagaagattcggaattcagagtactcccaagctcttgtcaagcaatctatataaaaggatgagaattaattggttgatcaccctgggaaacaggaca

SEQ ID NO: 48972 - DNA, 829 bp, Glycine max
  Clone ID: PAT_MRT3847_15228C.1
tacgccggcggacgcgtggcgcggacgcgtgggccggctgcgagaagacgacagaaggggatctacttcaccaaattgacatgcgagacaatcattacactgattggatggaatatcatgaggaatggattaatatctggaaaaacaaacacaacgatattttagatgggcaatgggttgaaggaatagtgacacatacaccaacatacatggaatggtatagaaaaaacactattttgttcttgtctgttgaacaacagctacatgatccatgcacaacaattatacaaaatgatgcagggtcaggtgttgaacaaacacattttgaaattccacatcctcagtcaatgtattctactccttcacctgttcatcaaacttttggccacactggcgagtcagtcaccgcaaccacccatgaatggatgaccgatttatttggcatcgatttcaatacaccaaattcagcggcatcatatttagctactttagaacagttcgatgcaccgcattcgtttggagaacaaggacaaagttcttcagctacaacaaccaacattgaaaatactaacatagaacaacaacatgatcatgacgtggaagaactagtcatactggaaagaagaaatctgcgacgtaatcggcgtccaccaccttgttggacttgtcatcgtcttggtcattaaagtataaaatgttgtgataatgggatcaaatatgtttaagtacccctgtaacgacatcatcaaatatgatttggacccttgcaaaaaaaaaaaaaaaaaaaaaaaaaaacgaccgctctactaggatccaagcttacgtacgc

SEQ ID NO: 48973 - DNA, 341 bp, Glycine max
  Clone ID: PAT_MRT3847_15229C.1
gggaaaaaccaggcggggaattccaaaacagggaaccaggataaaatccttttttattttattcagggacatgaggggaacatttaaccccacatcttataaaaatcggatcaaaaccaaaatctgaacctaaaccactctaccaattttaaaccctattcaacaagaattggaacacaacatacactaagggggggcaattttgagcccccaccaaagccatgggctttaaaagggccaaaactcgggggggggaaccccactcattggcataccacgaaacccgcttaacaaaggaagcccttaagggaaaggcagccttgggatcaaaaatacttggc

SEQ ID NO: 48974 - DNA, 305 bp, Glycine max
  Clone ID: PAT_MRT3847_1522C.1
aacaagtaaaaacttattccatttttttacaacaaaatactctgtacattaccaaatcccaattggaagaccaagaacaaaaacaagagtttgattgtaagggaaaaaaaatgcacaggttattactggacacccataacccccttggctaccatatactttattccacaaagcaataaaacatggacaaaaatcataattctgtggggggatatgatacttaaatgaacttcctaattatggagcatcacaaggactatttgaactttttgctggcctttaagcataagtaaaccaaatttggc

SEQ ID NO: 48975 - DNA, 277 bp, Glycine max
  unsure (1)..(277): unsure at all n locations
  Clone ID: PAT_MRT3847_15230C.1
agaagtagactcatgccttgcttgtattaggactttactgaacccaaataccacaaaattcttnagctcagccctgctagccttaactgagaaagtggaaatttaagatgggatccgtgcancgtatggtgtcaacacccatggcatggtttagtatcataccatatgcttgtttttctgcctgtgaacttgtgagatagnaaaacagctacctagtcatccaattttactgtttgtatatttattggatgttttgtgtacttacatttcaaatgtc

SEQ ID NO: 48976 - DNA, 752 bp, Glycine max
  Clone ID: PAT_MRT3847_15231C.1
acgagcacatcctctctctctctgttcttttttctctctctttgattggatccaaaaagaatttgaaactttaggggtttgctgtgtaacaatttgttgctgccatgacgtgattgattgatgaataaagaataaaaatcattaacttgttagatattctcccttattggcttggttaatattgtgtttttgaattgcgcccctgaataatttgggtttttgattgttgtggtttgagccaactgcaatttcgctccataggatttactgagacgagctccaatcaaattttcgattgtcgtaagcgaaaagacatgctgacaaggaaaattgcagtattgattaaaaaaatacagttaaattcataagaaatcatctcgttgtgatgaattgtgagtaattactgtaaacgttataaaattttatcataaacacataataatttgcaattatatgatatagtgaaaccaccaactacggaattgtgttaaatatattataagagaattttattatttataataattctactgaagtaagatgatcttctgtaaaaatgtgttctatataaaaaaaattgatattgtaaaaatcttttatacgtttccatgcataaactatgtatatccgaatgccaatgcttatctaattctttggtatcgaagaaaagttatatcacgaggagtacaacttatgcaacacttttttctaactatcttatcccttatttatgttcttctctttatctttgt

SEQ ID NO: 48977 - DNA, 219 bp, Glycine max
  Clone ID: PAT_MRT3847_15232C.1
tgtacacaccctttatctgctcatttaatctctgcttttgttttttttactcgcatctttaccgctacactttccatctccctatcaccctctcctttctctttctttcctttctttctttccacgttctccatcttttcccttcaatctctaaatctgtggcttcctttaaggttcctatttaaagctttactttacctttaccccaaaaaaacttat

SEQ ID NO: 48978 - DNA, 174 bp, Glycine max
  Clone ID: PAT_MRT3847_15233C.1
ccatgcaccgtactaaactcgaaatggggggggcgagatttacttatggggggggggtaaaagctcaatagcatttccactttcattcttagaaaagggggatgcgccacatgggaacacttttccattgatcattttccttgtatacctgaaacaatcctttatccttattta

SEQ ID NO: 48979 - DNA, 491 bp, Glycine max
  Clone ID: PAT_MRT3847_15234C.1
gttgcgagggaattacttctgcctcaatggctgcaatagctcatagttatatgttggaggttttggagcttgacaattgcagcctgttgacttcagtgtctttggatcttcctcgtttgcaaactattagattggtacactgtcgcaaatttgctgatttgaacttgaggactatgatgctttcttctatactggtatcaaactgccctgcactccatcgtatcaacatcacttcaaattcacttcaaaaattagcattgcaaaagcaagatagtttaaccacgctagcactgcaatgccaatctttacaagaagtggacctctcagaatgtgaatctttgacaaactccatatgtgatgtttttagtgatggtggaggatgccctatgctgaaatcactagttcttgataattgtgagagcttggaatcagttcggttcatcagcaccactttagtcagtctttcccttggtggttgtcgggcgatcact

SEQ ID NO: 48980 - DNA, 236 bp, Glycine max
  Clone ID: PAT_MRT3847_15235C.1
cgatccactacctaacttcaactcactttctctctctctctccccgatctataaattcttctctcactctaaaatctctctctccctcgctccccgatctataaatcgctctctgtctctgaaatctctctctctctctctcggctctctcttctctctctcactcgtgtattgggtataggagagtccgtttattcaagcctagagggtcgttcaggtcctcgctgctggcatct

SEQ ID NO: 48981 - DNA, 327 bp, Glycine max
  Clone ID: PAT_MRT3847_15236C.1
gagcatggtctagctatgtcgatcgaactgtccaaggtcctgtcacctaactgacaaacgtgcgcgccggcagcaagcgccagtttaagaacgccgatgtaaggagtggtttgcagttccatacacagggcggcctcggggctagcaggccgctcaccatggggttaatcgatttgacaattgagcatggccgctagctactaccatggtgcgtttggcaaatgcacaactatacacgtgttagatggcattgcggtaggcacagacataccagatggtctttacaccggcccgaagaaggtctgagatacgggtttggaagacaag

SEQ ID NO: 48982 - DNA, 1771 bp, Glycine max
  Clone ID: PAT_MRT3847_15237C.1
cgcctgcacgtccggcaggtctgggtcttctttttcttctcccaggcgcccgcactgactctgtctctctcgaacacaatgtccaactccaccaccggcaccaccgcggccttaccaccgaagcccacctgggtcctcccataccgaaccgagaatctccgcgaggtctacaccctaagccgaaagctcggccagggccaattcggcacaaccttcctctgcacgcacaacgccacgggacgcaccttcgcctgcaagtcaatcccgaagcggaagctgctctgcaaggaggactacgacgacgtatggagggagattcagataatgcaccacctctccgagcaccccaacgtcgttcgcatccacggcacctacgaggacgccgcctccgtccacctcgtcatggagctctgcgagggaggggagttgttcgacaggattgtgcagaaggggcactacagcgagcgccaggctgcgaagctcatcaagaccattgttgaggttgtggaggcttgccactcgcttggggtcatgcatagggacctcaagcctgagaactttctctttgatactgttgaggagggtgctaagctcaaaactactgattttgggctctccgtgttttataagccaggtgaaaccttttgtgacgttgttggaagcccgtactatgttgcaccagaggtcttgcgtaagcattatggtcctgaagcagacgtgtggagtgctggtgttattttgtacatcttattaagtggggtgccaccattttgggctgaaacagagcaggggattttccgacagattttgctaggaagactagatttccagtctgagccatggcctagcatttcagacagtgccaaagatctaattcgaaaaatgcttgatcggaatccaaaaacaagggttacagctcaccaagtactctgtcacccttggattgttgatgacaacattgcaccagataaacctcttgattctgctgttttatcacgcctgaagcagttctctgcaatgaataaacttaaaaagatggctttgcgtgttattgcagagaggctctctgaggaagaaattggtggtctgaaggaattattccggatgattgatgcagataacagtggtactataacatttgatgagctaaaagaaggcttaaagcgagtaggatctgaactaatggagtctgaaatcaaggatcttatggatgctgcagatattgataatagtgggacaatagactatggtgaattcattgctgctacggtccacttaaataagctggagagagaggaaaatttggtgtccgctttctcctattttgataaagatggaagtggttatataaccattgatgagatacaacaggcttgtaaggagttcggtttggatgatgtccatatcgatgaaattgtcaaggaaattgatcaagacgatgatggacagattgattatggggaatttgctgccatgatgagaaagggtaatggaggaattggcaggcgaaccatgaggagcacgctcaatttcagagatactctgggaattaaaggccatgggtccgattaagtcattgtaccttaaataattattacttggtgataaaattttgaacaatgaaaactacaactatttattcaactatagaaaaaaaaaaaaaaagggcgaaaatttgttttgtgagataaacccatggctcaaaaatgaccttaagtacttgtctggtgatgaattacattgagccaaccacagcgccaattggcagctt

SEQ ID NO: 48983 - DNA, 125 bp, Glycine max
  Clone ID: PAT_MRT3847_15238C.1
accgctggtacgagaacaaataaggggaggtgctataagacgacagaaggaaaccctcgtatcaaatattaaggtcctgcttacaggaaatgacgcgagcggtgatattgactacttcgctggat

SEQ ID NO: 48984 - DNA, 240 bp, Glycine max
  Clone ID: PAT_MRT3847_15239C.1
ccgggaccaaaaaaccattcttaaagaaattaatcccttccccaatccaataaatccttccaagggccaccaagggtttttattattacattgggggaaaaataaatcggggaaagagagtaatattcaataaaaactttacctataacaacagaagggcaaaaaattacaagggaggctgaacgcatgttgctggcctcaacacttttgaagcaccggacccgtgggcggacccgtggg

SEQ ID NO: 48985 - DNA, 339 bp, Glycine max
  Clone ID: PAT_MRT3847_1523C.1
cacaccacagtaataataatcttgaacttttagcatggcacgtggagtatattgcaaaatccaaggattctacgctgagggggttggattgtgcattgatccgcacgctggatcacatgtatgccatgtcatacgacgctgcacgggacaacaggacatgcttggatgcaacgctgttatacgttcgagacgccgaagcaatggctggcacacctgcggatgtgaaggaatatcctaactcctacgtattcgagatacgacatgccaggggtgaaatctgtggacatacatgatcaggttgaagaccacaacctccttctgatgaagggagagtaagag

SEQ ID NO: 48986 - DNA, 300 bp, Glycine max
  Clone ID: PAT_MRT3847_15240C.1
ttttaaacaatttactttttaaacttatatttttcagactgaacctatccccggtgctggccatacaaaagcggtggtgaatcactcaattattaaatacaaacactaatccattgcactactatctgcatacatccttcatttgttgtataaccatttgaactcacctcattaattcatcctttcaaaactcacaaagttttctcacctatataccttctttcataacataatcatattttccattacttcaatccataatttcctataccttttctttcccaaaaaataatatccttt

SEQ ID NO: 48987 - DNA, 449 bp, Glycine max
  Clone ID: PAT_MRT3847_15241C.1
tttacgcgtgggcggacgcgtgggtctcgctcgcttttctttattccaccattccttcgagaggatcttttattttatttactatcatccattcccaacacacaattcccttatgggaacctcaaaaaacattcatattttcgcttcttgcttgggtcccattagattatattccattgggtgttcattaattgaaagaccttgctggttcttactcgttttatggatattctaacccttgttcctgtgatataccaatccaagtcaagcagtcaatatgtaaggtgaggaatatccgaaccccccaaaaaaatataaaaaaaggaaagataaaaaagtgattggctttgaaagatgacaattgctttgacccattttgcaaagagaatgtaaacttggaagggcaaccaggacattggtctggagaaccaatcttgatttaccctact

SEQ ID NO: 48988 - DNA, 337 bp, Glycine max
  Clone ID: PAT_MRT3847_15242C.1
ttttttttttttttttttttttttttttttggggggggtttttttttggtcacgccccaacaaaatgcgatttttgaactctttttaggttcaagggggcaaaacacgcggtgaaaggccaaaagggaaaatttgttaaattcaaccacccacattgtggctcttaaaaaaaaaacggggagaaacaagggttttatgtaaccagcacaaaaacaattgaaaccaaaaagggggtcccgctaaaaccaactggggggtcacatgcggaagaaaaaacatgggaaaatgggcccttgcaatagcacccgtcaaaacctttaggggcaaagatgggccc

SEQ ID NO: 48989 - DNA, 509 bp, Glycine max
  Clone ID: PAT_MRT3847_15243C.1
aaaaacaaaggaaatattttatttatagacaaaaatccacaaccaaaaaaaaccccccaagggatgggccaaaaaaagtcttttggggggggttttttcttcgttttggacaaaaaaagcccggggaagggggggccatttggacctccccaaaatataggcaaaaaacaaacttatttaaaataaccaagcaaggaatcaagggcctaggaacaggtatataggtaaaaaaaaatttcttttaaagggggaaaaaatggggagctaaggccttctaaaaaaataaggcccccagaaaaggccttcttaaaaaaaaaagaacatcaatttggaaaatggttcccggggatatcccacaaagggaacccgggggaccaattttttttggggggcaaaaaaaatcaaaggttatcccccaaaaggcccccaagggttatcatgcccaatggcacaaggttgaaaaggaggggcggaccacggaaagggggaaaaaccttcctccagggggg

SEQ ID NO: 48990 - DNA, 428 bp, Glycine max
  Clone ID: PAT_MRT3847_15244C.1
gggggttgttttttttattttttgggggacccgggggcggacccgggggcggcccccggggccaccccgaaaaacccggaccggaaccgggaggcaaaccaatttcccgaaaaagggggggaaaaaaagattgccgaaaaaaaggccaaacccggacccggggaaaaaaaagaaagcggcaaaaaagcaaaacaaaaaaagggccgaaaccaaaaagggaaaggccggggggcccaaaggggggcccaaaccaaaaataaggggggggggcaaactgcccactctgaaagaggaaaacagggagccccccccaaaaaaaggaatcgcccaacccggggggaaaggcaggtttgaaaattgccccccaggggggtttatttttaaaccacaaaaacggccaaaggcggatggcccttaacggcggggcc

SEQ ID NO: 48991 - DNA, 2705 bp, Glycine max
  Clone ID: PAT_MRT3847_15245C.1
catttgttcgttccttactccgatctggatgtgaagcacgcgctgaattgggttccgaaagaggtggtgtacgctctccacgagcgtctttaccgcgccctccctctttccatgaagcactagtacctcccttacaatctgcagtcaatcccaccgccataccaggaataccttcagcccgacgcaggagaaagcaagagagagcgaatcgcgtttacgcaaccccgggacgcgaggaacaccaacagcagcaacccgctactgctgcagtgtggtggcagttgccatgcttgcaagttagaaagaaagaaacagtgctcgctcgaatttcgagaacgaaagagaggaagaaaaaatgtacagcagtggtggcgctgaagccgaatcggaatctgaatctgagcgcaatagaatgggtgatgataaggaagaacagggctcctcgttcaagagctgggccaaacaaacggaggagagttatcagctgcagctcgctcttgctcttcgtctttcttctcattcagcttcttcttcggatcacccctcttcttcggcccagacgctcacgcaccggttttgggtagatggttgtttgcaatactctgataaaattatagatggattctacttaatccatgggatggatgtatatacatggactataagtactgatctgcagaatgttggtatgattccgtcatttgaatcactgatgtcaattgaacctagcgatgacttgtcaatcctagtggttgctgttgataaatctagagatcctggtttgagagaactgcaaaatagggtagcaagtctttcaaataactggattaccacgaaagatgcaactgatcagcttgcaaatcttgtttgcaataggatggggggaggatctttaactgaggaaaatttaggtacacgctggaaggaatgcacccaacttcttaaaagctgcctgcattccgtcattcttccaattggaagcttacccattggcctttgtgtccatcgagctttgctgtttaaagtgttggctgacttaatcaatctaccatgccgtattgcaaagggctgcaagtattgtaggaaggatgtgggtgcctcatgtatagtgcaatttggttctgacagggagtatatgattgatttagttggaagacctggggcaacatgccagcctgattcttcactgaattctgcatcttcaatgttggtcccttcaccattatgtcatccaaagttcaagccagttgaaacagctgaatatacaaagacactagcccaattgtatttcttggacagtgaagcactgcatcttgtatttgataccacatcaggacctgctgttaatcatagtggcagaatggatctacagaaaactgaagctctgggtgcaaattatgcgggtgggaacagccatctgattgctttgattcctggtgcagaggaatatgagtctttcaatgaagcaaaccagtcaataatggattacccaagtcatgaagttgatcttgacaaggaggatctggatattccatggagtgaacttattttgaaggagaacattgggacagggtcatttggaaccgtccttcgtgcggactggcgcggttctgatgttgctgtgaagattcttaaagtgcagggttttgatcctgggcgatttgaagaatttctaaaggaggtctcactcatgaagcgcctccggcatccaaacattgtacttttgatgggtgcagttattcaacccccgaagttatcaatagtaacagaatatttatcaagaggcagtttgtatgaacttctgcacatgcccaatgttggatcatcacttagtgaaaagcgtcgtttaagtatggcttatgatgttgcaagcggaatgaattatcttcatcaaatgagacctcctattgttcatagagatttgaagtctccaaatcttttggttgatgattcatacactgttaaggtatgtgattttggcctttcacgtacaaaggcaaacacatttctttcatctaaaaccgctgccggaactcctgaatggatggcacctgaagtcattcgaggagaactgtcaagcgaaaaatgtgatgtattcagctttggtgtaatcttgtgggaactagtgaccctgcaacagccatggagacaattaaatccttcacaggttgttgcagctgttggttttatgggcaaaaggctagagattccagggcatgtgaatcctcaagtggctgccttgattgagctctgctgggccacggaacactggagacgaccttctttctcctatgttatgaaatgtttgcagcaaataattgctgatgctaaagggtgaacaagtttaccctgataatcttcaacctgtatacagacaagaaacagcaatattgaacagaaaaataaatgggattccagtttattcaggaaattgctgaagaattacaatataccgttttatagagtaacctacgaatttttgttgtatatgctatttatataatcattactcacattgtcatatatattactatttgctttggatgtacctataataatcgtatgacactgggattctaatttatacatataagaattatttttatcttttaaaagaaataataataaagtttcctttcccccccaaaaaaaaagggccgcgcggccggccagccgactagtagctcgcgaattatactcaggct

SEQ ID NO: 48992 - DNA, 295 bp, Glycine max
  Clone ID: PAT_MRT3847_15246C.1
ggatacataccagaatttgctaaattaacagccgtggctccattaattgaaacttagatatcaaggaacatatcaagacccctagatacaaaggagcatcttggaagcgaaattcctgaaatcaatggcactcacatcgctcatacccaagaaagggagtacggtccgtccttatgagaaccgtcgaaacaatgacgcaccggtatttttctccccacagagaagacatgtcagatgaacacagaaatacggataaccaatggccataagaaacaaaaccaacagactgttccac

SEQ ID NO: 48993 - DNA, 384 bp, Glycine max
  Clone ID: PAT_MRT3847_15247C.1
taaatcagatggagtgtgtcttttaactgcagcttttgtgggcatcgccttcgcgagtcaatttgtgagagagttgaccaggttgggattgaatacatcggcatgtggggttttagctctggctttctcaaaggaactaagtcctgtggatacaacaattgccgttgcacggcgcattggaagtgcttttgcaccttagttaggaactatgcaggattctgaccaaactgatacattaagaattattgtggtaaaccctgctgattatctagcgacacccatactggtagccacttgtattgcctttccccttttgaccctgggttgttttacaatatggatgggatttaatgcccttcttgctgaaagcgcttatggggggag

SEQ ID NO: 48994 - DNA, 300 bp, Glycine max
  Clone ID: PAT_MRT3847_15248C.1
gaagaatgttcctgcttcaggcttccgataagttgaagcgatcttttgcttgctgcaagaacatcatctgaggaggtgacttcaagtcctatctgacggttattatcgcctgaagcccattaactccttatgctttgcttatcacctgagaactgagctccccaatttatcatggcatctatgagagaattatccataggcatactatctcactttaaaaaaccccatgctcctccatgtcaacttgtctttcttcgaacaacgacttccaacgcttttgttaaaagtctagcattttct

SEQ ID NO: 48995 - DNA, 416 bp, Glycine max
  Clone ID: PAT_MRT3847_15249C.1
ccaaaaaaaatttttttttattttaaaaaaatgtaagaacacccctgttgggaaattcgggggaaaccccaaacaacagtcttttgggggggccccaaacaaaaaccctagcagcaaaacttgggatttacataaatattttcaaggaaaaaaacttccccctactagcctaaagttcccaccaaaaccccaccaaaaggcccttaaggcattaaaaatagagaaaaaagggagggggagcccctttcggccaccttttttaatagtcccagggtttttacctgaggcaaaaaggggggggggctggaccttcaaccgggggaagctaaccattcaattaaaggctcgggtaaccaaggcactttcagaagttggggcaggagttgtaggttttgactcaccaaaggcccaaagag

SEQ ID NO: 48996 - DNA, 365 bp, Glycine max
  Clone ID: PAT_MRT3847_1524C.1
gaattcggcacgagattcatgcgttctatgtgttcgatgatttgcccgagtcttctcaattgatcacacaaatcaaggatttcataaacaagagaatctctgagttgaattgattattgttgttatcgattattattggtttatagtttagtggtggctcgtggtgaaatgataattaatactaacaggcacatgcaatgttgcaactatggaccatgtttaggggtcccggaatgccaaatttaagaacacagaattaataaaccatagttgcaactatagattattatggatttatagtttggtggcatgtggtttgcttatatttgtttaggctctagaattaataataatacaagtttcgt

SEQ ID NO: 48997 - DNA, 415 bp, Glycine max
  Clone ID: PAT_MRT3847_15250C.1
aaaagacctattattatttatttatatttttaaacaaccggatcggacttttttggtaccaaatcacttaattaccaatttggaacttacatttcttttaacctaccaattagaattattattattattattaccttaggccattttcctggggcttccgggattggaacccagcccgggattaaccgggccaacctttattggaccaaccggcacttgatggaaaccgggaaaacccggcccctggtcctggtgccttaagaattcacccggaaccaccagcttacctggacctttggaaggcccggtgggagccttggtaggaagaaggcccttcctggcacgcgccggcaatggcttcttttccttcaattcttggaagcccctgaaggaacccttggaaaggttgacctaa

SEQ ID NO: 48998 - DNA, 301 bp, Glycine max
  unsure (1)..(301): unsure at all n locations
  Clone ID: PAT_MRT3847_15251C.1
tctgcangcacttgtacgtaagcncggnnattcggctcgagactatacngangantcaaaacntcaanggnnangtagtatgnannangnnncanactnnagnnnngncncnaaacaaacacccnannnnataaagtggncattncttgcccngagcaagnacanntgnanngnacttgtgatgggtgngntaaggncanggntgccnnannttnanatatanananataanaaangnntggnaaaaaaaaaaanaaaaaaaaaaaaaaaaaaaaaaaaaaaaaaaaaanggggggncnnc

SEQ ID NO: 48999 - DNA, 254 bp, Glycine max
  Clone ID: PAT_MRT3847_15252C.1
caaagaagacagcagaagcgagtccgtggtgacatctgagtgccaggatggccatcaagccaacacggaggctgggtgtgccactccgtcgtccaagccagtctcaaggaagagatagtgcgttgaacgaagccccgactgcattgcacgcaagctgcggtctcagctcagtatgccgtgatccccccatggacagtgatcagcatcatgagtctcctgttactgtctgactgccagctcgtctgttgcgatga

SEQ ID NO: 49000 - DNA, 368 bp, Glycine max
  unsure (1)..(368): unsure at all n locations
  Clone ID: PAT_MRT3847_15253C.1
tacaacattgttgggatcattggagaccaatggagcgatctcctcggaggccacagaggcgaaagcagggacctttaagncttcnctgaatgcccctgtaactagcatttcagtaagttnccttgcacgctgcttcaatcaattctcagnttgnctncgtcntgctatgctnatcatgtcagtcaangcattggcgtgtancanaatnagtgggngcaactcaggctcttccaactgtttattngtttngtttatgcaggctngttggtggttccaaaacacaagtcccattgttaaagnaagncacttttgaancttattgtnnggtgtgtgtgctgntttctgcgtcggggctntttcaaantcac

SEQ ID NO: 49001 - DNA, 452 bp, Glycine max
  unsure (1)..(452): unsure at all n locations
  Clone ID: PAT_MRT3847_15254C.1
agctcggaaatacggctgcgaggtgtttgtttattttgaaaattaaccaagtagcaaagtatgntttggaatcattctggaggaaacctaagggtcacaagataagaggggaactttggtagattagtgctggagagaatgtnnttnngattattcaacccagcattactctagtnngttaaggnnngtgtcnnttcggaaccctggcattttaacaaatcattnnggaggaaagtcgttncgacacttcgttacttgcttttttggcgtcctcacaattctctcatccagcttcaattagtgccactcaaggcttttgatggactatgggaaaaggaaaagttggaaaaggctactaaatttaaagaggacaagttgtcgttaccaaaccttgggaagcctggcgaagatgcatactgatgttcgattttgaaatgggacccagtgacttc

SEQ ID NO: 49002 - DNA, 360 bp, Glycine max
  unsure (1)..(360): unsure at all n locations
  Clone ID: PAT_MRT3847_15255C.1
ccggcggggacacggccggaaaacccgggacgacccacgcgcccttttaaacccgcccacaagcgcaagagacagggggactgcaaaggagagaaaaacgagcaagccacaagcaacggcaaagcaggcggcagccacagaaacaaccaaagagagccacgcacgacccgaccgcaacacaaaacggcgcaaagcagagggcagaaacgcancacaccaaacccgaaaaagcaagccccaaaacaacagcagcgccaaccaaaggcagaaggcccacacaggcggagacacaaaccgaaaacgaacacacagacagaaccagacaagaagacaaggacccagccncagagcaccaccacc

SEQ ID NO: 49003 - DNA, 218 bp, Glycine max
  Clone ID: PAT_MRT3847_15256C.1
taaaaaaaggaagatggaagttttaaacagcccatacctttttcatttaataaaaggcgggcttgcgccgtacctccttgggcaaaaagccacctgttcccccaccccctttaatttccctccgcccaaaatttcccccttccttttttttgtaacaggcccttcccccctccaggggagggcccttattaccatttgccctaaaccccccaaaattt

SEQ ID NO: 49004 - DNA, 429 bp, Glycine max
  Clone ID: PAT_MRT3847_15257C.1
cttctcttttttagaatagcaaacaaattgacccaagcgaaaccgggaaccagacaaaatagatactggataggcaagcccacacccaagactacaaatggacttggggacatacgacaaatatcattaattgtaacaagcatagactcacacaccgaaatgatgagtacaagatccctgacccaaaaataccaaacaaaatattggtaataacttccaactatgctggcgagagggcggactttacacatagcctccaagggaattaacctcgacaaggggaaccaatcattctctgacaaaaagagccttcctctcactcactcggttgcaggcaaaaacaggaatcactaatcccaaagtatagcaaaaactttgcatagccaggggaccatccgggcaagcccgtctacccataccaaatgcgac

SEQ ID NO: 49005 - DNA, 222 bp, Glycine max
  unsure (1)..(222): unsure at all n locations
  Clone ID: PAT_MRT3847_15258C.1
nngagnagnagagagganngnacantnnnaagagtnggacgncagnggcaanngggngaagngggaangtaggnnagnnnacangnanngganngntnangnannnngncnaagcanggtcnagcaanggtgganaannnngagaaggcgtganaagagcntangnagaagantggancaagaagacganggggannagggtgngnggnaganganggggaa

SEQ ID NO: 49006 - DNA, 236 bp, Glycine max
  Clone ID: PAT_MRT3847_15259C.1
aaaaaatatagagtaacacgagtattaaaatggacacgggggatagaccggggaatggcggaccgggaaatgcaggcccaccacctacaactatagggggaagaactatagcttggcgggattaaggtgagaaatgagggggctaacctcaaaataaatgggggcataataactggcgagaatacaatccggaaaaacatggggggcaagccggaggagggaaacgggcaaaccac

SEQ ID NO: 49007 - DNA, 342 bp, Glycine max
  unsure (1)..(342): unsure at all n locations
  Clone ID: PAT_MRT3847_1525C.1
ccacgcgtccggacttatgttcctcctacatttggtatttggggaaatggtgtacactttggctgtagtgggctatgggaggaatgttgcagctgctaaatattcagattgggtaaggattaggaaatctctggaaaagctcaggcctccctcagtgacagaactgttgctgtctaatgatggggatcagatcctcgaggggtgtgtgacaaatttttttgttgtttgctgcaaggaaaggaattcaaatgatgagaaggccctgtgtgattatggcaataaatactcttttgaagtacaaacagttttgatcagcgatgnnggnnncttcaagaacaatac

SEQ ID NO: 49008 - DNA, 469 bp, Glycine max
  Clone ID: PAT_MRT3847_15260C.1
atgcatctcctaataacctagtcactacacaacttccacaaataggggtcatcccatatataatgcttagcatcgctcttaaggggatcattttgagctttagatgctaagggaggaaaaacagatgcaaccaaataattcacaatattagcaaactagggagtggggaaggaatcaaaaataccatacagaatgtacaaatggtcattcggaaaatcatcccgaatgggtgacttttcagacacacgctcaatcctactcagatggtcaaccacgatgttctgcgcaccactccgatcatggatctccaaattaaacttttggagccaaagcatccacctgatcaatctatgctttgattcagccttcttcaataggtactttagtagctgatggtcagtataaattataacacgagtaccaagcaaatttgaacgaaatttttcaagaacataaactattggtaata

SEQ ID NO: 49009 - DNA, 155 bp, Glycine max
  Clone ID: PAT_MRT3847_15261C.1
tagggccttggttaaggggacctattccgagacccttgcaggacttattaaagggctgccaaagttattttggggacctactccatgtttggccttgttgggaacctaccagaggaattaaagaagggggcttcctttggggaaggggtgggggc

SEQ ID NO: 49010 - DNA, 1171 bp, Glycine max
  Clone ID: PAT_MRT3847_15262C.1
cacactctctctttctctctcttcaaatcaaaacccatcacaattcacaacaacatacaaatcccaaatcctatcttttctcttctcatataaaagaacccttctttcgaatccttcccgctcttttccctctgatttaattcatgcgcagatccaaaccctaatccatctctccgagggtttgatggctgaccaaggattggaagggagccagccggtggatctacagaagcatccttctgggatcgtgcctacccttcaaaatattgtgtccacagtcaatttggactgtaagttggacctcaaaacaattgcacttcaagctcgtaatgcagagtacaatcccaagcgttttgctgctgtcattatgaggataagagatcccaaaacaactgcacttatttttgcttctggcaagatggtttgtactggagctaagagtgaacaacagtctaaattggcagcaaggaagtatgctcgtattatccaaaagcttggcttcccagccaaatttaaggatttcaaaattcagaacattgtcggctcttgtgatgtcaagttccccatacggctggagggtcttgcatattcccatggtgctttctcaagttatgaaccagagctgtttccagggctaatctaccgtatgaagcaacctaaaatagttttgcttatatttgtctctggaaaaattgttctaacaggagccaaggtgagagatgagacttacactgcctttgaaaacatatatcccgtgcttactgagttcaggaaaaaccaacaatgattgtaattcaagaaagagcaggagcagtggtttggcagagaagttcgtggaactgtaaatattaagacaaaggagataatctaaattgatatataaattaaagacagcctgtgttgccccttgtctttgttttttgatttgtcttgatgtagtaaagtggcagacgttgttctattgaattgacatttttaagaaaaaagaggattctgagtcagaatatgaggaaaaaaaagtttgagagctaaatggaaaagtagcacattgagtctgtccctgacagtagtttgaaactcttttgatagcatctactatcaattgagcgtagtgtgatctgactactgagtatggaatatcttgatcaacaaatcgaaaatttgagctgct

SEQ ID NO: 49011 - DNA, 3247 bp, Glycine max
  Clone ID: PAT_MRT3847_15263C.1
tctctttccacacacacaacacaaatacctctctttctctctcttcttcgcattcttcggacatacaaaaactcacactctctctctctctcttcaaatcaaaacccctcacaaaattcacaacaacatacacacaaatcccaaatcctgtcttctcatataaaagaacccttctttcgaatccttcccgctctctctctctcttattctttttccctatccgattcaattcgcgcgcagttccaaaccctagtccccctctccgaggtctgatttcacaccccaagccccccaattcttgttttcttaaagaaaatttttaaagaaataagagggtttcgtttcattgggtgaaattcataaagaaaaatgttttttttggggggtttttttgactttcgagatctggggtgtttttttgtttatgttttaaaggttttatctttttgtgttttgagttgagaaaaagagaagcgaagttgatttttttttgttattggtactgattggtgttgaacatggtgggttttttttttcttggtgggcagctctgtgatttttgggttgataaaaaaaattagggtttgatggctgaccaaggattggaagggagccaaccagtggatctacagaagcatccttctgggatcgtgcctacccttcagtgagtatctgatttttgatgaacaaattacactttctcttttgattggcttcaatttcaattgcaagcttcagatggttgaatcttaagttgtggggttaccctttttgataatttgttagtgataagtatccaactaagtcaaccgttatgcttgtagagcctatccacagatcacactattgcaagttctcaattgtgtaggaattttgctcccttaagttttgtgacttttgtctatttggcactttaacagacttgttgagtgctatttttgaatatttatgaatactttacatttcttttatttttttatgtacgctttcaattatcaatcatgactgtgcattacaaatttggaagattttagattgcatccactattttagcgttagtgatcccactgcgtcctgctatgccactataggaatttcctaattgagttttaacttttaagaggtggctgtttatgttgtgatctactctctaccatttgttgtatttgattgataacatttgcttttatttatatttgaatgtataataattttgcttctattcacattggaatgctaaggattttgcttcaattttctctggattatttattaattttgtttttgtttacaatttactctggattatggaaataatttccttcaattttcattagcatacatgataattttttctctatttatgcggagtaatctaataatcaagctgtttgtaccgtcagaaatattgtgtccacagtcaatttggactgtaagttggacctcaaaacaattgcacttcaagctcgtaatgcagagtacaatcccaaggcaagtatcatttgcttgtagtgattttcactgaaatatgctatctgcacatgtttacatgtttctttttctgcttttgcatctgaattacaataaagattaactggtggttgtgcagtcacctatcctgctttctggattgttttctgttcctttctggaccagagaagtgtggttaatccaagactattttatatttatatcccacgtgatatcttctgcttgctattcagaatcattaattagcaaatgtattatacacgccagttctaattggtttgtggtatactgtactgatgtttgtgatgtgtttgtttgcagcgttttgctgctgtcattatgaggataagagatcccaaaacaactgctctaatttttgcttctggcaagatggtatgatcctttgctgcactgctatgtctatcttttagatgatagtagtgcattttgttatttttaatgctgtcctcaaattagttctatgttaatttatggttgtgtggttctcttgttgaattctttttggtattggttatattttaattaactatgtttatcaaaccaatggtcaaactggtgttatttagaaactctgtaaaattcaggcttgcctttgcccttagtatgtctttgaaggtgctagtaatgaggttgcaaacatggttgtcacttgtcagaattccttgaatcaactggttctatatagcatgatgagagaatcattaatttatgtaaaatggaaataaggaagatattctatttctaaatttatttttacagttttatttagcagaaaaccatatattttctcttgttttaataattgtgcacaattcttgcaatttactatacatttcaattcgtgatttagattatagcccttctggtctgtgattcatagtttgccaaccatggttgcaaaaagttgaaatttgtcttttccgctttctgtaatggctcttatttggtacccttcttgtaatggtttctctcgtgaactttaaatttaattttttatgactattgactaggtttgtactggagctaagagtgaacaacaatctaaattggcagcaaggaagtatgcccgtattatccaaaagcttggcttccctgccaaatttaaggatttcaaaattcagaacattgtcggctcttgtgatgtcaagttccccatacggctggagggtcttgcatattcccatggtgctttctcaagttatgaaccagagctgtttccaggactaatctaccgtatgaagcaacctaaaatagtcttgcttatatttgtctctggaaaaattgttctaacaggagccaaggtgagagatgagacttacactgcctttgaaaacatatatcctgtgcttacggagttcaggaaaaaccaacaatgattgctgtttcaagaaagagcaggagcagtggtctggcagagaagttcgtggaactgtaaatattaagacaaaggagataatctaaattgatatataaattaaagacagcctgtgttgccttgtcttaattttttgattggtcatgatgtagtaaagtggcagacattgttctattgaattgacatttttaagaaaaaagaggattctgagtcagaatatgagggaaaagtagcacattgagtctgtccctgacagtagtttgaaactcttttgatagcatctactatcaattgagcgtagtgtgatctgactactgagtattgaatatcttgatcaacaaatcgaaaatttgagctgct

SEQ ID NO: 49012 - DNA, 826 bp, Glycine max
  unsure (1)..(826): unsure at all n locations
  Clone ID: PAT_MRT3847_15264C.1
ctcgagccgttctaagccaaattgattttggatatctattcttttttgttttcgagttnctctctcttgcaatcaatggtgacaagcatgcaggaatctagtgcttttgcttgctaaaatggttaagttaaggccgatctcacaggaatgggtgagaaggaagtttcggttttggatagagatgggtgtgacaacaagagtgacactgaaagcatgtatcccatgtattttggtgtttcttgtgcattctttgcactccaagtcctcacagaagaaccacaagttgaggttgagaaatggtctaaaatccgtgacacaatgcttcaagggagtgctcgactcttggggttggttgtgtggaagcttcagaagggaatgcgaaatgggggagaatgcaaactcaaaattgctgagggagaaattgagaatctgaaaaaaatgaggcatgaggatgccaaggccaatgagaaagttgtgggaatctttgcagcacaagagcaaagctggttgagtgaaaggaggagacttcggcagcagattggggctctactgagcgagctgagagtttttgagagaaaaaggatgctgctatttctgaattaaatcagaaattgaaggacatggaatctttggtggagtcaagagacaaggagattgaaacagaggagcagaagaggaaggagctagaggaaaagctgaacaatgtcgagaaggatgctgaagaaacgagagaatctgctaggcgcgaagctcaagagcattctttctgatcttaggaagcacanaactgctttcattgagctttgtgtcaaaaccaaaggcagct

SEQ ID NO: 49013 - DNA, 751 bp, Glycine max
  unsure (1)..(751): unsure at all n locations
  Clone ID: PAT_MRT3847_15265C.1
ggctcgagggtacccccaccacctgccaccaccaccacaacaacaacaacacttctgatgttgtaggatcatacttctccttccagcacttgaactatggaacaacaacaaacatgtccctctctgcaaaccccaacgcctctctttgttttgttccagcctccacttcttcagaccttaataacaattccaccataacctcctccatgctcccttcaattttcccaacacaacacgtgaagctccaatctaataacaacaacccttccatttcatctgatggggttcaaaactgggaaacaagtaacttaaataacagcaacagcacaaacaaaaacaatgggagtatgcagttacaaagctgcacaaacttcattgacaacacgtggggggtgggagagtctatgaaggttgttaacatcaacaaagatgctgatcaaatgcctctacaagcagaacaagaagatctgaaatggtctgagtatcttaataccccgtttattctgggaaacaacacagcgcagaatcatcaaattcatacctctcaatctatctatagtgaggttaaaccagaaacagttttcataacagacgagtcatgtgctacatggcaccattatcagaatcagacaccagcttttcaactttccgatatatatagcaaggatctgcagagattttcagtgactttcggacaaaccctgntacgtgtgtgtacgtaatatatgtgggaaattcaattcaacgaaag

SEQ ID NO: 49014 - DNA, 1094 bp, Glycine max
  Clone ID: PAT_MRT3847_15266C.1
aattcggctcgagggaatgagttgggctaagtaccttgtgagcctttgtgccttgaagggaatgactactagcttgcttgttgggtcaatggggcaagctaggtacactactcagattgcaaggtcgcacatgatcccaccctttttcgcattggttcacccgaaaaccggaacccctgtgaatgccactctcttgaccactattagtagctctgtcatcgctcttttctcaagcttggatgttttgtctagtgttttttctatcagcacccttttcattttcatgctcatggccgttgcgttgcttgtgaggagatattatgtgagggagagtactgccaagagtgacttggtcagagttcttgtgtgcttgtttgttattattggttcttctgttgttggtgctgcactttggcactcagggaagctgggttggatcggttacactgttgctgcttgtgtttggtttttgggcactttgggaatgagttttcttcctaagcagagggctcctaaggttgtggggggttccctttggttccgtgggctgccctcattgtccgttgccacgaacctctttttcatgggatccttgagttctgaggcttattggaggttcttaatttgcactgctgttatgtttgtgtactatttttttgtggctgtacatgcaacttatgatgtggaccatcaagataacggtttagaaggaaagaatgatgaaggagtgggagataataataccaatcaaggggtgatatagagagtttccaagaacaattccttgttactgctagctgcttaataatgttgctattgcataattgtatagatgcatcatttaagatttcatggttttgtgaggctctgggcataatgttctctgctcagcattgaattgaaattagcctgtcggtgacaatgctggttgtattgggttctcttttgtgtggacattagtgtgtgatttgataccataatgttgtcatatgtttgaacccgtgcaacacacgggatttaagttatttttagatttttacataggtgaagaattttatattcttataataaaaatatgttagataatgtgtaaa

SEQ ID NO: 49015 - DNA, 372 bp, Glycine max
  Clone ID: PAT_MRT3847_15267C.1
aaacaaaacacaatatcttccaagggagacaaaacaaccgccaacacaaacaggcacacgaatagctcataagtcaccacggggcagggaacacaaaaattaaaatttccacactcacaaacataaagcgctcataacggcccaaaagacaaggagggaccgctgcggcgactatgccaaggggagcactaaagacagcgaatcccaccagagaaagccttaactacaagcacgcccagccccccatccaggcttgaagactgagcaaacgaaacgacaatgttaccctaataagaatcgtgaaactcaaacttcaactgctgagaatgtggtgacagcatgtaaggcaccatctcataggccctttcggca

SEQ ID NO: 49016 - DNA, 435 bp, Glycine max
  Clone ID: PAT_MRT3847_15268C.1
tgaactcaaatatctgaaacagctgattaatctttatcaagcaacaacaactatgtactgcagtacatatcaaaaacagtgttatagcatcaccgaatatgctcatccaacatctttatattcttctactcaattgacatcctcactttattccaccaacaaagaactctaatatcaacaatctctcttaactcatatcctgtcttcaccctactcaagcacaagtttatcttctagtacactctccaaacacctgaacttcaaaatcaaacatcatactaagacaccatacataacattcttaaatttactacggttgaattattctatctctgctacttacatcttgctcctcccgcttttttacctattccaacatatttgcaccttttcaatgaatgaatccgtcctctattgtaatactcttctaacttc

SEQ ID NO: 49017 - DNA, 373 bp, Glycine max
  unsure (1)..(373): unsure at all n locations
  Clone ID: PAT_MRT3847_15269C.1
ngnncgnngnnnngcgnngnngnnagcgccncgnnggngcgcnccgcncccngggncgcngngngtntgtcgcgnaggcngttggtcgttcgnnnggtgngntgtgtgtgtgtgggtgngggggtnncgcggtgntgnggcccgtgnggtgggnggngcgtngtntgtgttgcttncggggcggtggggcntgncggngatgnggcnactnggtggcgggcgcngnnngngcgngnnggtgtccggannggngggtcgnggngnggntggtgcncggcncgnnncggcggaagtggtcgnncggnnggngnggggcacggncgnnnggcnnngtggctgnngggggaggngntggcgnccnntgnnantgngc

SEQ ID NO: 49018 - DNA, 232 bp, Glycine max
  Clone ID: PAT_MRT3847_1526C.1
cggctcgagctccagccacacaatcgttttcagcacctccaacaccaacagggcgagcatcgccttccataccagggcaggcacccactgtttccactcgaacggctggccctactacaccgcaaacaacattaattcgatcaccctcctaaaccatatcttagacctgatccgatccagagattaaatcgcacctcgcacaggctatgcgaaacttccaacatgccctctg

SEQ ID NO: 49019 - DNA, 169 bp, Glycine max
  unsure (1)..(169): unsure at all n locations
  Clone ID: PAT_MRT3847_15270C.1
cgtcattccgtaccattaaaccgcacgagtatggtgctgtcatgnggcgatcgaggagaaactctgattacacgggaggattaccaggaccttcttaccggccgatgagcttctctatgactcctttcggttccaggtaactgataccggaatgcggtgggacgtgcac

SEQ ID NO: 49020 - DNA, 3102 bp, Glycine max
  Clone ID: PAT_MRT3847_15271C.1
ttcttcagggcagtaaagtccctaaacagattatgtttctattaccttagccaaaccaagataaaggaaactaattcggaacactagttgtgctgaccacaccaaccatgtttcctttacaacgcggcaatgagctggtaatccagttttctaatggtcaccacccgcagcacaaaatctcccaagatctgattctggatgatcaagatatcgatcaatctccccttgtcggttattccgataaaaaattgcgtactagccggccaaaaaaagtggattttatcatgagacttcattgattttgaacaatgttgggactatacgaaaaaggggattaccgatcttaagaaaattcttgaaagagcaaaggaaactacttatagctcccagggatacatgatgctaaacacaactctatctaatatgtgtagacagaagcctccgaatgattttatcaaatggacgaatgacaagtacaaggatattttcgttgaataaatattaatcaccggtttgccatctcgaagagagaagcatgatgaattcatgctgagggagcttgtccaaagaaggttaaatcttaaagtcatggtccggtggctttcacggttcttccattatcttgatcgctacttcatttctcgacgctcgctgcctggaatcggtgcagttggcctcacttgcttccgtgaatcggcttttatggaggtacgagtcaatgctagggaagctgtgattgcacgtattgatgattaacgtgagggtgaacaaattgatggctcgttgttgaaaaatgtacttgaaatattggtagagattggtatgggtgaaatgggtcaatatgaacatgattttgaggaacatatgcttgaggatactaacgtttattacaaaagtaaggcttttcaaatagattgagattgactcatgcgaaagtgatatgctgaaggctgaggattgctagagaaaggagagagattgagtttctacttacatacactctaattcaggcaagcaagtgggactcaaagtccgttgttaatatcaactgacttatcaatatattttcgggctttatcctttataaattcggattatctactctctgttttctttctttgctctgtggcttagatgagtcatttgttcttaagtatctattaaagcagattatgcatatctcccaaattaaaactgaagggtactgctgatggttgatcatttgttctacaagctgaagaagcttcgagcaatcagactactagtggttctggctttcaggaacaagtccttgtccgaaaatttctagagctccatgacaagtatatggcatatgttaatgactgctttatgaatcatacactgttccacaaggcattaaaggaggcatttgagatattctgcaataaaactgttggtggtagttccagtgctgaacttttatctacattctgtgacaatatccttaagaaaggtggaagtgagaagctaagtgatgaagcaattgaagatacccttgagaaggtagtcaagttgcttgcatatatcagtgataaggatctctttgcagaattttacaggaagaagcttgcccgaagattactttttgacaggagtgccaatgatgaccatgaaaagtgtattttgacaaagttaaagcagcagtgtggtggccagttcacatcaaagatggaggggatggtggtagacttgacattggctagggataatcagctgaaatttgaggagtatcttcgtgataactcacatgtaaatcctggaattgacctgacagtaactgtgcttaccacaggattttggcctagttataagtcttttgatctcaaccttccttcagagatgatcagatgcttggaagtttttaagggcttctatgaaacgaggacaaaacacagaaaacttacttggatatactcactgggaacatgccacgtcactggcaagtttgatacaaaaaacattgaactaattgtgccaacctatccggctgctgccctactgctattcaacaatgctgataggttgagctattcagagattttgactcagctgaacttgggccatgaagatgttgttagattgctccattcactgtcatgtgcaaaatataagatacttatcaaggagccaaacaataaagttatatctcaaaatgacatctttgagttcaaccacaaatttacggataaaatgagaaggatcaagatacctctaccaccagctgatgaaagaaaaaaggtaattgaagatgttgacaaagatcggagatatgccattgatgcagcaattgtgcgcattatgaagagtaggaaaattttgggtcatcaacaactagttttggagtgtgttgagcagttgggccgcatgttcaagcctgatatcaaagcaatcaagaagaggatcgaagatctcatcactcgggactacctggaaagggacaaagataacccaaacaccttcaggtatctggcataaatggaagttactaatgtatagagtggccagtgttatggcctgcaaaaagcactggggtttgcctgaatttaattcttagggaagtacagttgaaaattcttaaggttacacaattctgtaaatgatcgtagccgattacttgattcagaagcaccaggagcgagatttttttgtcatacttgacattttaagagctagtttaagatacaacatacgtactggagcgaagcaagatattgtaccaaatacgttgttttcatatatatcttgattactttaatggaaagtgaaggtgggaaagtgaaggtggcccaatgaaagattgaaccttgatattctacctaagtgctacaaattgaggcaagctagtgtggctcatcggccgttgttgatatcaactgctttagcaatatattttctggctttatcctttataatttcggattatctcttctctgtcttctttctttgctcagtagtttagattagtcatttgatcttatgtatctatttaagaaaattatgcatatttcacaacttaattttaggggttattaatatgattgatagaattttctcaatggatatattaattcagccttttcc

SEQ ID NO: 49021 - DNA, 590 bp, Glycine max
  Clone ID: PAT_MRT3847_15272C.1
tcggcccgacatttattgactccggtgttttttgatccactttggcaaaaattcagaacaaaaggcagcggtgactgaaatggctaataaacctaatacacttcctcctgaaaaagatgatattcttgaagattcttgatgcgcataaattgtcttggatatgacttgcaaaaaacaaagaaagccctgctagccactgtttcaaagcaagtcgagcttgccgagccattggaaagctgaaaggacactcactgtgacgcgaagaaattcgtgtcggccgaaaaatagaagttgtgccccaagaatatgagcccgcttttcatcgtgagtttgcagtccatggtttccgatactttacagccgattgactaccaaagctaaacttctgttggcttatataaaaaaattactctcattatcatataggcctggaagaatgtgggctatggggactgcataaccccgatggataaaaggcaacaagaatgggggaagaagattctggactccgcacactccttttaaatgcataactgagagtgctaaccacatttattctcttataggctttgctgtgcagatgacatata

SEQ ID NO: 49022 - DNA, 1131 bp, Glycine max
  Clone ID: PAT_MRT3847_15273C.1
gtttctgttaccttagccaaaccaagattgaggaaaataattcggaacactagttgtgctgaccaaccaaccatgtttcctttacaacgcggcaatgagctggtaatccagttttctaatggtcaccacccgcagcacaaaatctcccaagatctgattctggatgatcaagatatcgatcaatctccccttgtcggttattccgataaaaaattgcgtactagccgtccaaaaaaactattttatcatgaggctgatacctgccacgctaattctaaccaagaatatacaaaaaagatggttcatagagagattgaaaagcaaaggaccgacccacgcgtccggtggtggccagttcacatcaaagatggaagggatggtggtagacttgacattggctagggataatcagctgaaatttgaggagtatcttcgtgataactcacatgtaaatcctggaattgacctgacagtaactgtgcttaccacaggattttggcctagttataagtcttttgatctcaaccttccttcagagatgatcaggtgcttggaagtttttaagggcttctatgaaacgaggacaaaacacagaaaacttacttggatatactctctgggaacatgccacgtcactggcaagtttgaaacaaaaaacattgaactaattgtgccaacctatccagtaaactgcctttcacccatcaccattcctattttatgttgaaatttgtgccactatggtatttaagatttatgacttcatgctggtggtttaacaagtgtctcttctacttcacaggctgctgccctactgctattcaacaatgctgataggttgagctattcagagattatgactcagctgaacttgggccatgaagatgttgctagattgctccattcactgtcatctgcaaaatataagatacttatcaaggagccaaacaataaagttatatctcaaagtgacatctttgagttcaactacaaatttacggataaaatgagaaggatcaagaaacctctaccacctcctgatgaacttaaaaacgttattgaagatgatgacaaagatcggcgatatgccattgatggatcaaatgaacgaggcagtgaattacataaatc

SEQ ID NO: 49023 - DNA, 396 bp, Glycine max
  unsure (1)..(396): unsure at all n locations
  Clone ID: PAT_MRT3847_15274C.1
attgnatgctttatatgggcttggttcgtgtcccttcatcgcttttccgaactcgtttaacgtatggggtaatattaattgggggaagcataaaataaacatgtccacaataaagccaaacatttcagcgtggtcccaaagtttgagaatccatcacaggccacatatgcaaaccatttcaattcatttaattcaaagctgcgaaaaagtcctatgcctaacaaaagctggaaacaaccccaactgtctactactttctgtctttatcactgcaggaggtatggtgatgaataagcattcatttaacaatgccgtatcattatcttcatcatcttgtgtaaatgctcacaatttttgttggaagagctattagaactatggccaaagccttaacaa

SEQ ID NO: 49024 - DNA, 981 bp, Glycine max
  Clone ID: PAT_MRT3847_15275C.1
ggagaacggctgcgagaagacgacagaaggggggggaagagaaatgagaagatgggcaccaccttgatgagatgctcccacgcaaacgctctcttcagagctctcaaacccaaaccccgcaattcttcactgccactttcttcaatggccatcaacaaaggtaatagtaataaggcatatgatgcattgctgttggatgctgggggcaccctattgcaattggcaaagccagttgaggagatttatgccactattggatccaaatatggtgtgactgtggatccagctatgataaagcagggatttaagagagcatttgctgctccgtggcctgaaaagctgcgctaccagggagatgggaggccattttggaaacttgtagtttctgaagccactggttgtggagatgaagattattttgaggaagtttatgagtactatgcaaaaggtgatgcgtggcatcttccagatggagcttttgaaacaattacttttctcaaggatgctggagttaagatggctgttgtatctaattttgacaaccgcttaaggaagctattgaaagatcttaatgttttaaatctgtttgatgctgtcattatatcatcagaggttggatatgaaaaaccagatccaagaatattccaagctgctcttgatgaagtaaatgtagaggcttgcaaagccttacacattggagatgatcagaaggcagataaactgggggccaatgctgtggggattgattgttggttatggggtatagatgtgaagacattctctgatatacaaattcgaattcttaattcagaggcataacacttgatgtggtttgtagctctgatttgatcatgctgataactagctagcattttaattaggtggatgactaacactgcccttcttaattttctatgcatgatgtaaaaacatatgtgaccaccttgtttgccaagtttggtaaataatatgttgcaaccc

SEQ ID NO: 49025 - DNA, 307 bp, Glycine max
  Clone ID: PAT_MRT3847_15276C.1
atccaaagaaccaccataatattaatttaaacttacgttaccaaccaacctaccgagagggttctacttacaccaatcatccaaggagccacactcactatcaacccaccaaaattctcttttcctgggcccaattcatactcaaatgcttatacagatagtagagacttgagagcaaaccaacaacaaaaaattaggcagaggctgttttctcagacttatcagtttccattgggtcaatagacactggtgcagcctgactactgctattcccaccattttcattactgttggcatcagcattccc

SEQ ID NO: 49026 - DNA, 414 bp, Glycine max
  Clone ID: PAT_MRT3847_15277C.1
cttcgttctttttttttttttttttttttttttttttttttttttttttacaaaaatggactattaaaaaaaatagtcattaattccttcatagatggatgtcttctataacgatttataaacctacattaataaaggaacagtaaaaaggaattctaatcagcggatacaaatttctacagcttattagctaattacacctttagccttttttcactggggcataatacgtatcccccaaccaaaaaaataccaagggtgtgggggaactcatctttggtggtcttttgcatcttctaatgaaagctaaaagcctaattgtaataaccctatccatcaacacgctgcaaaatggttggcaacgggcctgaataattaaggcttacgggccacggggaatgatgccttggggga

SEQ ID NO: 49027 - DNA, 367 bp, Glycine max
  Clone ID: PAT_MRT3847_15278C.1
agattacgctgctttatttcatgatggaggaggtcaaactgcccgttcctaaagtcgacatcggggaggctcataattaataaactactttctgctgaacaagagcatgcttgacaccgtgctctacaccagggacaggtacctggatactggtgttatcattttccctgacaaggctaccatatttctaaacgttattgacgactgctagtccaaagaatagaacattcgcttacaggacaacatatggagctttgactacacgccgctcaagaagactgccatgaccacatcactttgttgacactgactatatgaaagccgcagttacagacccttctgtcgtgttcacaatcgacctttacac

SEQ ID NO: 49028 - DNA, 371 bp, Glycine max
  Clone ID: PAT_MRT3847_15279C.1
tggtaccgctgccaaaaaaacacagaaggggaactcaaccaattgccgtaaaaaagacaatcaaatttcaccttcagcctaaccggttttaggtttcagtttttgaaccaacccttgacgtaacaaaacctaagtttcggatcaagtctgaccaatctggttggtagaacctttggacttacagagtcaagttttatgtctgaattagacgataaattcctactgccttcgatacttttgctgatgcaaatgctgatgactcgggtgctgggtcaaaggagtatgtgcacattcgcgtacagcagcgaaatggaacgaaaatcctgacaaccgttcaaggattgacaaaagaattcagctataacaagata

SEQ ID NO: 49029 - DNA, 601 bp, Glycine max
  Clone ID: PAT_MRT3847_1527C.1
gcacagcaaaaatatatagtattatatataaatcagtactaggtgtactggatgaaggataaaatgtacaaggcaaatttgcctaacccatccgacataaaatgtacaaaaaacacagaagccataacaaaaagagaaagccccctaagacagctcttccttcaagttagtagaccattggttgaaatgtatgtggaagtctttgtccatgcattttagccaagaccaagtgtggaataaagcttcgtccatgactttttcggggctgaaaatgtgatttttgaaaaccactgaatttctatgcttccaaatagtcatggatagagctatccaaagcacttcccatctcttgtctagatgtctattgctgttccaatgcgagaattgtataaaatgacttttagggtcaatggggaaagggcccactctactaacccaactcaaaacctcccaccaaaggctcctggttgatgtgcaggaaaacaagatatgatctactgtttcctcctcttcatcgcatagagggcatctataagatgatagagccacctgcctccttcttaggttgaccttagtaggcaatctgtttttaaagagtctc

SEQ ID NO: 49030 - DNA, 387 bp, Glycine max
  unsure (1)..(387): unsure at all n locations
  Clone ID: PAT_MRT3847_15280C.1
aactacnncccggccgccctttttttttttctttaatcccactaaacaacacaaagcctcattcacggggggggggtggctttcaagaaaacaaaattacattcccttccctgttgcacaggattgaccaaattcactgatatacataaattgtcattaaatgaacccgggggaaaccacaaaggaaaattccaaccgatcaattctgggaaaagtcaaaccacattattacttattaacaacaaattcggtttgttgacccataatacagattcctactcgaattatatttttaatacaatcacaactcttaatgagcaacctctgcagatcgtatcatgtaggatctctgaggcaccatcagcaagcggtgacgtacccttgtag

SEQ ID NO: 49031 - DNA, 454 bp, Glycine max
  unsure (1)..(454): unsure at all n locations
  Clone ID: PAT_MRT3847_15281C.1
ggaagccggccccgggccgggatccccgagagcggccgcccgtccgaaaatagtatgtgataactaccccgnagaagagacaggaacaaacgagtagagggacaccaccaaaagtgggaaaagccaacaaaagctaaaacgctggcgaaggggaaaaaaaaacaaggaagcacccgccggggaaagcaggaacgatgaccatcagaacaccataggcacaggcagaacgccccacgaaaatggaccagaaggggggggcctaacagaccgggaacgcttctacaatgggaatgcccacggataaggcaagaggaacaaggggaagaaagacccgagcaacacgaaaaaggcgaagaaaaggaacaagccgaaccccatgtggcaaagcacagtcaagaagaatcgcgcaatcaagaaagtgaaaaagatgataaccgacacaaggatactgaga

SEQ ID NO: 49032 - DNA, 887 bp, Glycine max
  Clone ID: PAT_MRT3847_15282C.1
ctagagtcgccctaaatcctcttagggtttggagagtggcacttaatttgcagcaatcacgaacaccacctcaaactaatgcagcttctcgatactcactccattcttccaagccctaattaagttcgcttaatccaatcagcaattacaagcatcgaagttcctccacagttttaatctgctatggcagcgagactcgcgattgagaggagcaccagatggagattgagcagcgttttagggttcaataggtggattcagtcggtgccccaatctcctcctttagctggaagcattgatcttggggttcggtcgccgcaatccgttttgcccgagttttcccccccaagtttctcttatgggagctccatggagctcatggctgtcccaaaacgccaaggtttctccccataaaagaggaataaggaatggaccaaaagctctaaaacctattcctgtgattgtcctatgcaagagttgtggtcgtgctaggcttccacacttcttttgttgtggtgggaaaccaaatcagggtaatactggtgaacagaaaggtagtacaagctaagctaatcaagctgtttgtgaaactgcagatgttggttcgtgtgcagggccacccgtaagtaggtccatttggtagtaatgctttatttccttatttcttaagcaatgccatcattggatccgtagatcttttgctttagatgataaatgaagtagttggtgggtaaaatactaaaatttatgaattttggaaatgatacggtattttatttccattgaagaatagcagctttggtgctttactgttgatctcatggctaatttatttttcaccaaaatattgttcctttgaagctaaataaacattaaaaaaaaggacg

SEQ ID NO: 49033 - DNA, 212 bp, Glycine max
  unsure (1)..(212): unsure at all n locations
  Clone ID: PAT_MRT3847_15283C.1
gagcccgagccgagaagatagaggtcaagtcaatgaattgaagtttgaagtcattgtgattggtcgttggtgttcgagtttgcttttccaaggccaagcaatggtcaagaccacgctggattcgggatggctgcagctcggtccaccgaggttcatttcccaggcactcaactctccancangcaccctccctctgcctccacacaacatac

SEQ ID NO: 49034 - DNA, 464 bp, Glycine max
  Clone ID: PAT_MRT3847_15284C.1
ggaattcggcagaggctatgatcctaacaagataaatgtgaagattaaaattgtttctggatcaccctgcggagcagtggctgcggaagccaagaaatcccaagccaattgggtcgtattagacaaacagcttaaacatgaggaaaaacaatgcatggaagagctgcagtgcaacatcgtggttatgaagcattcccaacccaaggtactccgcttgaatttggttggaacacaaaagaaggattttgaagaattatgtccattaccttctgaacaaattgagatgcctggaaaacaaactaagaagaagcatgattctttaaattctataaaaggaccagttgtcactccaactagcagccctgagctagggacaccatttactacaattgaagctggtacttcttcggtttcaagctctgatcaaggaacttcaccattcttcatctctgagatgaatggtg

SEQ ID NO: 49035 - DNA, 492 bp, Glycine max
  Clone ID: PAT_MRT3847_15285C.1
gtgagtaaattgatcaatttactcacgtgaaataggctttattacttcatcaaatggtaggttcattggattttctgagatacaaccaataaattcttttttgattaaaaggtaagtaattcaattatatataataattatatataataatgtataacatagtagataaagaggtggtataccatttttttttagaaatttttttttttttttatctgttcatttgtatgttgagaatcaattcgacttcaacattttgagtttttctatttttttgaatgtctgatattttattagacaattcaatcttttcattttattgtttttattgcgattggatatatacacccacgttattttctaaattgtattggggttgctaactcaatggtagagtactcggcttttaagagcgattctattttttacacatttctatgaagcaatcggcccttctgtcgtcttctcgcagccgtacggacgcgtggacga

SEQ ID NO: 49036 - DNA, 265 bp, Glycine max
  Clone ID: PAT_MRT3847_15286C.1
tccgcgcgagcgactttctcagggaattaaactgcttgcgttagtcacacataatgagcggcacgtgtttactgacagctcatgacctctgctaacgctacggggaaagcttcacgggggagaaaaaggatgatatggaatccatggctcttgactacaaactgacttattcgcgtaagaagtctacaattggaggatgtagtgtacacaggaggaaccgtgttgttggtccacacttcgtcagaggcgaagatttctcttatac

SEQ ID NO: 49037 - DNA, 300 bp, Glycine max
  Clone ID: PAT_MRT3847_15287C.1
gatactcaacaatctcaaaaccaaatctcgtcgacaaaatgcttggtattgtaaaggctctaaagtcctcgtgaaagggctgttccaaataccacaagaaggatgcgcgtgtcgacatgataggaatctcacaccattccaaacgcatgtaaaccagaatacaaaccgagaccagtattagtgtcttcatctacgaacacaccaggagacatattacaatattgtagtagaacatgattctcaatactcagacacacactgatcacgctacgatgaataacgttactgttaaggatattg

SEQ ID NO: 49038 - DNA, 400 bp, Glycine max
  unsure (1)..(400): unsure at all n locations
  Clone ID: PAT_MRT3847_15288C.1
gttacatannntattggccacaagctgtgggcagttaaccatacaaagagaccgcgcgccacatattgtaaaacagtacaaaatatacnnntgtgtccatataagaaaattctacaactccattgggagtggatttgccaaatatgggggtaaactcgttgggtattggcactagatataagcagggatgctgnncagacaggcccaagccttaaaatgctcatatatatgctgaaaagnnagggcacaaccttagaaggcgctaatacagtcaactcctagaactctacaattgccttttggaccacaagatcgtctagcatgnnaacccgataaatattttcgtgctttnncccccctagcatcacttgggtttacattcttacgaacacatttcacc

SEQ ID NO: 49039 - DNA, 729 bp, Glycine max
  unsure (1)..(729): unsure at all n locations
  Clone ID: PAT_MRT3847_15289C.1
ttgggaaatgagaaaatattgcaaacagatttgcatcatacattgggttatatatgtatcaaagttatcatatggaaaatttaaagggggcaccaaaagctgtaatccatctctcccctgaaagaaaagccttgacagtaaacatgctagcttgtttccttgtaatgactctcaaacccttccagttcnntctattctttgttgaagcacctggtccaacattctgaaattctgcataaaatatggtatctggggctgagttccctacccatggtaaccatccatttgggtgaatgaaaatccccattggggattacataaacactggggttgagtagttcttccagggtcttccaagatatgtttttacagaactcaagtccccaaagggtgtaatgttgcaattttgaattgaaattcctgtgttcatgttggggtcagtttttccctnnnctgttatggggttctgctggccctgcataggcacccttggcataatgttacagttttggaggactactgctgaattgccaaaaatgaaatcaactgtgccatnnntgttgcattctctgtnanattggcggttggaatgagcataaagagagtcctgaaatgcatcgatttngcacctgtaataaactgcttgatcagnncntgtcatcaggncnactgcctgttgcttctnnngaccanntgtgttnnnnnatcccatatnnctagcaatgantt

SEQ ID NO: 49040 - DNA, 1469 bp, Glycine max
  unsure (1)..(1469): unsure at all n locations
  Clone ID: PAT_MRT3847_1528C.1
cggctcgagagctattgaacttatctctcttctcacttctgttgttataagtaacttccctcatcattacaaaacaatcctccacaggtttcaaaatgctgaaatcgggcatgggaattgaggagagaaagcaagtgaagaagccagcacaagccagctcgagaaaagggtgtatgagagggaaaggaggtcccgagaatgctagttgcacctacaaaggtgtgaggcagagaacatggggaaaatgggttgctgaaatccgtgaacccaatcgaggtgctaggctctggctcgggacttttgagacctctcatgaagctgctttggcttatgatgctgctgcacgtaagctctatggctctgatgccaaactcaacttaccagagctctctatcaaatcacaatctcagtgtccaccaccaccttcttctgtttccaacaacactcagattcctcaaatggagaacctgcagcagcagattcaaaacaattacatggacatggctacatgttctaataatttcaacaacaacaccaataatccttcagaagtttccatggcctctcagcaggttggagttggagtaccaatttacaccagtgactccatcgtgtctcttcccttggacaccaatcccaagcctgtggagaatgatggtgactttcgtccttcgtggggtacaatgaatgagggtttgccagtttttgatgattctatttgggctgaagctgccatgtctctagattttcctcaaattgcagcagagactgcgatttattcatcgggtaacaacttggccgatgtgggtgtgtgggactctctgcaaaccccatggtgcatgtaatttcatcactttcaaaagggcaagggaaagccacaagctatagcttttcttctcatgccagctggactgatatctgcttgttaaaatatatagtgtatatataagaggggtaagtaagtactttgtaaagacatatatgatacccaaattaagactagtttagttaaataggatactatatcatatcatatatatggtgtctaccttggagtgtatggaaaaccatgacgtgcttattttcgcacgacgtcgttttctgccttatagtctatagtaatattatgttatatgtaaatattacttaatacgataagggatggtggtgatgctctatcgccccgatattaataagttgtgttagcttttgtgcagtttattgtgagttttatgtaagcatcttgtgagttatatatgtcaataagaatgtacaactagtagttgtgtagtaataatggtgtacatataaaatgtattattgtagtctatgtttatgtttagaaaatttcgttttaaatttcttatgatttgatccanaacaaaaaacatggagaaggaaatggaggaattaaagatgatgatgttgtgaaaataaggaaagagagttaataaaaaattactaaaggg

SEQ ID NO: 49041 - DNA, 1130 bp, Glycine max
  Clone ID: PAT_MRT3847_15290C.1
aattcggctcgagaataaacagattttaattgatgccgttgtccatgctgtgaatgaggactatgctgagatggctaatgatttcaccagattaggcttcctgaccccagggactgatgtgactcctataattcctgctttggaagcaatttggcagaactctgctggaaaaggactgtcagattttaattttcgtagtgtcacaggaaagtttaaccagttggtttacaattatcccattcgaatcccagaaaggttttcacttgtaattcgttctttattgacccaagaaggcatctgttttaccatgaaacctgacttcaaatttcttgaggttgcctatccttatgtggctaagcgactactgacagacccaaatccagctctacgtgaacgcctcatacaggttctattcaaagatggccttttccagtggaaacggcttgaaaaccttattgttcttgcaaaggaaaatgtggccaagatgagcaacaatcctgcattgcaagtgaaaaacacgcaaagccagagagacttaaaagttgaaagaaaattggacctcacagacacaatcaaagatggagctcgccttttctttgttgatgaaggaatacgcagacagcttcttcttgctttgactgaagattcaaagcttcatattgaagagcttgtcgatgtgtataggttggttgaagatcagatagacataccttctgttgctgtagaagtagctagagactttccaacagttgtcagggatctcctactttcatggagtgaatcagtcttgtctgatggatagctaaatctttggaccacctgcacatagcatatacaatactgtttcagtcagatgagtatactttacacatgttctatattttctctaaattctttttcttttctatagtgccgaaggtttactatatgaaattttgaatgaatgtgtaggaaatgagtaaatattaagttgtaatttcacggggaaaagtccaaaaaattcatgtagtctttgggcctccttcaactttgtttattgaataaatctagcttatgtttaattttcatattctgttagtgtaaaatttttcacatcaactaattaaaaatcactgtatgacttttaaaaa

SEQ ID NO: 49042 - DNA, 302 bp, Glycine max
  unsure (1)..(302): unsure at all n locations
  Clone ID: PAT_MRT3847_15291C.1
gggtngaaatangctacgcnaagngngggncanacnngnctgtncangatggncgngntgaaannngctanacantacagtagncnntngtnnancacgggngnnaatnnggnactgcaagnncntgtncgtgacgnancanattgnacncnnacntgtnntttncatcaggncncncacangtgtgcncngtgatnnnngcnacatanaannatntganannanngagnngnnagnnannggnntcggnggnantcanggtnnccngtnatntgncggcgntacnnnngtgagctnatgtn

SEQ ID NO: 49043 - DNA, 674 bp, Glycine max
  unsure (1)..(674): unsure at all n locations
  Clone ID: PAT_MRT3847_15292C.1
atttttagatcctggggtgaggttgggcaggactgttccggaaatttctggttgagccaggggaaatgtggtggccatctaatctggtccaggtctcattattcagtgctctacatgagaaaagcaaaaggcctaaaggaggcacaacacgtacccaatttttcctcctcgtcttggtctcaggcttggcttactatgtgttccctggctatctgttttcaatgttgacatctttctcttggatgtgttggcttgcccccaagtcagtcctagtccaacaacttggttctggtttgaggggtcttggaattgcagcatttggaattgattggtctaccatttctgcttaccttggaagtccactagctagcccttggtttgctactgctaatattgctgttggtttttttcttgttatgtatgtgatgacaccaattgcttactggtctaatgcctatgaggccaagacttttccaatattttcaagcaagctgttcatgggaaatggctcactgtatgacatttcaactattgtcaactccgaattccatctcgatcggcangcttattcaatcaaacggccagntcatctcagcacgttcttttgcatgacatacngnnnctcgattgcagcactatctgctacagnntgtgcatgtctgctctttcatgga

SEQ ID NO: 49044 - DNA, 721 bp, Glycine max
  unsure (1)..(721): unsure at all n locations
  Clone ID: PAT_MRT3847_15293C.1
tcggcatccgatcgaaaccctctcttcagacatcattaaaacataactcagtgaatcctctcttctcatttcctaggaatcccctaagccaccgcagcatcggttcctccacccaccgcgatggcgcacgtgccggcgagcgaagcgacggcgttctggacggacgagaagcacgtgcacttcctaaactccatggaagcctccttcgtccgcacaatgctccaaaacgaaggcaactcaaactcctccaccacgcgctactctctgcgcctcgaccgttatctccccgacacatccgaatccaccttggatttgaaaccaaactctcgctgccaccgcaccgtaaagcaccatgcaccctcagattcaatgggtccaacaaccagaagaacaaggatcaggacgagatcatctcagccctgcaattcgtcagaggaccaggtggtcccacaagtagaaaaagaaggtgcagcagcagcatgcaatagtgacgatcataaaagagcagaaaattaatgtttagtgtaccttttccaccaacctccctacccctctttcatttttattctggtcgtttgtttaatttttaccatttatttatttcacctctgtattttttttttctttccaatatcctttttccacttttctcgatctttttcctcaaattcgtgtcatgtcaaggtgttttttttttttattgttcgtaaatgtnngcatt

SEQ ID NO: 49045 - DNA, 317 bp, Glycine max
  Clone ID: PAT_MRT3847_15294C.1
tcactaggccgcgcccgccctttttttttgggccaaatttttatttttccttttgaggggtaatcttgttagggggtcgcggaatcccccatacttattttcctctgacattttaagcggacagggacgtctaaccctcaaattatatttactttgacgaggagagacgtgcctgcaacacaaaacccaatcctctattaatatgcgccttggtggcaaaaaaggcccccaaaccctgggacgggataggcgtaagcatggcacaacaaaaatttttcccataaccctgctgggacaatcccctggggggccaagaa

SEQ ID NO: 49046 - DNA, 244 bp, Glycine max
  Clone ID: PAT_MRT3847_15295C.1
gggcaaatggttggggtgaacaaaaaagaaaacgtatggtggagcgtaaattatagagtgtgtttattcccttgctccaaaaagcccataggggattttcctgcttcctctacctgagtaaaggggaagcccacaatataaacaatcggggaggaagggaaacaaaaccatactttttgctgtcatacatcctaaacgacgaattattgggtaatggcaaaaaatatacctaggaataaattgg

SEQ ID NO: 49047 - DNA, 723 bp, Glycine max
  unsure (1)..(723): unsure at all n locations
  Clone ID: PAT_MRT3847_15296C.1
ccacgcgtccgcatgattccgagactatccattgtactatttttatagtgtgtgtggcagaaaagaaaggtatatatttatttatttgtatagaaaattcctgaaatttagtattgccagaataggagaataaggtttgttcttcttgtctttcttagactggaatcaattttatgttgtatatactatgggctaacatttttaatttttcttacaactttttggagtccactccttgtgacctttgttgcctcactgtccagccatatatacatgcatctgacatggagcagtttcttgttgcactctttctttatttttatttttacaaaattataagtgcaattatttgcatacctcttttttctctttataagcattatttgttattttctcatctcttaaaccttgttataccacatggaactatttttatgttctagcaggaaaaaagctatggaaatgtggtatataagtttttgcattttctttttgtttatgggtcatccatgtttcacattattaattaaattgtgatgtaccttttgtcaatggtttgaattttgcctgtgaagggtgtcttatattaatgtaatgttaatatgtttccaacttctaagttgaccggccttatgatcactttagggcanagatagtctgaaatacacgcgaagggcacaatgtaggcatcgctgccttaacaggcagatgtacctttcaaaa

SEQ ID NO: 49048 - DNA, 816 bp, Glycine max
  Clone ID: PAT_MRT3847_15297C.1
ttggctgatttagtgcttgcatggtcgtgacaagatgatagcaccgtactccgccgcataacatacttgagagggactagctacgccgacaccccgcaaatcgccccccccccttcgcccagtatcctctaacctatacgtcccatgtctaccccacattgccgcccacaacttgtccataaaaaaaactcgtgagaagaaattaggggattgcctcagaggactttcgaagatacataacgtcctcctcacagcgctattcacctagttaggcataccattcactgagaactaataagactgacgagtccgagtacgggctaaggccccatactcataaactcgtgagttatgcggggcccaccctcaattatctcgcgagatttaaaaaaatatatgagcttggcctcagaaaatgagtggttgtctcagaggacttaagtccatgcatgtgcgtacgtgatgctacagtctcctcacagcgctattcaaacctaacctatcggttgctgccccataatgctgcgatcgggaaaatttcggtgccatttaatccaactgttccgtagtatactttttccctgttagtcggtgcaacagtgaagaggtttgtattgactgtttcctttaatagccgtgtaattcgaacggtgaacgggatgtgtttcgcagtggtgtaccaagtgtggtgggcgcggcggccatgtgtaatgcgattggcatatccgttagtgtttcaatgtttggcttccctgtccctcctttccttccctctggtatgccttgttgtcccctttgctaagtctcaaactgggg

SEQ ID NO: 49049 - DNA, 1182 bp, Glycine max
  unsure (1)..(1182): unsure at all n locations
  Clone ID: PAT_MRT3847_15298C.1
ggctcgagatttctcagtcatggattctctgtctcttcttctctccccttctccactcctcaccaaaacccacaaattaaccacctagaaacccttctctcatttctcaaaccctaaaacacaacatagtcaaccccattcaccctctctttcagcactccatactccttctctcaactcactctatattccattaataaaaactttcttagcattaaccttcttctcatttaccatgctcaacctcttcactccacttccctgcctcgctgacgtggcctccgaagacgtcggctagatcaaccttgcatcggttatgtttttcatccagaacttcttcaaccgctacccgtttttcgtcgccgggtgcacctttatttggctggtggtgattcctctggcggaagagtatttgaagaagtgcaagtttgtgtcggcgattgacgcgtttaagaagctccgcgatgacctgaacgcgcagctgctggagaacgtgcggtttctgaagtcgccgaatttgaaaatgtttgagaaggaagtggcgcaggtcgagttcgctgaggatcggaatgaggatgagtttgtgaacaaggtgttggggaggttcaaggacgcgccaaacactgttatatgtgttttggacagttttgacagtaattctttgaaagttgctgagttactattcaagaatggtttcaaagaggcctatgcaatcagaggtggagttagaggccagcaaggttggatggctatacaggattcccttttgcccccttctgtgcatataaggaaaagggtaaaagcttcaaagaaacttgacacaaatggaaatggagccatccagcaaaatgatagtaacaataagagttccttatcccaagatatatcttctgttgaaaaccaaacaacagactttggtcatgtgaaaagctctgtagagtccattccagaagtgaaaactggttctgtagcatcctcctctccttatcccaattgagctacttcattgttctatttttggatggacaacgacctggcatcctttcaatgattgaagtaacctggcatcctttcatgattgaagtaatattccaactcccaagccattatgggctagaagacgatagagaaatggtttanatgataggaaatctggnaagaaaaacaggnatgtatttgaat

SEQ ID NO: 49050 - DNA, 770 bp, Glycine max
  Clone ID: PAT_MRT3847_15299C.1
ggcttggaacctttgggctgatttatgggcttgtagggttggggtaaatgattgtcttgcatggtcgtgagaagatgatagaagggcatggtcgtgagaagatgatagaagggcatggtcgtgagaagatgatagaagggcatggtcgtgagaagatgatagaagggcatggtcgtgagaagatgatagaagggcatggtcgtgagaagatgatagaagggcatggtcgtgagaagatgatagaagggcatggtcgtgagaagatgatagaagggcatggtcgtgagaagatgatagaagggcatggtcgtgagaagatgatagaagggacactaaaaaaaaaaaaaaaaaaaaaaaaaaaaaagtggttgtctcagaggacttaagtccatgcatgtgcgtacgtgatgctacagtctcctcacagcgctattcaaacctaacctatcggttgctgccccataatgctgcgatcgggaaaatttcggtgccatttaatccaactgttccgtagtatactttttccctgttagtcggtgcaacagtgaagaggtttgtattgactgtttcctttaatagccgtgtagttcgaacggtgaacgggatgtgtttcgcagtggtgtaccaagtgtggtgggcgcggcggccatgtgtagtgcgattgtcatatccgttagtgtttcagtgtttgtcttccctgtccctcctttccttccctctgttatgcctgttggtcccttttgctaagtctcaaactgggggtctttccc

SEQ ID NO: 49051 - DNA, 509 bp, Glycine max
  unsure (1)..(509): unsure at all n locations
  Clone ID: PAT_MRT3847_1529C.1
gcttaaacatccaaatttacatggtctctgtcttatgaatcctcaacaaggctttagttaaagcttttttttttactatcctaccaggctaccaccctattatccgacctttagaactcctcttggtacccagtagccatgcagtgtccccattagtaaaattatttgatggaattgtcttaatcctttccaccaggaccaaatattgtcagcagatcactctcaaatacttctcatgttgctccatattaaacacaatcctctatggccctttatcagcctccccttccatgtgaaagaaagtggttagaggcacttcttgatctattggtattccatgcattgaaggaattgcttcatgtgtggagccattcagtgggttcaaccctctcttcttgggaaattctttcatgtgtgaacatgaatgccaccaagatgagttcaattctgaagatgcgccatcaacaactaataagaaccttgggagagccacaccacanaagctagct

SEQ ID NO: 49052 - DNA, 1045 bp, Glycine max
  Clone ID: PAT_MRT3847_152C.1
ccacgcgtccgcttcgccgttaatggagtttccaaacaagactggtactccgtcgagcaattggccgaaacatactcttccgtcattccttgcttcggtttgttaaagaacggagtcccaattggtttgaaacgttgagagagtattttgattccacaccctccgctgcggttggagagattggtgtggacaaaggatcacacggaaagaagattgatttttctgagcagaagaaagctacctagattgctgtctgccaatgcattaggacctttgtgcagattgaagtattgaggcagcagcttgaacttgcaaaagagttaaacaaaccagcatctgttcattgtgtttgtgcttttggtgatcttcttgagctaatgaagtaataatattaggtctatggggccttttcctgctggtgtcattcttcattcttacctaggttctgcagagatggttcctgaattttccaagcttggtcccttctgattgttggagatagatgcacctgatgcactaccaatgtcaaacatagattctcttcattttgttgaaggagatacttctctcactgaagagcttcttgcccaaacaacaacttcatcaactttctggttcttccctcggtaatgcatcccatgtcttggcagatgcttcgatgttgccaaaggaaacactcaatcatcccgcaaacattcataatgtgcttgattatgttgcatctgtgctagaaattacgaaagaagaacttgctgacttaagttaccagaatgcagtccggttattatcctataaaggttcgaaagtacttcaaaagtagacaatatcatcataggttcttgtaagatacttttcctggcttggcaaagtttactttgggaagttccaactagaatttcatcaagtacgagcagatagattacaggaacagtttgctaacgtgtatgatatgcatgatagttagatgcctgccaaagtttattacatccaatattaatttctaaaattaaatgtgccaaggtatgtgagtaatttttctatttct

SEQ ID NO: 49053 - DNA, 435 bp, Glycine max
  Clone ID: PAT_MRT3847_15300C.1
ggaaagaaaaatttctcgaattttgcaaatatgacactgaacaatttttttagcaatacatcacagaagctcgaactagaaaaagaagcatataagcttagatccttaatagttaatatatacccaccaaaatactcctattaaaagaaatttgatatcatatccctttctgtatccatgaccataaatgggaatgaaaataaaaagtaaagaaacgctgtaatgtaagtctctgcatgtttttactattcaagtttttacctccttcaagtaaccttgcctcgaaaaaaaaggtagaatcaccttctccactgaggttggatcaacttctcagtcccatcccttgaagatgacagagatctatcagactttatccctcctctgccgctgacgcctatcagcttttcagctcttggggaaaatgaacctgacctg

SEQ ID NO: 49054 - DNA, 757 bp, Glycine max
  unsure (1)..(757): unsure at all n locations
  Clone ID: PAT_MRT3847_15301C.1
ctcatattcattgcatttttggatggactattgcttgagagagctagaaggaaagcaagcacatgactctctattcctagagaaaatgaagaattcattatcacaacgtactactactagtgagagatgtgtgtgggtgccagggccagtgattgtgggagcagggccttcagggcttgcaacagcagcatatctcaaagagaaaggagtgccaagcctaatcttagaaagatccaactgcatagcatccttgtggcaactcaagacctatgataggctccaccttcacttgccaaagaatttttgcgaacttcccttgatggggtttccttgtgacttccccacataccctacaaagcagcagttcatagagtacttggagagctatgctgagaggtttcacattaggccaaggtttaatgagacggtccagcacgcggagtttgacgccacgctcgggttttggagggtgaagagcttgaacaagagggaggtggcaacagagtttgtgtgcaggtggctgattgtggccactggggagaatgcagaggctgtggtgcctggtattgaaggaatggggggagtttggtgggaccataaagcacacaagtttgtataagagtggggaagagtttagagggaagagggtgttggttgttgggtgtggggaatcangatgggaagtctgtttggatctttgcaccatatgctacncttctcttgggtcagagatactgtaagacactaaccctttctt

SEQ ID NO: 49055 - DNA, 2192 bp, Glycine max
  Clone ID: PAT_MRT3847_15302C.1
acggctgcgagaagacgacagaaggggattgaagaacctttcaaatcccttcttctttctctcccaaatctcaatcttcataacattcacccatttcttcacattgggggcttagggttctatttgttgattttgatgctcgagttctgtggtttctaaagcattgaaatggggaaaggaagaagtcctgggaaatggttcaagaatttactcttggggaagaaatcgtcttcaaagtctacttcatcaaagaagaatgacatttttaaaccttcaattgacaaggatttgctggtgtcgtctgaggtacccgtgcctgatccaaccatggattcgttgcagatatccacaccaatatctggagctaatgattataaaggagtgttttccgaaaaggaggtagttagtaggtcatcacatgatagggatgttctttcaactagagtcaaagaagctaaggtgcaagatgttgctaattttggatctcaagagaatcttgagaaactccagcttacggaagcaactataaaagttcaggctgcttgtagaagttatctggctcgtcgaacattgcaaaaactcaaaggtgtcatacaactgcaagcttttattcgtggccccttggcgtccggacaccctgtttctgcattatattgtgtgaagggaatagttaaatttcaagcattggctcgtggttacaatgttagatgctctgatattgggcttgcagtccagaaaattcgtaaggatactcattgctcaaattctgttcgggtagtttcgtccacacaggcagagaagttgtctgaaaatgtctttgtttgcaagcttctggcttcatccccatatgcagttcctctatcactcaacagtgatcctggagaacctaacatgggtcagaagtggcttgactattggacaaggtcccacttttgggcatctcttcctgaatttaaaaagaaacttgagtcagtgtctgatgagaaaaatggcacttctcagacagttcaaaaggggcaagttaaaaaaattactcggaaatctcctactgtgaaagctgacaatgtctcaaatttaggttctaacaaatctaaacagcatctgaaaaaggattcaagccacccattgccttcagctcaggaaaacccaccaaaagaaactgagaaaagtagttttggaaagactcatgcgcataatgcttcaaatggatctgaggttgttaatgaaaaaagaaaatccggcaataaaaagattttggatcatgctgtcattgatgtttcagagcagggcccaaatgcctcttcagcgaaagagaaagattcgactgtgccaaagtcaaaagagtctgatcctgagaaaggtgatggacaggaagcaaaagacaagaatgataatgagctacatcgttaccctgttgccgtcttaaagaccaactgtgatgaagggtgaaaacgaaggatatcaaggagtcagtgagaatttgaatggtggtgacaattgcatgagtaacaatagccaaagaagaagcttcattacctgctaactttaatgatcaagagaatgagttatataacactcctgttactccaagactgccaagttatatggctcctactgaatcagcaaaagctaggctaagaggacaaggctctccaagatttgctaatgatttggtagacaaaaacagtacaaccaggcggcattcactttcatcttcacttaatggcaagtcaggttcattttccccgagagctgaaaagctgataggcgtaagcggcagaggagggataaggtctgatagatctctgtcatcttcaagggatgggactgagaagttgatccaacctcagtggagaaggtgattctaccttatttttcgaggcaaggatacttgaagaaggtaaaaacttgaatagtaaaaaacatgcagagactatttatggtcatggatacagaaagggatatgatatcaaatttctttaattttcattttcattactactatttatggtcatggatacagaaagggatatgatatcaaatttcttctaataggagtactttggtgggtatatattaaggatctaagcttatgtgcttctttttctaagctcatgtgatgtattgctaaagaaattgttcaaacagtgtcattttcaaaagttgagaaatttcttcatttcgaatttccg

SEQ ID NO: 49056 - DNA, 1194 bp, Glycine max
  Clone ID: PAT_MRT3847_15303C.1
actgatcctaggcactaaattataaatatttgagatctctaattattgaaataattaaaaaatataaaataggccgcttgttattgagggaaatcttttgttactaaacaactcgatctgttgtaatttatttagtacgtattgaaaaatgggttcaaagatggctatactgatcctaggcctgttggccatgctccttttgatctcctcagaagtggcagccaggaatttaaaagagggtgaggctgttcaagagacaaatgaagtggctgatgccaaattagttgctgcaggtgaggctgttcaagagacaaatgaagtggctgataccaaattagttggtgcaggtgaggctgttcaagagacaaatgaagtggctgataccaaattagttgctgcaggtgaggctgttcaagagacaaatgaagtggctgataccaaattagttggtgcaggtggggttgttaaacagagaaataaagtgggttatggcaaattagttggtgttggtgattatgattatgggaattggaatggtggccaacgctctccatatggaacgggagctatttgcatgagaggctgttgttttccatcctcgttgggaggttgcctaagttgctgcccgcatgaatggcagtaaccgccctacatggcatggctgctgcttatttcatgaataaaatctcttgttgtgagaggcttgtcttttctcaagtataaataatgtagaataatacgtacgtcactgtgcctgtgtgacaagtttaagagcaaattgaaataatcttcagtgcaaatattttgttttaaaaaaaaaaaaaaaaaaaaaaaaaaaaaaaaaaaaaaaaaaaaaaaaaaaaaaaaaaaaaaaaaaaaaaaaaaaaaaaaatcccaggcccaaaaattttgtttgacaaaaaggggccaaacccaaaaaacccagaagggggggaaaccgtttttccgggaacccccaaggttttttccaaccccccagaaacccccccccagccaaaacctaaagtaaattggccccccgcccttgggaatggtttccccaatggggaaaattgtggataaacgggggggggcccatgggtaccttttgcccaatttgcaaaatttgttaaaggggaaccccctccagggggggtaagggggcctccgttaaccctggttttgttggggggg

SEQ ID NO: 49057 - DNA, 233 bp, Glycine max
  Clone ID: PAT_MRT3847_15304C.1
aaaaatacacagtgagctctagcttctagccctatggcgctgctaccgattttatctatgcggattgagtgaattgcgaaatgcactggaaagcttctgagaaactcattaggcactgaaaagtcgtcagaactgatcatgttatgactaataggatcaaagataaaggctagactggcactattaagcgagtcatatgctctcataatcgtgtcattggcgtaggtaaaaat

SEQ ID NO: 49058 - DNA, 473 bp, Glycine max
  Clone ID: PAT_MRT3847_15305C.1
ctcggaattcggcttgtgagttttttatcttttgtttgcagattataagccccctcatagaaaacaagagaataggtgacaaacaacacgcagaaccaagaaccggcatgaagaacgagcgcacaggactggatgccatgagcaacaaacaggcctgctatcgtgaccaagtctgcactaaaactcaatgcagaaaatggcatgcggacatcataaaacgaacgaaaggtagagactctcggtcatggtaacatgaacatcgcccaatcaccacttgagaggccgaacattatcaacggccgcacacagaaggaacgccaccaaaagctggccatatacatgaataagaggaaccacaggaatttcgggaggaaaatcaagaatgactgcacgaaggcacttgctgacagtcactcaggaatccggggaaaatacgcgaggactgaagaatcagcatgtcacacacggaatga

SEQ ID NO: 49059 - DNA, 507 bp, Glycine max
  Clone ID: PAT_MRT3847_15306C.1
ttgcaagaaactctatcaggccaggtattccagatagagccatcgcggaagaaagaattgcattacttttggggtctgcgatactataagcaccagagtttctgcccagtctaaaagcagcctttttttactcttgccacatgacatattcagtttaactacacttttagcaccctgtgtggatgtcatgtgatgagaggcaggaccgactgacttgttcactcacgggattattcaagctgccaggctctttgaagctatctcgtacacattctctgatagcccattggctgacacgatcatctccagctgagccttagcaagagcttgtctgctctcatcatatcgcctccaccgagagaaagctgacaccatgcgggaggccacctgaggatttatcttgtctagctgtaaaacaacttcacccaagaacttgtaaccagagccatcttttgcatggaaattcacaggggacccacaaaatcctccaattagcgaatacacctt

SEQ ID NO: 49060 - DNA, 380 bp, Glycine max
  Clone ID: PAT_MRT3847_15307C.1
gttgaacaatatgactgaattcatcaataaaggttacaaaatatcaaaaaccaaaagatgtaacacgacttggcccccaaatatcagaatgaatggtagaaaaagccgagttacatctttgtacaatttgagaaaatgatgacctaacatgttttcctagttgacaagactcacattctaagagtcgaagattcttaagactagaaaccatcattttcagttttggtagacttgggagacctacacgatcatgcaaaagtttgggttttgaggttgcaaaataggacataggaaagttggattctaagtagtaaagtcctcgtgattcacgtccttctccaatcagttgacccgtgccatgttcttgaatcacacaccaa

SEQ ID NO: 49061 - DNA, 149 bp, Glycine max
  unsure (1)..(149): unsure at all n locations
  Clone ID: PAT_MRT3847_15308C.1
aaaactacaaactgtgcatantgataatataggcaaatatctttgtcataaatacataacagattaatagaaaccctgtgttgctggggttcgctatttacttctctgctgcaaatacacgagtgttactttgaggatgccagcgaata

SEQ ID NO: 49062 - DNA, 1377 bp, Glycine max
  Clone ID: PAT_MRT3847_15309C.1
gaactttgaagctgaccagatgagaaggtgtttggatggaagctctggaagcacatattctgccatggattcctccacgactcaagttaggcattcccaattcaaggatgttgcgaatggtcaaaagtcatctgttgctacactctttgagcaagttggattgcaaaagattttgtcattgctggagtcagatgatgccaatgtacgaattcatgccgtgaaagtggtggccaacttagcggctgaagaggctaatcaaaagagaattgttgaagctggtggtcttacttccttgttgatgcttcttcgaagatatgaggatgaaactgttcgcagagtagctgctggggcaattgccaatcttgctatgaatgaagcaaatcaagaacttattatggctgaaggaggaattacactgttatcaatgactgcatctgatgctgaagatccacaaactcttcgaatggttgctggcgagaagacgacagaagggggaaatgatagaatattgatgaccctgagatctcagggaggtattaaggctttactgggaattgtaagatgcggacatcctgatgttctttcccaagttgcacgaggaattgctaactttgcaaaatgcgagtctcgtgcatctaatcaagggataaaaagtggcagatcctttttgatagaagatggtgcccttccgtggatagtacaaaatgctaataatgaagctgcaccaatccggcgtcacattgagcttgcactctgccacttggcacaacatgaagtgaatgcaaaggacttgattagtggaggtgctctttgggagcttgtccggatttctcgagattgttcacgggaggacatacgaaaccttgctcgtcgaactctcagttctgtctcaacatttaaattggaattgcggcgattgcgtatagatttttaattataaatgtacctgggactacgcaattatttttgttccccagcacgtgaggctcgttcttgagaattatttctagtagcatgtggggggcagttgtttaatgcttgcttaccttgctatttttgtgttacgagaagcatgggtttaggatggtacttgttatatctagccatcactgacaagaatgaatgtatgtataattgatagagggggaaaattgatggagagaaaaatgaggtttttgggcaggggagaggtgagaatatgttgttaaatattggttggtcaaattttgactaccacaattttacgtagagctgcccaatattgtatttataattgattattgatttgtgtaagtaatgaaaatcaaacagatatgcctcattttaaaaaaaaaaaaaaagggcgcccccccacccctaggggtcccccccaatttt

SEQ ID NO: 49063 - DNA, 295 bp, Glycine max
  Clone ID: PAT_MRT3847_1530C.1
tcggctcgatctttcctaaagaaaattggaacctggctctgttgttaaagttacgtaatattgcttgagtagaggggcttgagaaaactgtgcaagctttggaacttcttcaaagtctggtacttcaatggctaccgaagaggctcataaacttcaatcacttcctccttaccctcaggtaattcacatcaatagtcagaatcccttttttattgtaagaggtctctccaaaattattaaaccttggagaaattttcctagtaaagttggcagatttcacactggtgtaattgat

SEQ ID NO: 49064 - DNA, 240 bp, Glycine max
  unsure (1)..(240): unsure at all n locations
  Clone ID: PAT_MRT3847_15310C.1
tcgcatcttgtnncctccgctnannaantataatagcatctttctctntcngaanagatccacactatggcnacgctcaagcgccanatcggtgcatgatttnaacgttanngatgncaagggnnatgnnatnaatcttggtgnctacnaaggaaaggtccttatcantgtcaatgtngcctcacnatgtggcttgactaattcaaattacactgngntcagtcagttgtatgagtaata

SEQ ID NO: 49065 - DNA, 425 bp, Glycine max
  Clone ID: PAT_MRT3847_15311C.1
gaatatcacgcacgttttattttcctctcaaaaaaagagagcacccgttgccgatccaaaagcaaaccccccctaatttaacatgagtggcgacaccaaaaccaggaccccccccctttccaaagacaccaaaaaaaaaaaaacccacacaaacacccgggggggggctcccttaaaaaaaaaaaaagattcccaaactcaccctggggctcaaccttaaaaagaaaaaaacccttaatacccttggggggggggggaaaattttccccccccccccccctctggggaaaaaccaacccaggggggaataacaccccctggggaaaaaaaagaccccaatccctatttaaattttaaaccaggggctgtttggcccccaacaccacataaaaaattcgggggggacgaaaaaaaaaaatggggga

SEQ ID NO: 49066 - DNA, 282 bp, Glycine max
  Clone ID: PAT_MRT3847_15312C.1
ggctcggttcctttcaaccgcctcctccgattcccaaatccattccctcctcctgtcttcgttcgaaatccaacctaggcacggaattcggttttccggtgcattcgtttttttttaaccagttttgcccttaatgggcttcaaccaaggggttcttgaccgatggccaaaaaaaaatcttgaaattaccaagccaaatgggggaaaattggccttcctggccgaaatctcattcctcctggctggctgaccataataataacgggagggctccttcagggg

SEQ ID NO: 49067 - DNA, 1003 bp, Glycine max
  Clone ID: PAT_MRT3847_15313C.1
aattcggctcgagctttggtcccgattctggcatctttcttagagatccctaactcacttgtctcttctcccacccttaaatccttccctctcctctcccgcaatcaattcatctctcacaacacaaaaattgttaaattcccaatccaatagtgttattagtccataaaaggaaaaaataaattaaaaatgaatgtgttggattctaatgtggaggctctagccttcaactacttgagcttcggcttgctcacagccctcaacaacttgtggacctggctcgctctcttaaccgccgccttcagcttctggaagattcgctccacgggctgtctcaagcccgagcccaagcccgaggcccaagtccaggcccaaccttacatcaggcccgaccgggttgcggatttgttaacggtggagaaaacggagccgacgcaacaagatgcagtgttggttcctttttctccatcgttattgcaaggagaaaacggcgcgaggaaggggaagcttaccgtttattacgagaaggacatggacatgcaatgcacgtgcggcgagcgtgaggggttgttaacggcgtgggaagagaaagaggggaccgaaacggagtggtggaagaggtgggagaggttgttgcggttgagaaacggggagaacgagaacgggtggtacacgtggcaggacttgacagagcttaacggcaacgtcgttaggttttgggactgtgggttaagtggttctttcgtcagggaatcgtggtacaactccaattccaactccagctgtatccatgtctggtaaaaaataatcatgatagcttgttggattttaactattaagctctctccttcaagactttggagagattgttgagatttgagaatttgtatatatggtattttggtagtggatttgcaatttttgatgatattataaattagagcaataaagatcatcattgttatcgtttacgcatttgggtttaatatttgacacgcagatt

SEQ ID NO: 49068 - DNA, 935 bp, Glycine max
  Clone ID: PAT_MRT3847_15314C.1
ccacaatgtattttattttatttattcttatcaggcacgaaaagcaatagcaatagaattaagcaaccattttttttaattctgttttatcaagcctaatttttaattatttttgcatttccattcaaagactcctttcctttccctctttgaaattcaggtgtttttaagaacagcccaattcagttgatttgcgtttcatattattcggctcggtatcaatcgagaagaaaaaaagctttttttttttttctcgttttaatcggctggcctatagtaaaaactcatatcaatgtcctcaagaacgttgaggagaagactccatcatggggatgttgatggcaaaaggcaggagcatttggagacttcgggattagattcgttgagtgagcccttgctggcagatgatgattatattgagaataagaagatatgtactcttgaagatctatctgggcatgtgaatttatatgttatgttttacttgtacacttctctagtgcctaacctctacaacagtggaccttccgccaatttcaatttctggagtgtcgatgttcttcgcaataccaatcacttctgaatcatcatccggcagtgtttgctgctgtggtatttgatcagtatcgccttggacaaaggcagcagtgggcaatgctgtcttgacttcttcctctggtaactgttcttttgttgcttcttcaatccctttcgctttttcttgatcgaattttccatcatcctcaatcccttgtttctcagtatcattggtgtttgtttctgcagtctcctcggtatcattttgtggagtcttcaacttttcattaaacttttctgtaaattcctcttcttgctgtctctcatcttgactactctcaacaactatttcgtttccgatggatgcttcgtcaagtgttggttgcagggattcatct

SEQ ID NO: 49069 - DNA, 351 bp, Glycine max
  Clone ID: PAT_MRT3847_15315C.1
gggaaaagggtggactcatccggttttggccccttgtttaaataaacaaataaataatctttgtaatcatccccctgatagcggaaaaaaagcattggtttaaaataggatttttacaaattggggtaagccatgtaatgttatttgtcacaattttgtaacaaatggatttagacccgaagggggggaactttggtagctgccgggcaaatactaagcaaaatgacttgcttgaaatcgatggatttcatcagcatatgctgggggaacataaattgcgtgccacagtgagctgtgagtgcggccattgaacaagtttacaagttctcctattaacatccataccgaaac

SEQ ID NO: 49070 - DNA, 1173 bp, Glycine max
  Clone ID: PAT_MRT3847_15316C.1
attcggctcgaggtctgaatttcatgttaaacaggatttcgtgactagtaaagatggtaccaagatcccaatgttcattgttgccaaaaaggatattactttggatggttcacacccatgtttgttatatggatatggtggttttaacatcaatattacgccatatttcagtgtcagtcgcattgtactcacaagacatttaggtgttgttttcagcatagcaaatattcgtggtggtggagaatatggggaggaatggcataaagcaggctcccttgcaagaaagcagaattgctttgatgacttcatttctgctgctgaataccttgtatctactggttacactcaacccaaaaagttatgcatcgaaggtggaagcaatggtggacttcttgttggtgcttgtataaatcagagacctgatttatttggctgtgctctggctcatgttggtgttatggacatgctacggttccacaaatttaccataggtcatgcttggacctctgattatggttgttcaaacaaggaggaagagtttcattggctaatcaaatactcaccattacataatgtccggagaccgtgggaacagcatcatgatcagtcatttcagtatccatcaaccatgcagttgaacgctgatcatgatgatcgtgttgtgccactgcacacattgaagctattagcgaccatgcaatatgtcctctgtacgagcttggaaaaaagtccccagacaaacgctataattggtcgcattgactgcaagtctggtcatggagctggtcgtccaacacagaaaatgatcgatgaagctgctgaccggtacggttttatggctaaagtgttggaagtgcattggattgaatagaatccacttagtcacaggttagagagaacaatggattatttctttaagacgatacccttgaaccattttatttctctgtttttcacttctaccaagaaaatacattgaacatgagattgtcagaaaagtggccagtgggggttagatttgaagttactaatgctaacgccccgatggatttgtcaatcatttaattggcattaggttcactaaagtctgttaaaatatgttgcctaaatattgattcttaaggaattgttatggtatataaggatattataggagtgcggttactcattaga

SEQ ID NO: 49071 - DNA, 295 bp, Glycine max
  Clone ID: PAT_MRT3847_15317C.1
cgccccgccggattccccgggtcgttccacgccgttggtagcctacccggcatccaacagctcctgggggggattatataggcaccaggcgcgtccagagcatggcttcacgcgttgtagtagtctgcatccgacacgcaaatcttgtgagaccactttcagaatcaggcaagccgaggatggctcgggatgcggatgacactgggctagctgcgggtcaaaatttgttccctgtcgagccacttggcgcaccatatcgcgcacttagagccagtgatgctatgatgcccttgga

SEQ ID NO: 49072 - DNA, 416 bp, Glycine max
  Clone ID: PAT_MRT3847_15318C.1
ataaagtaactttttatttttggtcccctaattttttttaaaaaccttccataacaccgtttatgggaataaaaacccccccataagttaatttttgtttgggaattagggcggattttcctcgctggggcaagggacttggggaaaaatctatgggtccttctttttttcggctttttggcccatgggaatggcggcctttatctttgaggaatttccacccaattttgtccgcccatttcccaaattaacatcaatttgggtcttgtttacttcataaacctttgaaagagggaaaggggccccccccgccgggataaaaaaattccttccgtgaacccccccccccacataagggagggtccataacaaaaccgcgaatttgtgggaatctactaaatcttcccccaaaaata

SEQ ID NO: 49073 - DNA, 1399 bp, Glycine max
  Clone ID: PAT_MRT3847_15319C.1
tgctgtttcagtgtttatcttctcctcttaaatctgttccaaagcgtgatttccgctactacctacctacccttttgcagcccttaaacaaagtcattgacaaaagcacacaaagtctcttcccctcataaagcactgattttcacgcagaactcagctttagttcgtgcttcattaacatgggtgctggtgactactacaaaatactgaaggtgaagcatgatgccactgatgaagaagtgaagaaggcttataagaaattggcaatgaaatggcacccagataagaaccttgaagaccctcttaggaaagaagagtttgaggccaagtttaaacaagtttctgaggcctatgatgtgcttagtgacccaaagaagcgccagatctatgacttgtacggtcactatccccttaactctcaacgcttcaccaaggaatatggctatgggaacatgaaggatgcaggggtggttgaaagcagcttgctttgtacccttgaagagctttacaacggttgcaaaaagaagttgaaggtctcaaggattgttcctgatgaattcggagagttaaggtctgtagaagaaatcttgaagatagacataaagcctggttggaagaagggcacaaaaataacttttcctgggaaaggcaaccaagaaccaggatttgctccatctgatctaatttttgagttggatgagaagcctcatgctattttcaagagggatggaaatgatcttgtagtgatgcataagatattacttgtggatgctctcacaggaaagactctcaacttgactactttggatggaagagatctcacaatcaaagtggctgatattgtgaaacctggctatgagctggtggtcccaaatgaaggcatgcccatctcaaaggaacctggcaagaaaggaaacctcagaatcatgtttgatgttatgtttccatcaaggctgaccacacaacagaagtatgatctgaaaaggattctcagtgatgttgattactaagccaattaatggctgtaactatccattaacatcctctttcacatgaagatcagtttacactgtaaataacttaaaagtaattccacttatctataagaagtttgtgcatattacaaattatacctagcatagttgctactgctaccatatatgaagcatgatgtagctttgtaaacaagtctatatcaatatttttacagtttagtaattttactctgctgttttagattaaaggaaaaagaaatagaactatggttatctgtgcattgactggtttcatttaaaaaaagttgtcttgtttgttatgatgtgattagcttgaaattgacttatctgaagatatttcattattaagtgagaatctttcatgtatccctgtccattcgttt

SEQ ID NO: 49074 - DNA, 744 bp, Glycine max
  unsure (1)..(744): unsure at all n locations
  Clone ID: PAT_MRT3847_1531C.1
ggctcgaggaagaaatagaaaaccatcaaccgcaaccgtgtaaatttctggaactttccaccatgatcgagatcctacacctgtagaacactaacttcaatacccgaatgatttaaacaccgtattccttcgacaccattatcatcaactacctcaaattccaagcacaagttctctgagttgttttgtgagatagcacatagcatagcaaggaaggagtattacaaccgaaaccctgaagaaaaaaagagtagaggaagaaaaaacacctgcaccaccaacgatgggtgtggattactacaagatcttgcaggttgataggagcgccaaagacgacgacttgaagaaggcttataggaaacttgctatgaaatggcaccctgataagaaccccaacaacaagaaagaagctgaagctaagtttaagcagatttccgaagcatacgaggtacttagtgatccccaaaagagagcaatctatgatcaatatggagaagagggtctgaagggtcaggttcctcctcctgatgctggtggtgctggaactggaactactttcttctccacaggagatatcccgggttcgtttcggttcaatccgaggaatgccgatgacatttttgcagagttctttggtttctcaagcccatttggtggaatgggtgggagaggtggtggcngcagtggtggtggcatgagatcaagttccctgtgggatgtttggtgatgatatgtttgcatctt

SEQ ID NO: 49075 - DNA, 846 bp, Glycine max
  unsure (1)..(846): unsure at all n locations
  Clone ID: PAT_MRT3847_15320C.1
gaaatgacttcctctcccacctccatctttggtttcttgccttttgtttgatctcttctttggctaggggagctactctgccagaagatgaagtgcaagttatgaaagatataggtaggacacttgggaagaagaattgggatttcagtgtggatccatgcagtgggcaaagtaattggacttcatttgttcaagtgaagggatttgaaaatgctgtcacctgcatttgccttgcaaatgccagtatctgccatgttgttagcatgatactgaaggtgaagcatgatgccacggatgaagagttgaagaaggcttataaaaagttggccatgaaatggcacccagataagaaccttgaagaccctcttaggaaagaagagtttgaggccaagtttaaacaagtttctgaggtctatgatgtgctaagtgaccccaagaagcgccagatctatgacttgtacggtcactatccccttaactctcaacgcttcaccaaggaatatggtggtgggaacatgaaggatgcaggggtggttgaaagcagcttgctttgtacccttgaagaactttacaacggttgcaaaaagaagttgaaggtctcaaggattgttgctcctgatgaattcggagagttgaagtctgtagaagaaattttgaagatagacataaaacctggttggaagaagggcacaaaaatcacttttcctgngaaaggcaaccaagaaccaggatttgctccagctgatctaatatttgtgttggatgagagtcctcatgctattttncagaggnatggaaatgatctttgtggcgatccagaagatattacttgtagatgctctcata

SEQ ID NO: 49076 - DNA, 338 bp, Glycine max
  Clone ID: PAT_MRT3847_15321C.1
gaacgcatgaatatggtaaggttgacgtcttcatcgactatcgcgcagatgaaagtcgatgtctacatcaatagcatccctatggacacactgggactgcccgctatactcatcgattgcctctacgactaccaactgggaatagtcgatgttctacgacggtgaagtggggcagttcgaggtctaccgtgacaagccctgggatcattaggctagtaactaatcctgatgaatgattccgcactcgcgctgctcacaatggtcgtcaacactcgctctggcagtcccatccaggtcatcggcctcattcattgtatgaccgacacctacaccttcat

SEQ ID NO: 49077 - DNA, 269 bp, Glycine max
  Clone ID: PAT_MRT3847_15322C.1
cacgcgtccggtttggagggtgaattaatttacttttttattttgactttccccaccagacaaaaggttcaaattgttgatcccgtagaggttgcaagggcaaagtcaaataaagaagtaaagaaatttcaacttaagtcaattaaggaacaattgtatagagggttctcttgcagtatatgcaaggagggtatggttttaccagtgacaacaccgttgtgcccataactttttgtaagttcttgtttggaaggggaatttgcttggtc

SEQ ID NO: 49078 - DNA, 347 bp, Glycine max
  Clone ID: PAT_MRT3847_15323C.1
ttcatgtcgatgttgacgtttggatggtgttggtgttgggggttgaagcctgggctggaatgtgaaggactggaggtctaggtggtggaataggtggaggcatttacaaaggaataggaattggaggaggcatttacaaaggaattggaattggatgaggcattgacaaaggcattggtagtggtgtaagtgctataggtggtgtaggcggtgtcattggtggtttcaagcatgttgaagctcaaaagccttgatcaatcaatcaactaatgaggtaattacgtacgtacaataattccagatttgtgatgatcatagtgatcattagtgtgacattttacagttat

SEQ ID NO: 49079 - DNA, 654 bp, Glycine max
  Clone ID: PAT_MRT3847_15324C.1
caaaatccaaatcatgatgatatttgataaccacagattgtaatctccatcaatgagtgtatgggtgaggcaaacaaacgttagagtgagcattgatgatagtgctaccctatgattgattctatttctattcaattatcgacaagagcacaaatctagctaaggtctcaatttccaccaacaatctcatccttcttaacccaaaccatcttcttctctgttgttttctgcaccccaaccttagagtagtgaccgttaccacgattaccatagccatagccataacttgcttcaccaccgtaatacttcctctgagattcagagtgacgaaaactgttgctcattttccccaatcttccgttctgtttaccattccctgagttattcgatgaagaaaccccaactctcttttccatttcctccaccgttacggaaccaccgttcttcttctcctcctcctcgttcttcgatgaaaccctaactctctgttccacttcctccaccgttacggaaccaccgttcttcttctccttcaactcgttttcgattgtggttttctcagcctcttttttcccatgtgccgctgttccaaaaccgttgttcattttccctaatctcccgttgttctgtttaccgttctccgagttaatcgat

SEQ ID NO: 49080 - DNA, 383 bp, Glycine max
  Clone ID: PAT_MRT3847_15325C.1
caaaatgcccaaagatgcataatgtacccaccaaagatcaaatcctcatatgccccatgtgtccctatgcccaaccatgtgttttcgctactccaatgcgccagccgatgtaatgtctctaccgttgtcgaaatgaatgtaatgttgggtatcgtaaggaacgtatgcatgactccatgtccatgccgtgtaatgctgtgatgctgaaaggagagtcgttatcattacgcttttcacctcttccttttcctcctcctcctcctcctaattcccacctcatccttagaccatcatagcaagcacacctcccatcgcagcgtatccctagcaaattggtttgcagcagccgcccatctgcaaccccggctccccgtcttcgtcgc

SEQ ID NO: 49081 - DNA, 568 bp, Glycine max
  Clone ID: PAT_MRT3847_15326C.1
attcggctcgagctctagccgaatcatattgttcaaatcatggatcttgatcatttgaaaggtcctttcgacgatgatccaagctggaaagagagatgcaacaagaggatggaggaactgaagaacacacaattctcaagtcaagatgcagcttcacaacaggaactgctgcataaggaacttgtgggagagaaaattgttctaattcctgagttgtataaagctgttgaggaaggaaatgtgaacaagtttcttgatgtgttggagcaagaatgtaaacaaaggaaattgaatttgtctgttatctttgaacaagtcactgagacaggagattcattgcttcatgtggcagcagataaggggaaagaaaagattgtagagctgatttgttgtcactttcctgagcttcttattaggagaaatgtaagaggtggcactccacttcatgttgctgtgaggtccaagaactctactatggtcaacctcattctctcccaatatgcatcaatgaagtcaacacatgatgtgatgaatgacacagagatatcatgagagatagatgaccttg

SEQ ID NO: 49082 - DNA, 390 bp, Glycine max
  Clone ID: PAT_MRT3847_15327C.1
ccaaaagtccccattattcgggggcacttacgcaactgtgaaacaaaccaacacaaactgaaaaatttaaatcttttaattttacaattacacacgggcccaaccggcaatccgggaactgtccccggaggcctaccagctttccatatttccatatatattagagcttgacagcttgatggaaatagcggtttcctgggtgaatgtgttaaacggttacacgttcacacttcctaacaacctaaaacctaaaaggttaaacctgaaagccctaatgacttaactaactaacattctttgatttgttgtcactggcccattgccagtttgtaaacctgtaaacccagctgccttaatgaattaatcaaccccccaacacacggggatagg

SEQ ID NO: 49083 - DNA, 180 bp, Glycine max
  Clone ID: PAT_MRT3847_15328C.1
tgtcttgcaaatcgttcgtctgactcgggtgtgggggctgaaagactaatctaacgcgtctagtatctggttacctccgaagcttccctcaagatatctggagcccgtgggcgaattgtatagcatactgcctatgatcactaggcatatacggcccctcgacatggacctattatgaaa

SEQ ID NO: 49084 - DNA, 670 bp, Glycine max
  unsure (1)..(670): unsure at all n locations
  Clone ID: PAT_MRT3847_15329C.1
ggctcgagtgctctttcgtccgctaaaatctcaggactctcagattgtgccttttttttttcttttctcaaacctttggtctttgattccaattccagttggcttctaagaagagtgttagtgaagtatttattgatcagggaatggctgggactgtgagtgaggaatctggggtgggaaagtctgtggagagtatttcaactgggcagcgttgtcaatccggggaagcattggcagagtggcggtcttctgagcaggtggagaatggaatcgcgtccacttctcccccttactgggacactgatgacgaagatgatggaccaaaaccgtcggcgttatatggaagatatacatggaagatagaaaagttttctcaaattaccaaaagggaacttcgcagtagtgcatttgaggttggcggttacaaatggtatattttaatctatcctcaaggctgtgatgtttgcaatcatctctcactgtttctgtgtgtagctaatcatgacaaacttcttccaggatggagtcattttgcacaatttacaatagctgtggtcaataaagatcccaagaaatcaaaatattctgatacattgcatcgattttggaagaaggagcatgactggngatggaaaaagttatggaactgtctaggtgtatgatggatttg

SEQ ID NO: 49085 - DNA, 236 bp, Glycine max
  Clone ID: PAT_MRT3847_1532C.1
actagtagtatttaagatctaccttgtttaaataatattataaattaaaaaactaaacacggaactagattagaacataagatctattgacattataccatttgataacatatcattataagttttttttaatataaaatatagaaaataaaccctctcccctttccgcctattttttacctcttcctccttaattaattcatgtttctatctaagtctcttatctttcataaaaa

SEQ ID NO: 49086 - DNA, 136 bp, Glycine max
  Clone ID: PAT_MRT3847_15330C.1
tcccctttccccccctaatctattctctaccgaaaacctacacattcccaattgcatacagcgagcttatctttatccttagggaatctttacatcaattcccctaaaattaacactccatctactttcaacacac

SEQ ID NO: 49087 - DNA, 1287 bp, Glycine max
  Clone ID: PAT_MRT3847_15331C.1
ccggaggggttacagaagtgtggaacaccatttatctcacggatgagagactcctctcccatggagtacgagattaaaaatagctcgcgatgcacctagtggcttaacatacctgcactaggaaatggatttccagataattttcagagatttcaaatcttcaaatatcctattgcatgaacagtggaatgctaaactatcagactttgggttagcaaggttgggaccatcatattgactgactcatgtcttaacagcggttgtaggaacaatgagatatgcagctcctgaatatgttcaaactggacgtctaacatcaaagaatgatgtatggagctacggtgtcttcctttatgaactcataactggtaggcgccctttagatcgaaatcgccccaggcgtgagcagaagttgttggaatggataaggccatacctatcagatgggaagaaatttcaactaatattagatccaagacttgataagaaacaagtcttcaagtcagcccagagactcgctatgattgctaaccgatgcttggtaaaaaatccaaagaatcgtccaaagatgagtgaggtattggaaatggtgaatggaatggtagaatccatatccagttctagtccacagttgcccctgaggagtgtggcaacattggaagcttcccaggatactgaaacaaacaacaagaaacgaaccatggatcataagcctggagaaagtaattggtttgttaggatgtggagaccaaagcttgtaagaacatgttgactattgtagatttaagccatcaagcctgttacttgggagcaaagcttcttcatgataagggaagagctccagcatgtttctcaatgccatgcggtcacaaacaatgtgcaacttctccatctcttctaaggatgtgtataaatctgccattacatgctacttaccaactactatagttttttctttcttgtcaaactacttgaggaaattttcagggatgatttatgaatttttggagagacaatacgtttctgaggatatctgatgtttctgtctgttctggttctcagagaaaccataatgctggaaattaatcactaaactgaaatggttgtaaagtagtttagttatagttttaaattaatctttaacagcatcttgtaattttactatttttgttagagttccacagaagttctgcagtgtcttgaataaaatgcacaaaatgcatgaatgattcttgcatggtaattggtaaatgcaagttcaaaacctagaaaagcagttcgtaagtt

SEQ ID NO: 49088 - DNA, 637 bp, Glycine max
  Clone ID: PAT_MRT3847_15332C.1
acacttggatttctcatttgcttctgcatggcatcctgatggccgcatatttgctactgggaaccaagacaaaaacatgtcgtgtttgggatgttcggaacttgtcaaaatccgttgctgttcttaaaggcaaccttggagctatacgttcaatacgtttcacatctgatggacagttcatggcgatggctgagccagctgactttgtgcatgtctatgacacaaagcatgggtttgagaaggagcaagagatcgatttttttggggagatctctggtgtatccttcagccctgacacagaatcactctttattggtgtttgggatcgcacctatggaagccttctacagttcaatcgacgcagaaattacatgtaccttgactgcttgtaaatttgtaaccttacaccttgtaagtacctacagctcatgttgtgttgtctattgtttaggtattcgagtatggtggtacatcatagcaaaaccagaaaaaccggtagattgtctcatcatacattgtagagcatggcttgaggatgctacagttgtttgatgtacaccttcatgctaaataacattgactgtcaatgtctgttttaatctttccgatggtaataaaatgaaggaagtttgtacaa

SEQ ID NO: 49089 - DNA, 593 bp, Glycine max
  Clone ID: PAT_MRT3847_15333C.1
ggctcgaggtccactgttgcccctgaggagtgtggtgacattggaagcttcccaggatactgaaacaaataacaagaaacgaaccatggatcagaagctcggagaaagtaattggtttgttaggatgtggagaccaaagcttgtaagaacatgctgattattgtagctttaagccgtcaagcctgttacttgggagcaaagcttcttcatgataagggaagagctacagcatgtttctcaatgtctgcaacttcttcatctcttctaaggatgtgtacaaatctgccattacatgctacttaccaactaccatagttttttctttcttgtcaaactacttgaggaaattttcagggatgatttatgaatttttggagagacaatacgtttctgaggatatctgatgtttctgtctgttctggttctcagagaaaccataatgctggaaattaatcactaaactgaactggttgtaaagtagtttagttatagttttaaattaatctttaacagcatcttgtaattttcctccttttgttagagttcccccgcagttaaaccaaaaaaaaaaaaaaaaaaaaaaaaaagccgcc

SEQ ID NO: 49090 - DNA, 871 bp, Glycine max
  Clone ID: PAT_MRT3847_15334C.1
ccacgcgtccgacttcattgagcccagatgggaaactggttgtgattgttggagacaacccagaagggatactagtggattctcaaactggaaaggtggtgtactctgttgatttgtgttacaaattccataggtactgtttgcaggtaaattatgaataatttaaattttggttctttgtagactgtcaagcctttatgtggacacttggattactcatttgcatctgcgtggcatcctgatggccgtatttttgctactgggaaccaagacaaaacatgtcgtgtttgggatgttcggaacttgtcaaaatccgttgctgttcttaaaggcaatcttggagctatacgctcaatacgtttcacatctgatggacagttcatggcgatggccgagccagctgactttgtgcatgtgtatgacgcaaagcatggatttgagaaggagcaagagattgatttttttggggagatctctggtgtatcctttagccctgatacagaatcactctttattggtgtttgggaccgcacctatggaagccttctacagctcaatcgacgcagaaattacatgtatcttgactgcttgtaaatttgtaaccttacaccttgtaagtaccaacagcttatgttgtgttgtctagtgtttaggaattgtaccatcatagaaaaaccggtggattgcctcatcatacattgtagagcatggcttgaggatgctacagttgtttgatgtacaccttcatgctaaataacattgactgccaatgtctgttttaatctttccgaaggtaataatgtgaaggatgtttgtacagaggtctataatgcaatgctttaccctcatcttttactgccagaggatccag

SEQ ID NO: 49091 - DNA, 1406 bp, Glycine max
  Clone ID: PAT_MRT3847_15335C.1
ctcgagccgctcgtgccgggggcggttgagcaaacataacttgcagtaatggcttcaatgaataaccaaaaagaaattgagctctttgagggccaatctcttctgtacatgcagctatatgggcacctaagacctatgtgtcttaagtgggctgttcaactaggtattccagacataatacagaaccatgccaaacccatttctctttctgacttggtctctactcttcaaattccaccagctaacgctgcttttgtgcagcggttcatgcgcttcttggcacacaatggaatctttgagatccatgagagccaagaagatcatgaactaacatatgctctaacccctgcatcaaagcttcttgtcaatagtagtgatcattgtctatctccaatggttctagcgtttaccgatccacttcggaacgttaaataccatcacttgggggaatggattcgtggggaggacccctcagtatttgagacagcccacggaacaagcgcttggggacttcttgagaaaaatcctgaatattttagtctcttcaatgaggctatggcaagtgattcccgaatagtagacttggcactcaaaaattgcacttcagtttttgaggggctagattccatggtggatgttggtggtggaactggaaccacggccagaattatctgtgacgcatttcctaagttgaaatgtgttgtgcttgaccttcctcatgttgtagagaacttgacagggaccaataatttgagttttgttggtggtgacatgttcaactctatccctcaagctgatgcagtgctactaaagtgggttttacataattggaccgacgaaaattgcataaagatcctgcaaaagtgtagagattctatttcaagcaaaggcaacagtggaaaagtgattatcatagatgccgtaataaatgagaagctagatgacccggatatgacacaaacaaagcttagtttggacattattatgttgacgatgaatggaagagagagaacggaaaaagaatggaaacaactcttcatcgaagcaggattcaaacactacaaaatatttcccatctttggttttagatctctgattgaggtctatccttgaacatttttatgatgtgtatgtcacacttaacgtttatatttatgaacatcctcagacatcgttgtaattgtatttagtggtttgcgtgttgtttgctgaataaagctatgatgacatagcattatcaacttctggtggaattacattatgttcctccccgctatgttgttaaatgttctgtgtacggatttctcattcctatttggccaaaataaattgaataaacatgtaatggatgcaatcaatatacaatgttttggtatggctttacgtctttacctggcttttgtttc

SEQ ID NO: 49092 - DNA, 389 bp, Glycine max
  unsure (1)..(389): unsure at all n locations
  Clone ID: PAT_MRT3847_15336C.1
ctattaccctcnaggggganatctctaacaccattcacaatgtgaaggccaatattcaagacaaggaaggcatcccaccggaccaccagatgctgatttttgctggcaagcaactcgaggatggaaggacggggggtgctacaacatccanaacgaatcaaccctaaaccttgtcctacgggtgcggggggggggttaagctccctgtgtaatgttagatgtgctccccaaacatttgaaaaactgtgatgcttaatgcgtctgaaataatgacccttgaaaataacctccggtttgagatgaactcaactgtgtccaattaataatagtactctaatatcgcaccctacctcggcatgaatgtgtgacatatgaaatgatcaatcgcc

SEQ ID NO: 49093 - DNA, 314 bp, Glycine max
  Clone ID: PAT_MRT3847_15337C.1
ggggtcaactatgttgtttctatacaagtgtgggaccaacactcgaaacttcaaaacactttgctggatggaagcccggctcctcctataaagataacatattccggattctctaagtaataagcgcttcattcacaaccaaagtcaactgtgggaacgactgcctttattgatgcataagaattgtttagccaagagtattattgcaagctttcagatgttttgtcatgcggagtaacctcatatctaatgctagtgggagcatatccttttgaggatcctaatgaacacaaatgaccttcggaagacaattc

SEQ ID NO: 49094 - DNA, 475 bp, Glycine max
  Clone ID: PAT_MRT3847_15338C.1
cccacgcgtccgtgaagacgacagaagggtacagtgataaacgagaagctagatgacccggatatgactcaaacaaagcttagtttggatataattatgttgactatgaatggaagagagagaacggaaaaagactggaaacaactcttcactgaagcaggattcaatcactacaaaatatttcccatctttggttttagatctttgattgaggtctatccttgaacatttttatgatgtgtgtgtcacacttaacgtgttaattgtatttaatagtttgcgtgttgtgagctgaataaagctatgatggcatagcattgtctcaacttctggtggaattacattatgttcctccccgctatgttgttaaatggtctgtgtacggatttctcattcctatttggccaaaataaattgaataaacatgtaatggatttaacaaatatacaatgttttggtatggttttacatcttt

SEQ ID NO: 49095 - DNA, 438 bp, Glycine max
  Clone ID: PAT_MRT3847_15339C.1
aaaaaacaacaaaaggtgcttctactttaagaccacacaaggttcattcggagaaggactattgtaacttgtccacatgtataaatgcatattatctaatatgaaaatagacacagaacacccattatttctaactaattagttcaaaacacataagccaacactattacttataactcttaagcataatgcaaatttctattctcatatcatttataatgaacgagatctatatactccgattaatccatattactgcatctttaccatatatacacttgttccaaactattgagctacagattattaaaattatatgcatcatcttctttaggatgtgggcttaaaacaatatataatgaggattattttatatctacgtaaactcaatattatcatattaccttcattttattgagtacgatacacctttgtttt

SEQ ID NO: 49096 - DNA, 169 bp, Glycine max
  unsure (1)..(169): unsure at all n locations
  Clone ID: PAT_MRT3847_1533C.1
gatggcgttgtctattcttattatgagtaggagagtgacccccttttggtggaatacacggactatggggggggaaggggttcacataaagaggcctctggagaattggctttggggttcgcccatggaaggggaccatnttttggggggaaattttttaggttttttt

SEQ ID NO: 49097 - DNA, 432 bp, Glycine max
  unsure (1)..(432): unsure at all n locations
  Clone ID: PAT_MRT3847_15340C.1
nnnnncccacgcgtacgcccacgcgtgcgcccacgcgtacgcccacgcgtccgaccacgcgggcgggcacgcgtccgtacggctgcgagaagacgacagaagggggttctagtgtgtgattgtttgttgtcgtaactcgttcttcttcttttgttgctctgcgtttgggcttgttttctatatcacctgaaaatgttttgctctcacaataactggggtggcggccgctcctgcatgttctgcatcgggtggcggcgctgcaacatgtacccatacttgagctacactggatcatccaccaccgagaccttggggatgggagtctcacctgttaagggtcaattatggggtgctcgaatgacgctgccctgtagagaacgatcgctgctaatgtggaccaaactggtactgttctcaatgcgcttcctaggg

SEQ ID NO: 49098 - DNA, 475 bp, Glycine max
  Clone ID: PAT_MRT3847_15341C.1
tacggtgcgagaagacgacagaagggttagtcgagctatgtataaccattggagttctactcgtttaatttgtgtaattaaataaacaaattcttgacatttgattatttaaatgagtcctaagtttttcaagctcaacattttaccatacaagaaccaaaataaaaaacatgttcattttataggaaaaattaaggaaaaaaaagacaaaaatactctactataacactactagagatgtaatacaatttggtagcgcatttgttttggctacaaaatgtcacgggttcaaattttgtcaatttctccatttgtggcatttttgtaattcttttatcaaattaaattaatattttttatttgtttatttaattaaaaatatcatttttcaataattcttaaataccttcaattacataatgcatatacttgaaaaattccaataaaataatcttctataaatttcactaaaatt

SEQ ID NO: 49099 - DNA, 328 bp, Glycine max
  Clone ID: PAT_MRT3847_15342C.1
ccacgcgtccgaccaaacccaaatgataatgggtggcttaaaagaatggaatcaagatgggcatcagtgccctcgtcttggctgagctacccataattctcatgtaccaagagcccacgtatccacatctacacagactctgtagagcttgctctgagaccagagatgattagtcggtgcggagattagcgaagcgaatatccatctcatttcaaaggtgggggatgaggaacatgataccagtgaacgcactaaatacgaattggcaaagctggatgtaccctatcggcaccccaaccttgtaactgcatgtactagactcatgtgt

SEQ ID NO: 49100 - DNA, 260 bp, Glycine max
  Clone ID: PAT_MRT3847_15343C.1
ctcgagccgaatcggctcgagccgcctccactcccccctcccaggcgctgcccaggtaagtacgcggcggcgatgacaacgacgcttcaagaagaaccgcaagaagcgcggccacgtgtccgccgggcacgtccgcatcggcaagcacaggaagcacccgggaggtcgcggtaacgccggtggcatgcaccaccaccgtatcctcttcgagaagtaccatccgggctacttcggcaaggatggcatgcgttacttccata

SEQ ID NO: 49101 - DNA, 299 bp, Glycine max
  Clone ID: PAT_MRT3847_15344C.1
gataccaggggcatcacacacgccatgtgacagtgagaaagtataagaatcagagagcataatgtcagggatcattcacaagattggggatacccttcatgtgggacggtacatgaacgaggatgagcataacggtgagcaccatgctggagactataaacgggagcaccatggtgaacacagtagtgagtacataggagagcatcatggagaacacaaagctagaaagtaccatgctgagcacaattcagaccactcagatgggttcctacacttagtcaacgacgacatccatggtg

SEQ ID NO: 49102 - DNA, 394 bp, Glycine max
  Clone ID: PAT_MRT3847_15345C.1
attgtatttttttaaatatttggcaaacctttgttaaaaaacggatatgattttatgaaaatgagtttaatagcaatggatataaacataacaaatgatataataacattctttattttattgaaacttttttgaaaatacaacataagaaagaatcactattcaaggttagataaacaaataagtgtaaagagaaaaatacaaaaatttcatactgatttgtttccactgctaacaatatgtctaattttttaccaattcatcaagttctactataactatataatgtaataggtattcttttcttaagttacttttgaattaaacccaagtaactttacaattgtctcttaaagcatattattcaagggttttttgaatcaagccttttttg

SEQ ID NO: 49103 - DNA, 470 bp, Glycine max
  unsure (1)..(470): unsure at all n locations
  Clone ID: PAT_MRT3847_15346C.1
tcgaggagtcatgtnnggtgtctcatggatacccccttatnngatgaanngctgctacacgnntggcatatttcttacccanntcacaagaatcttcgcagaatggagcttataaggggaggtgccacgtgttgtgtgctattnnnctcacccatgagtatttnnatgacattnnntggtcacaacccaaggtnnggaggggagttgtcttgaaagaaattaatnnatgctgagcgcccattaaggagctnnntctggtatgggaataatnngcggtgtgtgaagtnnctggtttgtgcccagtatatgnngaatattatgcacgcaattttggtttttttgtcttcagcatccccgtgttgttgctaccggtctataggaataaatgagaatactactggtgtnngtgtgtgcgttgggccgggggtgtctatgaatgggttgctggacctatatgttttatggtgtag

SEQ ID NO: 49104 - DNA, 142 bp, Glycine max
  Clone ID: PAT_MRT3847_15348C.1
gcacaactctgcgtcgagtctgtcttggatatttcggcatccacgagttcatatccctttcattgtattttcgtatagctctcgatttctcctctttcctgtatgatcgaccggatccgatcaattgtattcattttattat

SEQ ID NO: 49105 - DNA, 1193 bp, Glycine max
  Clone ID: PAT_MRT3847_15349C.1
attcggctcgagattagctactatggtcttccagtgttacattgaaggtccagatgagtacttatcacgctcaagttctacaaatagggttgctcctaaattagatgtatcacaatatacatcttgcagtaatgatgttgtgaagattctgctgcagtgtacatcaccgttgctatggagtaataacagtgcagttgttcttgcagctgctggtgtacactggataatggcttctaaggagcacatcactagaattgttaaaccactcttgtttgtcctgcgatcatcgtctgcctcaagatatgtggtattgtgcaatatccaagtgtttgctaaagctatcccatctctctttgctccacactaccaagattttttcatatgctcttcagattcctatcagataaaggcgctgaagctagatatactttcttctattgccacggattcatccatttcattcatttataaagagtttcaggattatatcagagttccatccgggaccctcgctgctgactcgctgctggccctggtgctgccctcggtctatgtgctcagcgacttccgaaaatggcaacttcatgcgtggaaggattgttgactctggtatttgcagaatttttttgtggtgaaattagatccttggatggagaagagggtgtgctaactcaggcaattatatccatcaaatcaattataaaattagaaccatccagttatgagaaggttataattcagttagtctgtagcttggataaaatcaaggttccagctgcccgtgcaatgattatttggatattgggggagtattgttctttgggtgacataattccaaggatgttgagtacagtacttaagtatcttgcccggtgttttacttcagaagcattagaagctaagcttcagtttcttaataccactgcaaaggtcttactgtgcattaagggagaagatattttgaccgtgagaaaagtttggagttatgtaattgaattggccgagcgtgaccttaactatgatattcgtgatcgttcacgtttcttaaagaaacttctctctagtaatttggagtctcaacatggggaagaagaaaatagtgaatcacaaaaaagagaccaatcctatatacttgcagaatgcatatttggtggacagacaaaagccatgacagttccatctgaacccattga

SEQ ID NO: 49106 - DNA, 354 bp, Glycine max
  Clone ID: PAT_MRT3847_1534C.1
aatattaaattttaagggcataccccccaaccaaacgaaacacaaaaaaactaacccaaacaaaaaaaaaccaaaaaaaccaaacccaaatttctttaaaaccgacataacaaccccccccaaacccaggggccccggttctcaaacaaaaaaaacctgccccaaaacgacccccaatgccaaaaagtgaagatggaagactttcctccccccacaaattcaaccaaggggaaacaaacgaaaaattcccccccgaacttccccctttttgtcccgccccctttttctaaccaccaacatcgggccgtttatataccacccaaccctacacggacccccccaattaaaattgtt

SEQ ID NO: 49107 - DNA, 259 bp, Glycine max
  Clone ID: PAT_MRT3847_15350C.1
ctaatcttggtttcttcattttctaccctccattcatatgaatatccaaacttacaattaatcaacaataacagttggtgtagtagtattatgagcatgcaaagagagaaaatggcaaagaaatccatcggaagcttaatgcgaaagaagctttctgatatcaccaacaacactaatcctaattactctcaacaacttgacactactctttcctccgataacaattccattcaacaactcctctcggaaagacggcatt

SEQ ID NO: 49108 - DNA, 495 bp, Glycine max
  Clone ID: PAT_MRT3847_15351C.1
gggcccaaaatcaatttttaaaataaacggggaaccaaaatgtccctttttttcaaaattaaaaaaataaggggggggttgaccaaatcgaccccaagcggggatttttttttttttttaaaccaaaaaatcaaaaaaagccccccccaaaaggacaatgtttttacaaggttttacccaaaataaaaatacttttacttttcccaggcaattgactacaggttttagttgatcaataaattagccgtttaaaacaaaaaaaaaaacccctgctttgcccataataataataataataataataataataataatatttaatttcccgggggggaacaaaagaggcttactttgaagttttggaaatctttttttggaacgttttttggggcgtttatccttgccaaaattaacattattttttttcccaccctttgaaaaacccgcatttggctttgcggctttctttggaggcctaccaaaccttttttttga

SEQ ID NO: 49109 - DNA, 436 bp, Glycine max
  Clone ID: PAT_MRT3847_15352C.1
ttttttttttttttttttttttttttttttttttttttttttttttttttttttttttttttttttttttttaaccttttttttttttttttttttttttttttttaagggggaaacctttaggcgaaaaaagggccacaaaaagtggggaaaaggggatattggacggggaattacccctaattagggcaaaaaaacccaagaagggccaaaacaggggggggatataaaaaaaaaaggggacctgaaaaggacaaaaagggggggaaacccaaacccgggggggggaaaaaggccccacctttttttataccaaaagtccccaattggggaattgggttgggcaaaaaaaggggaaatacaatttaaaaaaaattccttaaggggccaaggggccatccgggcaaagggcattagggccccaatggggatttcc

SEQ ID NO: 49110 - DNA, 439 bp, Glycine max
  Clone ID: PAT_MRT3847_15353C.1
tggatcctctagagcggcccttttttttttttttttttttttttttttttgccaaccccttttgttaatttgttgacaacggaaaatgtcataaactttgttcagaacgataacaaacaaagcaatagaaattagcacctctagacttttacacttgtttccgtcttttttaatttcctttggcattctttttttttcccatcctttttcttaacacaatctgaattttgcttttctaggactttggaagaggctttccttcaaggaatgatttgaataactgaagtgctgctctgggcttgaatagtggcacttcatgccctgctcctctcactggcgcgaatgttaccccttcgtacacctttgtccaccctccaacctgatttttgacataccaaggataccatggtattttagttgacaacttaagctgggcaag

SEQ ID NO: 49111 - DNA, 2028 bp, Glycine max
  unsure (1)..(2028): unsure at all n locations
  Clone ID: PAT_MRT3847_15354C.1
gtccgctgggacccacgcccccccaaaatcgccaaagcttgaaatctgattgcggcgtctcgcgcttccttcttccaccttccccgggtttcactgtgccgatgacttttcttctgagaaagagatcgtcatccatcgcgtgccttcgttttcccttcatgaaccggggcaggctttggcgttcttggaacttcttcttccgccactggacttgaccctacccccccccaattagggttatctatttcttccatttttttttccttagaaaaaaaaaacccgtttcttcttctctcgctgccgacgagtcttctttctcttcgaatctttctggctgctacattctgaagcacttcatatttcggtttttcattttcatttttattttttttttattatctggatggccaaaccaaaaatgccagggtttcggtttcaacccactgacgttgagctgattgagtattttctgaagaggaaggttcggggtaagaaattcccttccgaaatgattgctgaacttgacttgtactagtttgctccgttggacctcccagatatgtctttgctcaagaatggggatttgaattgagacttcgtttgccctcggggaaagaagtattcgactggtggagtatcggggttatgcatgaatttagacttgatgacaaggtgctggctgatgaaggcgtattgcagggtgtaccaaaaggagggtcctggtcctaggaatggtgcacaatatggtaaaccatatgaggagaaagagtgggaaacagatgaggaaattgattctgtacaatctgcccctgttgctgctgtttgtgcacctgttcctatacaacctagtgaaagccatatttcagttgctaattacatccatccctctacaagtggatgtgctggattgacctctgtatcatgtgtatcagaattgatgccatcttgctcgacacatccttcagcacctagcaatccagttggcactgtatcatgtgtatcagaattgattccctcttgctcggaaccacatcatttgccatcaaacaatcaagttggctctgtttcatgtgtttcagaattcatgccctcttgctcggcacatcctttggcaccaaacaatcaagttgactctgttccatgtgtttcagaattcatgccctcttgctcagcacatccttcagcaccaaacagtcaagttggctctgtatcaggattgataccctctttcttggcacattcttcagcatcaaacaatcaagttggctctgtaccatgtgtaccagaattggtgccctcttgcttggcacatccttcagctccaaataatcaagctgacgttggcattctaccttttcttgattgttccatagaagatgatgacacattggctgtgaatgaaaacaacagcattgagaacgttgatgatcctgatcaggcaaacaatgcagaacgtggaccatgttcagatccaaatgctatttttgaggagttaggagaccttaacagcttggttggattgggtgaaggcagtttttcctgtggccagaaaaatgaatatactacaagcgaaatgctttatacagttgatatatttgggtcttgtgaccatgactttttggagttgattgacctagagacgccgcacgctctggcagaataaacatggaagtggtagccaagataagtaaggttaaaaaattgagggaagtatcccagaaaattgattgaactatagccccaagtacctaacgtggattagaataaacaaaggattctcttcctgtcttcatttaaaaaccatcatggcaccagttttctatttgacattaatttctggaattacttgacaatgatatcaactgacaagaatgttgattaaaatctagtgatgttctttgattgtgttatgtttgattaaaatctaattatgctggaagttgttccagacattttttgccgtgaagatttattnnnnnnnnnnnnnnnnnnnnnnnnnnnnnnnnnnnnnnnnnnnnnnnnnnnnnn

SEQ ID NO: 49112 - DNA, 201 bp, Glycine max
  Clone ID: PAT_MRT3847_15355C.1
ggccgccgcctcttcttcgagttgtaacctctctggttaaccctgacttaaggtttatgttctaaaacccttttcaagttgattgggggagataaaaatgctcgtgttgtttggagcccctgcgggttttgccctgtttaaagggcttgattaaagcaagctttcttaaattgaagacttgtggaaaaactttttcagtgc

SEQ ID NO: 49113 - DNA, 760 bp, Glycine max
  Clone ID: PAT_MRT3847_15356C.1
ccacgcgtccgtcaaattcgccaaagcttgacatctgattacggcgtctcgcgcttccttcttccaccttccccgggtttcaccgtgccgatgactttttttctgagaaagagatcgtcatccatcgcgtgccttcgttttcccttcatgaaccggggcaggctttggcgttcttggaacttcttcttccgccactggacttgacccaattagtgttatctattattattcactttcttccatttttttccttactaaaaaaaaaaaaacgtggttcttcttctctctctgcggacgagttttctttctcttcgattcgttctggttgctacattctgaagcacttcatatttcgctttttctttttcattttcttttatattatttggatggccaaaccaaaaatgccagggtatcggtttcaacccactgacgttgagctgattgagtattttctgaagaggaaggttcggggtaagaaattcccttccgaaataattgctgaagttgacttgtacaagtttgctccgtgggatctcccagctatgtctttgctcaagaatggggatttgagttggtacttcttttgccctcggggaaagaagtattcgactggtgggaggttgaatcgggccacggaggctgggtattggaagactactgggaaggatagagcaattgaacacaataatagagttgtggggatgataaaaacactggtttttcacactggtagagcccctaagggagatcgaactgg

SEQ ID NO: 49114 - DNA, 617 bp, Glycine max
  Clone ID: PAT_MRT3847_15357C.1
cagcacatccttcagctcccaaataatcaagttgacaatgacattctatctttgcttgattgtttctttgaagatgatgacacattggctgtgaaagaaaacaacagaattgagaacattgatgatcctgatcaggcaaacaatgccgatggtgcactgtgttcagatccaaatgctatttttgaggagttaggagaccttaacagcttggttggattgggtgaaggcagtttttcctgtggccagaaaaatgaatatactacaagcgaaatgctttatactgttgatatattcgggtcttgtgaccatgacttcttggagttgcttgacctagagacaccgcagctctggctgaataaacatggaagtggtagccaagataagtaaggctaaaaaattgagggaagtatcacagcaaattgattgaactatagccccaagtacctaaccttgattagaataaacaaaggattctcttcctgttcttcatttaaaaaccatcatggcaccagttacttcgcatcatatcaactgacaagaatgttgattaaaatctagtgatgttctttgattgtgttatgtatgattaaaatctaattatgctggaagttgttccc

SEQ ID NO: 49115 - DNA, 615 bp, Glycine max
  Clone ID: PAT_MRT3847_15358C.1
agtagagatccccggtttgagaatcgtgatccaaagacaaaaaaggagttgtatggtgaagcaagaagggatcctccaaatgctaaaagtgaaaaggatatgcgcgtagaaggtagagaagatgacaacaaggatgtcaggcatgatcgggatagtcataatgatccgaaaggtgacaccaagacagagaaagatggttataatgtggttagcagccacttgaattggaaagattcaaaagagtaccatagaggaaaaagatattctgatgctcctggtgggaattgggacacatggcatatgtcacgtggaaatacacaaggctcggttgaggttgggaaggagagttccgcagcaggagagagagatcatgttgaagctcatgaagctgttagtgagaacaaagttgatcctaaaggtgatgatagatccaaagagaaagatagaaagaggaaagatgtgaagcatagggaatggggagatagggaaaaagaaagaagtgatcgtagaaacagtccacaagttagcaatagtaccggtgactgcaaagaatctaccaaggaagatagagatgtagaaaggttggagagggagaaaaaagatcttacaggagag

SEQ ID NO: 49116 - DNA, 485 bp, Glycine max
  Clone ID: PAT_MRT3847_15359C.1
ccggctcccaactcgttaccaacgcgcgtggacactccgaaactcaaagaagacggaaaaatgtatatcaaagctgttgtttgaatcaaaacccccatggatgcaacacttgcatgagggttaactaataacccgcagagcaaaatcataatttcataccaccaccattccagacaaacggaaacacaactcggaatcgctagattcaagagctttttccatccgttgaagcactcgcgagaaatacccggccatgttttcttgtgcgtgcctgaaaacactatataaataatcaacagcactacgaggttgaggtttgtgataacagcgcttagtgcaacgcctttgattccgaggttgaggatagacacgaagaggtagttgacgggcacgtggaggaggatcgaaacggcggcgcagcacgtgagagggagcgttattgattgactccgaaggtagattctcaaagggtgtagcagcgactg

SEQ ID NO: 49117 - DNA, 107 bp, Glycine max
  Clone ID: PAT_MRT3847_1535C.1
ctagaatacgacacataaggttgtataaaaacgattgaactggggttcaaagcacgccgttattcgctgtctctcccatcctttctcaatctcaatacccttttaat

SEQ ID NO: 49118 - DNA, 182 bp, Glycine max
  Clone ID: PAT_MRT3847_15360C.1
gcaagacgcatatgcaccttcagaagctagttcgacctactcgacggcgaaaacgtcacacgggcggtagaaacatatagctgcgcctcctcaatcctgaacgtcatcgctatgatcgacttggacaaatcattaccttacgatgaatacacatagagaagatgaacgctgtctatagacca

SEQ ID NO: 49119 - DNA, 167 bp, Glycine max
  Clone ID: PAT_MRT3847_15361C.1
cgaacatcttaccatatcaaactctatttttttttctgattctccctaatctagggctttttaaaattccaggggtcgctcatttaattctcttaccttaatccaatatcaactttcatattactcaaagcctttatcattatactcatatcaatgtcttcctaaaa

SEQ ID NO: 49120 - DNA, 369 bp, Glycine max
  unsure (1)..(369): unsure at all n locations
  Clone ID: PAT_MRT3847_15362C.1
ccaccatagcggccgcaccccccaaataaacccccccgcgcgcgaaacaaaagggggccctaaaaagacagggggcgcgcaacccacaagccaaacaaagggaaacaaacccaaccagancacaacaagaaaacaccaaagcaaacgaaaagccccacaagagaaaaacacccccaaacaaaacagggggaccaagaagaacaaacaaagaacgcccaccgaaaaaccacgcacggccgggaaagacaaccaacccacggagggagcagggaaaaaccccccggaagcaagacacacgcccaccaggaaaggaccagaccaccgacaacagaggaccaaaagcaagagaacccacacaaaggcaaaaag

SEQ ID NO: 49121 - DNA, 554 bp, Glycine max
  unsure (1)..(554): unsure at all n locations
  Clone ID: PAT_MRT3847_15363C.1
aaattattggtgtaacaacttgtttgttgaattnctctcatccagaagcattttgtgactaacgaagtctaattgacaacttgcactatttaccaatgtacttctggtatcaaaactcctcaaacggtaactgaaacccttgatagcaattcccttgtgccatcgcccatcgcagtccattctaaacccacttcatcgaataattctagaaaccttgtttccttactttctcagtcatttcttattttctttgtcagacttctattatccatattctcttctcctagtggaagattcatgcgcactctagcatgcatactcagacatattcgaatactttcaatgtgtgtttatcttatcatagatttttgacaaactcgcagtcatcttatttccatacccttctgtatatgacactatattggctccttacttttctgaccttaaactatatcgtgaactcttctatataaatacgaaatactactttaaaatacaaattacgagctgcatcattgtactaaaaaaatttaagctctagctgccttgctggt

SEQ ID NO: 49122 - DNA, 353 bp, Glycine max
  Clone ID: PAT_MRT3847_15364C.1
cccacacatacagagagacttccttttcttgaccccaatcgaaatgtcttagggggggggagcagacttgacatggagagctaaactcgctttactgttgaaaaacacaacaaaaaacagaatgcccttttatagtttgaaaaggtagtacatgcaaaacagcaagagacttatggtaccttgtacaccatcactttataagcaaactatggcaggcaaaagaaagtttatgaatccaaagtttgcgaaaaggcatgtttaaacttgaaagacgtcctagagttcaagcttgttggaaaagcacctaaataatctaatgcttaattaagttgcacaaaaataaatagtgagac

SEQ ID NO: 49123 - DNA, 434 bp, Glycine max
  Clone ID: PAT_MRT3847_15365C.1
atttgggagaactatccatgttattgtaaaaaaaaaaaaaaaaaaaaaaaaaaaaaaaaaaaaaaaaaaaaaaataaaaaaaaaaaaaaaaaaaaaaaatgaataaaaaaaaaaaaataataaaaaaacaaaaaaaaaataaaaataaaaagggggggccgttttaaagatccaaagtttaattccccgtgcttgcaaagattaaccttttttatggggccccctaaattaaattcctgggccgctgttttacaacttgttgactggaaaaaccctggggtacccaaattaaatccctttgaaaaaaatccccttttccccagttggcttaataccaaaaaggcccgacccaatcgcccttccaaacagttgcccaccctaaatggcaattggaaccccccctgtacgggccctttaagcccgggggttgtggg

SEQ ID NO: 49124 - DNA, 641 bp, Glycine max
  Clone ID: PAT_MRT3847_15366C.1
agagagaactagtcattctccacccccaccaaagcactcacctcctcctccctactactacaagtccccaccaccaccacctaaagagccctacaaatacccatcacctccacccccagtttacaagtacaagtcccctcctcctccctacaagtacccatctcctccacctcctccatacaagtacccttctcctccaccaccagtgtacaaatacaagtctcccccacccccagtttacaaatacaagtctcctcctcctcctgttcattcaccacctcccccagtttacatctatgcatcccctcctcctccatatcactactaggttatttctgaagaatataagccaataaaaaacgttgttgatagcaggaagatgcacttcgcaattgcacaaggaaaacaacggaagccaagtttccgcgcattttgtcacataagaaaaacgaagtgtcaatccctttcttcttcgtttgtattgtttatgaattattaattactttggttttagacagttgtatggcactgcttttgtctctgtcgttgaatgatatcacatgaatgcattttggtttgcaacctgctgcgcttgcaaggggttgtgaagccaattttataataaataaaatcaaatatat

SEQ ID NO: 49125 - DNA, 630 bp, Glycine max
  Clone ID: PAT_MRT3847_15367C.1
caagatggggtctccaatggcctctcttactctcactattgcattaaccataatctctctcaccttgccatctcaaacattagcagacaactacatctactcatctccaccaccaccaaagcactcacctcctcctccatattattatcactctccaccaccaccgaagcattcacctcctcctccttattactaccactctcctccaccaccaaagcactcaccacctcctccatactactaccactctccaccaccaccaaaacactcacctcctcctccatatcactactagatagtggttttgcttagcttcccgagtagttattaatgaagaatataagccaataaagaacgttgttgatagcaggaagatgcacttcgcaattacacaaggaaaacaacggaagcaaagtttccgcgcattttgtcacataagaagaaagaagtgtccatccttttcttcttcgtttgtattgtttatgaatttttattattgtgtttttagacagttgtatggcactatatcacatgaatgcattttggtttgtaacctgctacgtttgcaaggggttgtgaagccaatttaataataaataaaaacaaatgctttctctcaaaaaaaaaaaa

SEQ ID NO: 49126 - DNA, 709 bp, Glycine max
  Clone ID: PAT_MRT3847_15368C.1
atggggtctccaatggcgccctctcttactctcactattgcattaaccataatctctctcaccttcccatctcaaacattagcagacaactacatctactcatctccaccaccaccaaagcattcaccacctcctccatactactatcactctccaccaccaccaaagcactcaccaccaccagtttataagtacaagtctcctcctcctcctgttcattcaccacctcccccagtttacatctatgcatcccctcctcctccatatcactactaggttatttctgaagaatataagccaataaaaaacgttgttgatagcaggaagatgcacttcgcaattgcacaaggaaaacaacggaagccaagtttccgcgcattttgtcacataagaaaaacgaagtgtcaatccctttcttcttcgtttgtattgttttatgaattattaattactttggttttagacagttgtatggcactgcttttgtctctgtcgttgaatgatatcacatgaatgcattttggtttgcaacctgctgcgcttgcaaggggttgtgaagccaattttataatgaataaaatcaaatatatgctttgtatatttattgaaaaattctacaatatgtattgtatcttcaataataaaaatttgatttaaagataattaaatagttatcttttgtttaaaaaaaaaaaaaaaaaaaaaaaaa

SEQ ID NO: 49127 - DNA, 503 bp, Glycine max
  Clone ID: PAT_MRT3847_15369C.1
aaagcactcacctcctcctccctactactacaagtccccaccaccaccacctaaagagccctacaaatacccatcacctccacccccagtttacaagtacaagtcccctcctcctccctacaagtacccatctcctccacctcctccatacaagtacccttctcctccaccaccagtgtacaaatacaagtctcccccacccccagtttacaagtacaaatctccccctcctccctacaagtacccatcaccaccacccccagtttacaaatacaagtctcctcctcctcctgttcattcaccacctcccccagtttacatctatgcatcccctcctcctccatatcactactaggttatttctgaagaatataagccaataaaaaacgttgttgatagcaggaagatgcacttcgcaattgcacaaggaaaacaacggaagccaagtttccgcgcattttgtcacataagaaaaacgaagtgtcaatccctttcttcttcgt

SEQ ID NO: 49128 - DNA, 796 bp, Glycine max
  Clone ID: PAT_MRT3847_1536C.1
accatccttaggtgctttgagctgtcatcagggcttaaaatcaattttgcgaagagtcaatttgggacaatttgcaaatctgatatttggaggaaagaagctgcggattatttaaatagtagtgtgctgtccatgccttttgtatatcttggtatcccaattggggcaaactcaagacatagtgacgtttgggagcctgtcgttaggaagtgtgaaagaaaattagctagctggaaacaaaaatatgtttcctttggagggagagtcaccttgataaattcagtattaacagcgcttcctatatacttgttaggctcgagcaggattccggacaaagttgtagacaaagctgactataattcagcgtagatttttatggggtggagatttggaatagcgtaagattgcctgggtcaatttgaagaccgtgtgtcttccaaaagacaaaggtggtcttggcatcaaagatctacgggcttttaacacagcgctgctaggaaagtggagctgggagctatttcagaatcagggagacatgtgggccagagttctaatttcgaaatatgaagggtggcagatccattgctgaagaaagaatgagtagtcattttccctcttggtggaaggacttgctgcagattaatcagcagcagaatgcaattctaattagaaaccagacagaatgtagagttgggcgcgaagatttattcagattctgggaggatccttgggtagggcgtggcggctcatttatgacaaagtatcccagattataccacatattcaatctctacac

SEQ ID NO: 49129 - DNA, 997 bp, Glycine max
  Clone ID: PAT_MRT3847_15370C.1
tgcgcgtgtcacacatagtcaagcgagtcatttctctcatcgcaatgagcgagcgagcaaccgagtaactcatggcgaacgcggcagaacaaaaccgagcgagttgttgtgactgactcagtgagtgagcgagcgagcgagttactcatggcgaacgcggcgcttcggaacgtgaaggtgctcccgaactcggcgaatatggaggaagcgcgtcaccgagtcttcgaattcttcagaacggcctgcagatcgctaccttccgttatggaaatctacaacctctacgacgtcgtttccgtctccgaactccgctcctccgtcgcctcccagatccgcaacaacatccacgtcaccgatcccaaagtgatcgatatgctgcttttcaaggggatggaagagctgaagaatgttgtggaccattcaaagcagaggcatcatatcattggtcagtacgtagttggtcggcaagtgcaggattcagccacaaaagacccgggcacctctacttttctgaagaatttctacaacaccaattacttctgaagtttggtcatgagctgtgttctgtttcctcaaataaagaattatcttaaaacgttttttatgtcaatactggatgagataatacttttggtttcagaccaaactgctgtattcatttttcctggcttaatttaagaaagtggtgtttgccgattcttgtgcgcatgtgcacactgctgaaaatgtagtgaggcacgcatcactatttgacgtcattgcgaatgaatgcattggcgtagcatgctagagaaataatattgtatttgtgtaacaccaagattttgggctagggttatgaacttaaaatcaaaaatctgattatcattttcatgattgtaagttcattccataccggagacaaccaaaataagattatataaatttgagcgtactacagatattatgtttacatatggattcttgtgttccattttatttaagattagtaattatt

SEQ ID NO: 49130 - DNA, 383 bp, Glycine max
  Clone ID: PAT_MRT3847_15371C.1
gtttttttttcgacaacaaagaataacactttgttcccaaaaccaagtacaagttgactggtggctacactaactgctcacacttcatcctgaagatcaatacaacctaaggggaccgccttggcaggccaaatcgctttaccaaaacggattctaaactaaaaaaaaaagggaagaccaccatgagaccccctaaaaggaaaattaaacctaaagagccggccccccaaacaaactcggccctaggaaaaaatcatgggcaagcaactagctcatcaaaaaaataacgcttaacattcaaacccttgtaaaaaaaggcttgagggaaaaaaaacccaggttttccttccaaaaaagctcttgggagaagaggcccctttggc

SEQ ID NO: 49131 - DNA, 589 bp, Glycine max
  Clone ID: PAT_MRT3847_15372C.1
ctcactcacaccattttgttgtggggtgtaaggtacggtgagttggtgctcaatgccagcttcttcacaaaatttatcaaaaacatcatttttgtattccttcccattgtcagaccttattgtttgcaacctgcaatcactttgattctccaccaatgcatttaaagatgatactctctgaggtcccccaacatctgtgtgaactaattgcagcttttgagttactctccaagttgattgaggaaatggttttctgactagcttaccatattggcaagccatgcaatcggctaacttgtcttcaagcattgacacacctttcaccaaggcatgtttttgcatgtataaaagtccagcaagatggaagtgtccgagccttttgtgccatagttcaacattggtggccatgcttgaaaaagctatttgcttctcctccattagatttaaagcatagcttttagccctcattttcaccttgaatacgtcttttccttttacatctttgatcaagcaccaattttcttcaaatataactttgaagcctttctctacaagctgagcaacactaaatagattttgatcaatgtca

SEQ ID NO: 49132 - DNA, 379 bp, Glycine max
  unsure (1)..(379): unsure at all n locations
  Clone ID: PAT_MRT3847_15373C.1
catattacaaagaggtgacttgcacattaccatcccccacaaggaaacttgcaaacaagtttttctcaatagtttccccctcaccatctcacgcaatccttctaataacatatgtaaacaagataagtgttaatgggtcaccttgtatgtaaattttttgagcgaaagattcataaatatttcagcaacatcaaatggtacttgattgtaaacatttccttaattcaatagaatcactttttattaaaacccaacctcttcatatagaacaaganattccaattaatcaaataataggtttttcataatctaactttaaagatagactttttcttttttcctttttctttatcaatggtattattcacccgccacacac

SEQ ID NO: 49133 - DNA, 569 bp, Glycine max
  Clone ID: PAT_MRT3847_15374C.1
ctccaatggcctctcttactctcactattgcattaaccataatctctctcaccttgccatctcaaacattagcagacaactacatctactcatctccaccaccaccaaagcactcacctcctcctccatattattatcactctccaccaccaccgaagcattcacctcctcctccttattactaccactctcctccaccaccaaagcactcaccaccctataagtacccatctccaccacccccagtctacaagtacaaatctcctcctcctccctacaagtacccatctccaccacctccaccctacaagtacccatctcctccacccccagtttacaagtacaagtctcctcctcctcctgttcattcaccacctccaccacactacatctatgcatcccctcctcctccatatcactactagatagtggttttgcttagcttcccgagtagttattaatgaagaatataagccaataaagaacgttgttgatagcaggaagatgcacttcgcaattacacaaggaaaacaacggaagcaaagtttccgcgcattttgtcacataag

SEQ ID NO: 49134 - DNA, 1597 bp, Glycine max
  Clone ID: PAT_MRT3847_15375C.1
ggtctccaatggcctctcttactctcactattgcattaaccataatctctctcaccttgccatctcaaacattagcagacaactacatctactcatctccaccaccaccaaagcactcaccttctcctccatattattatcactctccaccaccaccgaagcattcagcctcctcctccttattactaccactctcctccaccaccaaagcactcaccacctcctccatactactaccactctccaccaccaccaaaacactcacctcctcctccatattactatcactccccaccaccaccgaaacactcacctcctcctccatattactatcactccccaccaccaccgaaacactcacctcctcctccatactactatcactctccaccacctcctaagcactcacctcctcctccatactactatcactctccaccacctcctaagcactcacctcctcctccctattactaccactctccaccaccaccaaagcactcacctcctcctccctactactacaagtccccaccaccgccacctaagaagccctacaaatacccatcccctccaccaccagtttacaagtacaagtctcctcctcctccctacaagtacccatctcctccacctcccccatacaagtacccatctccaccacccccagtctacaagtacaagtctccaccacccccagtttacaagtacaaatctccccctcctccttacaagtacccatctcctcctcctcctccatacaagtacccttctcctccaccaccagtttataaatacaaatctcctcctccaccagtctacaaatacaagtctccacctcctccatacaagtacccatctccaccacccccaccatacaagtacccatcaccgccacccccagtgtacaagtacaagtctccaccacccccagtctacaagtacaagtcacctccaccaccatacaagtacccttctcctccaccaccaccctataagtacccatctccaccacccccagtctacaagtacaaatctcctcctcctccctacaagtacccatctccaccacctccaccctacaagtacccatctcctccacccccagtttacaagtacaagtctcctcctcctcctgttcattcaccacctccaccacactacatctatgcatcccctcctcctccatatcactactagatagtggttttgcttagcttcccgagtagttattaatgaagaatataagccaataaagaacgttgttgatagcaggaagatgcacttcgcaattacacaaggaaaacaacggaagcaaagtttccgcgcattttgtcacataagaagaaagaagtgtccatccttttcttcttcgtttgtattgtttatgaatttttattattgtgtttttagacagttgtatggcactatatcacatgaatgcattttggtttgtaacctgctacgtttgcaaggggttgtgaagccaatttaataataaataaaaacaaatgctttctctcaaaaaaaaaaaataaaaaaaaaaaaaaaaaaaaaaaaaaaaaaaaaaaaaaaaaaaaaaaaaaattaaaaaata

SEQ ID NO: 49135 - DNA, 281 bp, Glycine max
  unsure (1)..(281): unsure at all n locations
  Clone ID: PAT_MRT3847_15376C.1
gcgagcgagcagtttcaaagagaggatttgggattgggaangcgagggattgcgctgcgtactcttcctcttctctttcgattcatcccctcattcataatcttccaatccaacaacctcagcctcacactcacacatacacacatctanggcgtatcccccctcccatggcttcaaagcgcatcctcanggnnctncanggnctngcagaaagacccaccaatnctggcacggctntncnatnacngagngnctnntnncantgncaagcnactttatgg

SEQ ID NO: 49136 - DNA, 498 bp, Glycine max
  Clone ID: PAT_MRT3847_15377C.1
gcacagaaacatacaaatttattacatacataccatgataagacatgtatttgaatatacataatagactatagcacaaatcttataaaaattcaaatcttttgccaaagaacacacagcaggtgtgtgaaaactcctaccagtcctaaaaacaaaacctacctcagactcagaggcacatctacgtcattcattcccaaaggccaaatcaagaacaagcatatataagcattatcacatgatttcatgggtgaccacaaaagagatcaccagcattatagtgtttgaggccttctatgttgtcaacatctttggggggggaaatgctgcacaagtaacaactgatgatgatgctttttccaggtgggagaaacacacaatcaagaagatggatggccaccgataaagaacttcgatgcgtactgcatccaaccaattctggaccaagagtttgtacacatccttcatagccagatgaaaccaagatgctgtttcagc

SEQ ID NO: 49137 - DNA, 284 bp, Glycine max
  Clone ID: PAT_MRT3847_15378C.1
tggcggtcggagctgcggtcgtttgcgcggcggcggcgtgtgctgcggtggcgctggaggtgcgcgggcgcatgaacatctacggaaagtggcgtcccgtgttggctattgtgaaagagatagacgaacacagtaagaccccaatcgggaagctgatacaggttgatgacaccatggactttgatatacacacagctcttgtttttgatagtgttacaaagcttaacatgttgatcacttaatttcataatctcccttctggtgatcataaaggacttttttat

SEQ ID NO: 49138 - DNA, 308 bp, Glycine max
  Clone ID: PAT_MRT3847_15379C.1
ggcacaattgagtttgttgatctatatatctagaaacaatgtgatcaacataaaggtccttgctatcttacatgtcaaaattttggtatcattgaaatgccatccctatcatacgttcccacaccgaatgaacaatgtctatggtactcgtatcccggaagtaaaatgcccacattagaggcttgctgttggaacataaaacatcattggcattgacaccattcctgaacagtgcgttgacacaacaaaagaatacatccaaggcgaccaatatacatcacactccaacacagttaatcaacaagctt

SEQ ID NO: 49139 - DNA, 405 bp, Glycine max
  Clone ID: PAT_MRT3847_1537C.1
actttttattgatttaacctctttcattagggttgtttatcaaatacattcctaaccatttctttggttgaggcgcaacaaggagggaatccacgcatgttcacccgagggaggggagaacgaattcaaccacccggcccccccgggggtggatttggttcaagggggggccccaacataggcaaaagcaaaaccggaattcccaaacttccccaggggaaataaatggggaggatttgtattttgggacccgagggggttttatcggggggggccgggggcaaaaaccccccccggcattgtggggttttaaaaaaaatttaaggccccctgttgggggaaacaaaccccataaaccaaaccccggggtgggcccccaccaaaactaggagatccccccccccc

SEQ ID NO: 49140 - DNA, 133 bp, Glycine max
  Clone ID: PAT_MRT3847_15381C.1
catcgatctagctatctgctttgtcgatcgcactgtccaaggtctgtcccagcacattggctgctttgtgcaagttattaacaccgctgctcacataatgagggccagagcaacaagtggtcaaggacaccag

SEQ ID NO: 49141 - DNA, 256 bp, Glycine max
  Clone ID: PAT_MRT3847_15382C.1
ctaaagggggcggccctttttttttttttttttttttttattatatgcttgggagatttatcgacagagacagtggatatggtcagaaggttctatatccgggagtacagagtacgctctatgtactcacagtagaggagcctagggtataactaaaagattagaacactattgagaaagtcagttctttaacaaaattaaaagaatgcaattttctagactacttgaatgcttcttgatcttcattagcctgtgc

SEQ ID NO: 49142 - DNA, 1708 bp, Glycine max
  Clone ID: PAT_MRT3847_15383C.1
cggacgcgtgggcggacgcgtgggcggtgcctagaattttagccaaatcattcagcattgttggaaacccccttgtttgtgccacgggaaaagagccaaactgccatgggatgacattgatgcctatgtccatgaacttaaacaacactgaagatgctttacaatctggcagaccaaaaactcataaaatggcaattgcctttggcttgagtttgggatgtctttgcctcatagttattggttttggacttgttctttggtggaggcacaaacacaatcaacaagcattctttgatgttaaagaccggcatcatgaagaagtctaccttggaaacttgaagaggttccaattcagagaactccagattgctactaaaaacttcagcagcaaaaacatactgggaaaaggtggttttggaaatgtctacaaaggaattctccctgatggcactcttgtagctgtcaagaggcttaaagatggcaatgccattggtggagagattcaatttcagccgaagttgaaatgatcagcctggcagtgcaccgaaacctcctcaaactgtatggattttgcatgacaccaacggaaaggcttttggtttatccatacatgtccaatggcagtgttgcttcccgtctcaagggtaagccagtgctggactggggcacaaggaagcacattgctttaggagcaggaaggggactactttaccttcatgagcagtgtgatccaaagataatccatagggatgtgaaggctgcaaacatattgcttgatgactattgtgaggcagtggtaggagattttgggctggcaaagcttttagatcaccaagattcacatgtcacaactgcagtgaggggtacagttgggcatattgcaccagagtacctttccacagggcaatcttctgagaagactgatgtctttggatttggcattctgcttcttgaattgatcacaggccaaagggcactagaatttggcaaagcagccaaccaaaaaggagccatgcttgattgggtaaggaaacttcatcaagagaagaagcttgagttgctagttgacaaggatctcaagaccaactatgacaggattgagcttgaggaaatggttcaagtggctctcttgtgtactcaatatcttcccggccataggcctaaaatgtccgaagtggtacgcatgcttgaaggtgatggactagcagaaaaatgggaagcttctcaaagagttgacacaacaaagtgcaaaccacaagagtcctcttcatcagataggtattctgatctcactgatgactctttgttgttagtccaagccatggagctctcaggacccaggtgaattaattgtctagtgagtacatttttttatttttgttttaaaggttttttaaaaagaaagcatatgaaattcaagagcatatgatagttgaatctttgttatcaaatcccttgaagatgattataatgttgtatgatagagatctaccaaagctgaaaaaaaaaaggtttgggtaatgtttaatttcaaatgtacagaatctgattcgttgaatgttaattttgtaatgcaaattttgtaatattgttaaaaatgaatgaagcctgtattggttttgcagtgaaattggttttgcactgaaaaaaaaaaaaaaaaaaaaaaaaaaaaaaaaaaaaaaaaaaaaaaaaaaaaaaaaaaaaaaaa

SEQ ID NO: 49143 - DNA, 357 bp, Glycine max
  Clone ID: PAT_MRT3847_15384C.1
ggaaaaccaatatactccataaattaaattacaataaaaaaatacaaataacatactacacgacaagggttacagtaaattaaaccaaaaacagaatttttcacaaaacaaactagggtcactcctaaaaaccaatccacttaaacagttgtttgttaagaggaaatgtaaaagatgtttgtcaaagatttatgaaaataactatttttttgttgatatgaacaaactgataagccaattttgtattgtatctcactcctgaaggaaccatgaagagggggctgaagaagaggaccaaagcaactatcaaaaattttattcatagttctaagaaacttggggccaaaaattattctg

SEQ ID NO: 49144 - DNA, 317 bp, Glycine max
  Clone ID: PAT_MRT3847_15385C.1
ctatacaagggcttttttattttgggatgggtgcaaattttaattttcattttcaaccacaaaaaaaattttttaaaattacaaaattaaaaaattggatcccttctatagtaaacctcacaattttatattaacattgggaaaaaatggaaatccaattactgctactgaagacccccaaattgtattcctacacgttaacgagctcctcccatccatcgggccatcaatcgaaaagaacaaactaacctcatatggggtgcaccttccccccactgaatcaatttttttgatacaaattcaaacacctctccaag

SEQ ID NO: 49145 - DNA, 358 bp, Glycine max
  unsure (1)..(358): unsure at all n locations
  Clone ID: PAT_MRT3847_15386C.1
aaaaagagaaggtttgtgcgcctgntctcctcccattgcacccccatcttgccgcgcctcggacggtcccactgtcactaggctgccctaagccgctccggggggtgaacctcgccgcgtggacgatctctttctggacaagatccgggggggtgggggggacgacgatgatgatgccgtccaacatcgcggntctcggccccggcggggtgcgaccccctgccttgggtggatccgacgacaaggccaatgctaaacagaggcacgtccgctccggaaccgcggtcatacctgagccagctgagcaccccaagtgcccgcgctcgcgctgcgtatactatggtgatccgtgggagga

SEQ ID NO: 49146 - DNA, 266 bp, Glycine max
  Clone ID: PAT_MRT3847_15387C.1
caccaactctccacaatgcctgtgtatactaaaaaaaggctaggcttataaccttcaaccatctaattctgctataccgaatacctatcccccaccacctaattctaaaaccatcccctccacaacacattatccatacttcattccaactcaaacccttcatcaccactatcaaacaccccacctaacttctcctacttttactctctaatacaactttttatcctacccattgatcacttactttacattaacataatctttct

SEQ ID NO: 49147 - DNA, 154 bp, Glycine max
  Clone ID: PAT_MRT3847_15388C.1
actcaagctgagcataccaaattccctggatcttgacatcctttttagcctttgatcccaaattagtgtcatatgtgtgaacactcttaaacacaccgtataccctacccagcttaggtctgtactatgtaacactcaaggtgaattctcccct

SEQ ID NO: 49148 - DNA, 674 bp, Glycine max
  Clone ID: PAT_MRT3847_15389C.1
ggagaaagatttggattttgcactggaactatgacgcgcgaaggacaccaagaagatgatggcgggcgtggagtgcctcaccaacttctagaagcttccagaaagaggctatcctcttctgaaacttccagatgacttttgccctctgctgaagctgaaaatggcgagaagcagcagatcccatacaagagtgtttgacgctaatgttacaaaagaaaagaaaaagtctaaagaaggtgataatgttgttgaagaagctcttgcagatataccatctctaccagagttgaagcggatctactatgaactaatgattcggtaactgattccctacttgttgtcttattttgcttgttcaatttgctgcctggtagggggtgttaaaatggtgatgttgttctgttacatagttgtcagtagcagcgaatagcaccactgctgcaatagaaacccaatgaacccactagttcgtgcactttaaaagaccaacttactttagaagaactttttccatttggctcgttcaacttttcagttttgcttccacatatttggaataagtggtttttaatctttctttatcaatctttttaactagatctagggaacttaattcattggttgatctagggaatgggggatctgatttctggatttattataaaaaaaccaaa

SEQ ID NO: 49149 - DNA, 1606 bp, Glycine max
  Clone ID: PAT_MRT3847_1538C.1
atttccttccccagaaattgatatggatggcagatttgaaaatgttgacgggtatttatttttgagtctgggttttagttcaaaacaaaatgcatgggcagggcctgatcattggaagtatcgaaaatccaaagtctcagaggttcatcctacttctgaagatgggtcgaccctaaaaagtagacagccaaagagtaagagacaaactgaagttgatttaaatttcacaaattctcttgagaaaaaaatgctagatacatttcctccgccaaattgttactgcttcccgaaagcagattaccttgcaatacaaagcttcctgaggactgccactatcagccagaggatcttgtcaagttatttcttctgtctaatgtgaagtgtctcgggaggaaggcaaacaggttctcagatggatctagagaacaatccaacgaatatgaatcattcccttcgtgggataatggaagtgtttgtggggatgacgctggtgactacggaggtgatcttcatagtgacatggaggactccaacactctaattactcagcctcgtcaggtcaataaaattgaagtccagtatgacaagacttccaaacaagttgatgttcatgcactgaaaattactcttctcgagccgaatcggctcgaggttaaacttcctttagagggtcaaaaagatactttatctttcaagaatatattagccaactttcctagcgaatgcaatgctgctgcaacaattagcgacatctctcctcatttgtgcttcatatgtctattgcatttggcaaatgagaaaggattgagcattcaaaactcctccaacttggatgatcttgccatacggtttccacaagttgctgattctataaggggaacagtttagattcctcttcactcaattattcttcagctcaggaatcaaaaaatgatggggactgtttcactgttgagtaacaagtccaagaaagcattgaagtgagtaacaagtccgtctttgtggttggagtttacaaatatcagtttgcttatggtggtttgaacactcggttaaggaaatgtcagactaatcatgatgtcttgttattctgtacatgaaagtattcaaagcatgcattagtgctctaatttcgttttccactccagcccgtttcatgtgtgtctaatgcttaggcttaggcttttacgagaatggctaggtgttggtataaataaaagcatagagtcatggaaagcattgaagtgagcaacaagtttgtggttggaggttgcaaatatcagtttgcttatggtggtttaacactcgttaaggaaatttcagacctataatggctccttgttattattctgtacatgaaagtatgcaacacatgtagtgctcaatttcattctccactgcagcccgttacatgaaagtattcaacacatgtagtacgagaatggctagtgttggtataaacaaaggcatagactgatggatgagcgactgattattgaatcgcacttacctatccctccattttctattaattgtcaaactgaaataatcaaatttatttgtaaataataataataataatagtagtagtagtagtaagttttaa

SEQ ID NO: 49150 - DNA, 359 bp, Glycine max
  Clone ID: PAT_MRT3847_15390C.1
agaaaatatttaactttctttgggtatcattccaaactgtcgccgtgagcttcaacgggctgcttattaacaaagatcaacaaattaaagatacgtcatggttctaaaattgcaacaacaaaaagttcctttctcttgaaatcacattttgaattcttctgctaaagtgacttaattttattcttatctaaaagctgtacttgaaataaaatatatttttgaaactcccaccggtcttggatccactctctagcactacacacttctcaaacatgacttacaaaaaaatctacttttaataatttgatcacgttcatttgatacatatctaatagaaattgcttcttattaaaatataa

SEQ ID NO: 49151 - DNA, 236 bp, Glycine max
  Clone ID: PAT_MRT3847_15391C.1
aataaacgtaccatactgtccaagatgagaaagaataactgatcgagtgctgattcagcggcatatgaggagaattgggacctatcatgataagttggcataacaccctctgatgaataaacttgataagtccaaaataaaggccatttttctgaaactagctttaacggaccaaacggatggacctgttgttttttagccagaattcttttaaccagaatcaggatccatatctg

SEQ ID NO: 49152 - DNA, 841 bp, Glycine max
  Clone ID: PAT_MRT3847_15392C.1
agtttggaagttgcttctgaatactttaggtctggggctgataagatttccattggaagtgatgcagtttatgctgcagaagaatatttaaaagccggagtaaagactgggaagaccagcttggagcagatatcaagagtttatggcaatcaggcagtggttgttagtatcgatccgcgtagagtgtatgtaaaggatcctaatgatttgcaattgaagaccataagggtttcaagtccaggtccaaatggagaagaatatgcatggtatcaatgtacagttaatgggggacgagagggccggccaattggtgcttatgaactagcaaaagcagttgaagagcttggtgctggtgaaatactacttaattgcatcgattgtgacggtcaagggaaaggatttgatgtagatttaattaagttgatatcagatgctgtaagtatccctgtcatcgcaagtagtggtgccggtgctcctgaacacttctctgaggtgttctataaaacaaatgcatcagcagcacttgctgctggcatttttcacaggaaagaggtgcctattcagtcggtaaaagagcatttgttgaaggaaggcatagaagttcgaatctgatcatatgcatttagtggtaaaatttttgagatgcacttcataataatcaaaccttgtacgttatccctttttgtgtaatctaacgaagctctcaaaatgtcaaccttttggatcatgaaaagattttcacaacgagacctttcctttgtaatatttttaagaaaaatatatttaccatgtgcagcactatctctgaacatttgttattacaaaattatttcatgtgtcc

SEQ ID NO: 49153 - DNA, 241 bp, Glycine max
  unsure (1)..(241): unsure at all n locations
  Clone ID: PAT_MRT3847_15393C.1
agaanaagtccacgagctcactctcctagccgccctctctcctttttttttattaaacacccacatacactcattccaaacaatctattatattatttggagcgtgtcttatcatatatcctacacccaacaccaacaactttataaacaccattaaatttcacctaaccaaaacatttaaatctaaaaacctctttttctaacactaataatacctaccaccataacctacaattactta

SEQ ID NO: 49154 - DNA, 244 bp, Glycine max
  unsure (1)..(244): unsure at all n locations
  Clone ID: PAT_MRT3847_15394C.1
ggcagaacaagttttgagattgttggatgccaactggtttgangacaacaattttcaccaacaaaacctctccaccttttcattcagcagtggattcagcttcagagtcccatgtgaaggaagtgtttcctttagattcaaagctcctgagagctccaacacttcaagtgaggtctcttagtgacnaaaacttgagctcaagtgtaggtgtnttcnctgattttccatcaccaaattgctgncc

SEQ ID NO: 49155 - DNA, 453 bp, Glycine max
  Clone ID: PAT_MRT3847_15395C.1
attaagctcaattgattttcatatttaggtattactctctcatttttacatgtcacttcctagttggtctcataattactctcttcttactgggttaaaaccccctaaaaaaaaccacaatattttttgaacgcttattctctgacctacttcatctttttcgaaactcttaaccatagcaagaagctagaaggaacacacacagagcatgacaaaacaaaacaataaaaaggaaaaagaagaagggtggtgcaagggagacgcacgcagagcctttgtgactatgaagcacggacactccagtctcttgtcgtgtttggtgtccgacacgcgtccgtgacagtgtctgacaccgacacgacacctgtactacgttctatattttggacattacaggtgtccacgtgttcatgttcgtgtcgtatccgatgtccgtgtcgatgttggtgcttc

SEQ ID NO: 49156 - DNA, 491 bp, Glycine max
  Clone ID: PAT_MRT3847_15396C.1
aaaagcccaaacgggccaaaaaattaaaatcccttaaaaaaaaaaagcccgggggttttttaaaccaaacaaattttccaagggccttaaaaagggagggttaaaaaaaaaagccacccattgccccccggggttgggggaaaggaaaaaaatttacgtccttcccccacccaaggaacaaaaggcttaggggttgggaacccccccggggaccccaaaggacccaggaaatgtcttccgggggcaccccggaccctgggggggtaccggaaccccccccccccccaaaaaaaaaaaaccccgggcccttttggggccaaaaaaagggactttgggggggacaatcaatttcctgggggggggaaccacccagggagagggcccctttagaacgggggcccccaccttttggagcacgggggaaagggctaacacccttaaaagtttttgaaccccccaccagtgaacattcttaatgggggggggcccct

SEQ ID NO: 49157 - DNA, 313 bp, Glycine max
  unsure (1)..(313): unsure at all n locations
  Clone ID: PAT_MRT3847_15397C.1
aaaaanaaaccgacccacgcatccggttttntataactacattttctttaccattttttatgcaacacccctttaaatcctgcccgtgcccatataaatatacaattgcatttaacaactttcttaattatttttctaaactatttccttaagaactaaaaataaaaatttttaatattttaattattttaaaatattaaaaaaaatcattaaaaactcaattttattccttccaataaaaaaccttaattccttaacccctatcctccccacactttttaaacaatttcccttattttatatatgtcacatt

SEQ ID NO: 49158 - DNA, 258 bp, Glycine max
  Clone ID: PAT_MRT3847_15398C.1
ctctacactggttctgcaccagtatacacacagctgcatcgtcactgacaccaggaactactgcagaatggtaacatcatactgcagttctgaaactgtcgattaccaatgtcagtgagtatcaagatattgctcagcagatgttgcccaacatggcgcgtgactactacgcatctggtgcagaggaccagtgcactctgccatttgactgatatgccttctccagcatattaccacggccacctactcttattcatg

SEQ ID NO: 49159 - DNA, 216 bp, Glycine max
  unsure (1)..(216): unsure at all n locations
  Clone ID: PAT_MRT3847_15399C.1
cctcaaaataaaaaataaaactttctattatctgcaggttctgcatntctgtttctgatttttgaggacgcggatcccaaaccggatcctatccaccattgcatcgaccccagccactacatctgctgggtgctctcatcaccaaccaatcatgcgtcttaacagatgactggatcatcacgcttcatccccttgccctgaccctaccaaagatga

SEQ ID NO: 49160 - DNA, 686 bp, Glycine max
  Clone ID: PAT_MRT3847_1539C.1
aatgcggatcatgttgccaagagtttggataaggaagggtatcgcgtgactactttgcatggagggaagtcgcaggagcagagggagattagtcttgaagggtttaggaccaagagatataatgttcttgttgctactgatgttgctggacgtgggattgacatacctgatgtggctcatgtcatcaactatgatatgcctgggaatattgaaatgtacacgcaccggattgggcgtactggtcgtgcaggaaaaacgggtgtggctaccacgttcttgactcttcaggactctgatgtcttctatgacctcaagcagatgcttattcaaagtaacagtcctgttccacctgaactggcaaggcatgaagcttcaaaattcaagccaggaactattccagacagaccccctagacgaaatgaccctgtttttgcgcattaaagaacctttttttttttttctttttttctttttgagctagccacttctttagaagacatcaactattcaagttttctggggtaatgaacatttttccagtgaggccctagcagcctaatctgctttttatggttatatcatatctgatcttgtataaaaatttaattacagcagctctactattctggtattgttcgttgtacttgcttgtattctacttagctaaagttactgctattctgctt

SEQ ID NO: 49161 - DNA, 1572 bp, Glycine max
  Clone ID: PAT_MRT3847_153C.1
cggaccggaattcccggctcgaactagtaaacaacaaaaggaaaaaaaaaaactcttgatcattattaatggcctctcattccccaaagagagaaggcccttattatcttaatattgtactattccttaccattctcatctccatcatcaacccttcacaccaagacccttcttcccctctccccccaataaacccaagactcaccaaagcctacacagcactccaagcatggaaacacaagatcacctcagaccccaaaaacttcaccttaaactggtgtggccccaatgtttgcaactacactggcatatactgtgcaccagccctagatgatcctcacatctacactgttgctggagttgacctaaaccatgccaccatatctggctcattgccagaagaacttggcctcttaactgacctatcacttctccacataaactccaaccgtttctgtggttctcttcccactagcttcgacaaacttcacctcctccatgaacttgacatcagcaacaaccaattctcgggaccattccccgaagttgttctttgcatccctaacttaaaatacttggatatcagattcaacaacttccacggcaacgttccctcgcgcctcttcgatgtcaaactcgatgcacttttcatcaacaacaacaatttccaattctcgttgcccaataatttcgggaacagtactgcttctgtggtcgtgtttgcgaacaatgacctaaaagggtgtcttccttcgagtttggttaaaatgaagggtacccttaacgagattatcatcaccaacagtggcttaacggggtgtttgcctagtgagataggggatttggacatggtcacggtgtttgatgtgagcttcaacaagttggttggagaactgcctgagtcattgggaagaatgaagaagttggagcagctgaatgtggcgaataacgagttgtctggtgagattcctgagagtgtttgcatgttgccgaggttggagaatttcacgtactcttataactacttctgcagtgagtcaccaacgtgtctcaagttgaaggataaggatgataccaagaattgtattccttataggccattgcaaaggtcactggatgagtgtaaggctttttatgcacatcctgttcattgtagtgcctttggttgtgcatagccgccgccgccacctcctcctcctccgccgccgccgccaccggcaacttaccaccactatccctgaggagccatggcagaaatataagtttgtaatatttaatttgcttttttttgttctgagtttgtttctctattttttggggatgtgaagattagttcggtgaatatcatgattacaatatttagttttcctttttggtgatacgtttacattgtaaaaaaaaaaggtgtgaaaattagctatttcccctattcatttgaaacttgtttaaaggaggttaggtttggtttgagaacgtttgggttgttatgggtcgtgacaaatattctctagttactgccgcccccaaaaaaatgttaaagaaggcctatccatagtatctattttttctgcc

SEQ ID NO: 49162 - DNA, 747 bp, Glycine max
  Clone ID: PAT_MRT3847_15400C.1
cagatgacaatcttttatggtgggcaagttgttgtgtttgatgattttcctgctgacaaagcaagtgagatcatgtcctatgccaccaaaggggggatcccccaaagccagaacaattctgtctacacctacacacagagccagccttcatttcctcctactttgatcagaacttctgctgattcaagtgctccttttattttcagtgtgaacattacaaactccattcatctgccaattgctagaaaagcttcactccaccggtttctggagaagagaaaggatagaattgcttcgaaagcaccatatcaagtagcaaatgggccttctaacaaggcagctgagtccatgccatggcttgggctgagtgcttcttcacctcaaatctgagagcagctacagttatatgtaatttttaagcattatttttgttgtgaaaatgctaactagtcagaagtattttttttgccagaaatcttgactaagtttctggttatatttttttcctgactgcatagcattgttactcttttttttttctttaaatgttttaaagatgttttatgggcttcttgttagccctttatttgtcatagtaatttcggctctgctgggtcgtatcatagatctaactattggttagttgatgctgctcttattatagtgattcaacatattcattgttatgattaaccgccccaaaatatagggcggccgccgactaaaagcaaagtcgtcccgggaatt

SEQ ID NO: 49163 - DNA, 1302 bp, Glycine max
  Clone ID: PAT_MRT3847_15401C.1
ggctcgagcagggtcacctgagacatcttgtcaatctgctacaaccatgaacttgtttcctcccaaggaaaacaacgtggcaccaaagaacctgacagctatggatttgctctctccacaagcttcctcctatggaccttcagaggagattccaaccttggttaattccaggtgggttgtttggttggttgctttgcttctttaatttgttgtgaagtcaattaacagtgtacccgtttgttcccacttgctgtggaagaaaattaatgagctatgacttcataccaattcttaaaactatatatatatatatatatccaacttcttttgtggctatttggttattaataaaatatccactatatcaatactaatacaatcatgtgataccaagggtgtttagcttaattgattgagtaaaatgcgtgagttattgtaaatcttatgatacctgtctttgattcttaccgttacaaaaaatactaatatgtgacaatttattcatggtgtgcagcgcaattaagtctgtgagcaagggtgctaaaactgcacagatgacaatcttttatggtgggcaagttgttgtgtttgatgattttcctgctgacaaagcaagtgagatcatgtcctatgccaccaaaggggggatcccccaaagccagaacaattctgtctacacctacacacagagccagccttcatttcctcctactttgatcagaacttctgctgattcaagtgctccaattattcccagtgtgaacattacaaactccattcgtgagcaccctcaagcatcatccagacctgttgtttatctgccaattgctagaaaagcttcactccaccggtttctggagaagagaaaggatagaattgcttcgaaagcaccatatcaagtagcaaatgggccttctaacaaggcagctgagtccatgccatggcttgggctgagtgcttcttcacctcaaatctgagagcagctacagttatatgtaatttttaagcattatttttgttgtgaaaatgctaactagtcagaagtattttttttgccagaaatcttgactaagtttctggttatatttttttcctgactgcatagcattgttactctttttttttttctttaaatgttttaaagatgttttatgggcttcttgttagccctttatttgtcatagtaatttcggctctgctgggtcgtatcatagatctaactattggttagttgatgctgctctaattatagtgattcaatatattcattgttatgattaaagattaatctttttccccccc

SEQ ID NO: 49164 - DNA, 1345 bp, Glycine max
  Clone ID: PAT_MRT3847_15402C.1
gagcatgtgtgctaaaactgcacagatgacaatcttttatggtggacaagttgttgtctttgatgattttcctgctgacaaagcaagtgagatcatgtcctatgccaccaaagggatcccccaaagccagaacaattctgttttcacctacacaccgagccagccttcatttcctgctaatttggtcagaacttcagctgatgcgtggctccaattattcctagtgtgaacattaccaactccattcatgaacaccctcaagcatcatccagacctgttgtttgtggtaatttcttaaattcactaatactttgagataatgattttttcttttttatggtattatggatcatttttttttttctaatcaggattttcctttgtgtacagatctgccaattgctagaaaagcttcactccaccggtttctggagaagagaaaggataggtaggcactctcacccaaacaaagaaaattttaaacactaggtttttatatttagtataggaatattttagggaaataatcttttcattttttcaaaagctctagaaagagaaaacaagtgtttctttaaaataagttgaatcaaacacaatacaagaaaaaaaaaaatcttgcaaaacaaaatccccgttcactctttgatagatctgggttttcttttgtgtcttgataataatttagatatcagaggaaattgattttccaatttgcaaaagtgcaattaatgttacctttttcttaagttttaatttaattatttttgcttagtttataatattgtttccttgtgttgtttttgcagaattgcttccaaagcaccatatcaactagcaaatgggtcttctaaccagccagctgagtccatgccatggcttgggctgagtgcttcttcacctcgaatctgagagcagctatagtttatatgtaatttttaagcattatttttgttgtgaaaatgctaactagtcagaagcttttttgccagaattcttgactaagtttctggttatattttttttcctgactaaatagcattattacttcttttttctcttttttttcgccgataaaaaaacctcttttttttttttctttaaatgtttttcagatgatttatgggcttcttgctaggcctgtatttgtcatagtaatgttggctctgctgggccgtatcatagatctaactattggttagttgatgctgctctaattatagtgattcaatatattcattgttaagattaaagattaatattttttccccactttactttcttgagctctagatgttcctgcaatagagagaaaattttaattcaacttatttgagatgtggtt

SEQ ID NO: 49165 - DNA, 2526 bp, Glycine max
  Clone ID: PAT_MRT3847_15403C.1
tacggctgcgagaagacgacagaagggggtctccccccaaaatttcttaagtttcccatgctcttcatcattgcttttttgttgggtgcggattcggctcgaaaaaggagaaaggctcaaatttgtaagccaatcatatgtattttatcgagttgagaagggtcaaactaaggcatatgaggaagggttaatcaagtaattatacagcagctttagggagagagaagagaagagtaatggcagaggtggacagagaaagaatccatacacattgatgatcccggtggatctagtagtggatcagcaatatcagtggccgcaaatttggtggcagggtcccttggtagtgagactgatgggtccattttatgcccttcaggttctaactcagtagtgggcattaaaccaacagttggcctcactagtatagcaggggtagttccaatcaccccattacaagacacagttggaccaatttgcaggactgtattagatgctgctcttgttcttgaaaccattgcaggcatcgacatcaatgataaggcaacaatcaaagcatcaaagtatgttccaagagatggctatgctcaatttctaaagatagatggactgagaggaaagagattaggtgttgttagagcattctacggttttggaaatgacacttttaagcatgatactttcaaactgcacctgaaaacactaaggcaaaaaggagcagttttggttgacaatttggagataaacaacattcaggaaatcttaatgatcaaagagaaacttaaggagtatggccaagatctcatgctggtagctcaaaagacaaatggagttagggaactgaaggaagcagtgctaaacatggcaagattgtcacatattggatttgagaaattaatgataacaaataaccttgacgcaatggtggtacctttttcattctttgctagtatacttgcaaggggaggttatcctggagtaactgttccagcgggatatgaaaagggtgcaccatttggaattatctttggaggtttgaaaggctcggaaccaaagctcatccaaattgcttattcctttgagcaagcaactttgatcaggaagcccccaccactccgaaagttggagcctttatgttgggtgcggcttcctcttctaaatggagaaagactcaaaattaaaacgtatgatggtcgatccctcttcctcttttttaatccctctattcactttctcttctccattattaacaaggccaaaggactctcaatcgaagaggcaaccgtttatgatctccaacttgcttttcggacaaaacaactaacctctagggaagtcgttgacttctacctcaaacaaatagaaacgcaaaacccagttctgaaaggggtgttggagttgaacccagatgcactatcacaagctgataaagctgaccatgagagaaagactaaggcaccggggtctctttcaccactgcatggaatacccattttgattaaggacaacattgcaaccaaggataagatgaacaccactgcaggctcttttgctcttctgggctctgtggtgcctagagatgcaggtgtagtttccagattaagagaagctggggctatcattttaggcaaggccagcatgagtgagtgggcattttacaggtccaatgcagcacccagtggttggagtgccagaggtggacaggggaagaatccatacacaatggatggtccaagtggatctagtagcggatcagcaatatcggtggcagcaaatttggtggcagtgtcccttggtactgagactgatgggtccattttatccccttcaaacgttaactcagtagtgggtatcaaaccaacggttggtctcactagtagagcaggggtagttccaatcaccccaagacaagacacagttgggactgtatcagatgctgctcttgttcttgaaaccattgcaggcatcgacatcaatgatcaggcaacaattgaagcatcaaaatatgtcccagaaggtggctatgctcaatttctaaagaaagagggactgagaggaaagagattaggtgttgtgagatttttctacggttttagtggcgatactgttatgcacaaaactttagaactgcacttcaaaacattaaggcaaaagggagcagttttggttgacaacttggagatagaaaacattgaagaaattattgatggtcaaagtgaagagattgctatggcatatgatttcaaattatccttgaacgcattgtcccacaatggatttgagaaattaatgataacaaatgaacttgatgcggtggtagtaccttcttcaacctttagttctatacttgctataggaggttatcctggagtaattgttccagcaggttatgaaaagggtgtgccatttggaatttgctttggaggtttgaaaggctcagagtcaaagctgatagaaattgcttattcctttgagcaagcaactatgatccggaagcccccaccactccgaaagttagagatttga

SEQ ID NO: 49166 - DNA, 674 bp, Glycine max
  Clone ID: PAT_MRT3847_15404C.1
cgggattccatctacctatatatacttctgtatctttttctgctgtgtctctaggtgttaactaggacatggttaaatcgctgtaacaagggtataattaatagttctcagaatttgaacatcttggttactcttaatttttttaattttgcgttatgatttttgcattttaatgtggataaggcattcctgggctacacgttagtttcaatgtaggtaggtgaacaagatcatgtgttcgtgaattggtttaggtgaatgattgacacctccgtttttgctattccttttaatattggtctatgagaatgattttttcttgttgttatttgaaatttatccatttggctgttgattggatatttggattcatgtgtgcatgacttggaatttgttgattgacaagtgcttctgacttgcaacgaaaacaggggaaaggggagaagtgaagcctgaaacactagtgaagcaatttctggctgttttctattgtccagaatttgttccccacgaatattttttggcggattctgcccgtcaaatattaatcgccacaaaaatattaattaattaataaattaatgtcatgccataaattaactacgggattttataaccagactaaaaatattaacaaacaaaagcattataggtcaatttttcgttaagagact

SEQ ID NO: 49167 - DNA, 522 bp, Glycine max
  unsure (1)..(522): unsure at all n locations
  Clone ID: PAT_MRT3847_15405C.1
gtcgtttttaaatttgcgatctaactcctgaaatcgcacaattctacgatgcttggtgctggatcagactgagataagattggagtagaaaacgtatgatggtcgatccctctgttcactttctctttcgtgaaaatcgcaggaagataactgctgaagactgaagtacctgaaggctgaggtggtgttttcatggcttccgacacggccaaaggactctcaatcgaagaggcaaccgtttatgatctccaacttgcttttcggacaaaacaactaacctctagggaagtcgttgacttctacctcaaacaaatagaaacgcaaaacccagttctgaaaggggtgttggagttgaacccagatgcactatcacaagctgataaagctgaccatgagagaaagactaaggcaccggggtctctttcaccactgcatggaatacccattttgattaaggacaacattgcaaccaatgataagatgaacaccactgcangctcttttgctcttctgggctctgtg

SEQ ID NO: 49168 - DNA, 1121 bp, Glycine max
  Clone ID: PAT_MRT3847_15406C.1
aacattaaacaaagaatagtattttatgtaattcgaaaaattcttaagaagtattaatgtaatttgctattttctttatatcaaaactatttgactttgcaagcattattacttttcccgtcaaaataattgtggtgcattaaatgtgtaacttcttgtgggctggtacagaccaatttgcaggactgtatcagatgctgctcttgttcttgaaaccattgcaggcatcgacgtcaatgataacgcaacaatcaaagcatcaaagtatctcccaagaggtggctatgctcaatttctaaagaaagatggactgagaggaaagagattaggtgttgtaagaacattctacggttttggaaatgacacttttatgcatgatactttcgaactgcacctcagagacttagttgcttccccagtgagaagcttggccgatgtgatagcctgagtttatatatggcaataagattccaagtgtgtcgtctatttagctatcactgctacaaaaaacgcgttcaacgtcggtgcttctcggagttcaacgacggtgcacggccgtctttgaatgagaccaagtcgtaggcctccggccagtctacccaggtcctcatgctgctagctcaaaacacaaatgtagttagggaactgaagaaagcagtgctaaacattggcaagattgtcacatattggatttgagaaattaatgatagcaaataaccttgacgcaatggtggtacctttttcattctttgctagtatacttgcaaggggaggttatcctggagtaactgttccagcgggatatgaaaagggtgcaccatttggaattatctttggaggtttgaaaggctcggaaccaaagctcatccaaattgcttattcctttgagcaagcaactttgatcaggaagcccccaccactccgaaagttggaggtttaaccgttacaaaaagattgtcagaattttgatggaattgaatagccaagtgtttgtttgtttaatgatggccaagactaattatccatctaaaagagtaaattaagtattgtcatgtccttctatcaggaactctgacaaaaaccatatatggcaataaaatttgaagtgtgtctatttagct

SEQ ID NO: 49169 - DNA, 496 bp, Glycine max
  Clone ID: PAT_MRT3847_15407C.1
ggatgaccaatatggcattgattgctgtcactaaaaaattttaagttaatagtacacgtatactataaaccatgtaggtacactaattcaaaaaaaaatgccttttcatacttacaagaaaaaaaaaaaaaaaccttgtacaaatgtaaatgaacagtgtaaaattctctgttgatttcaagatggttttgcaactatccataccataatttccatggtgacttgggagccgaactatcagatttgccactcattgttaatgatgctccaaatccttgaaatcaataaatgaaattcattgggcaaacttcagtgtccgtaaatgcaaattttaaccctttggctttccttggaagcctcctgaatgctgcaccagcttcataagctcgtataataggtgtacaccctcaaaaactttatccatccatacattaccagccaagttggcaacgggtgaatttcctatcataccacaaaggttctccggatgcctttg

SEQ ID NO: 49170 - DNA, 2717 bp, Glycine max
  Clone ID: PAT_MRT3847_15408C.1
ctcgggctggacaaacgaaaaagattggatagaaaactatgatggtcgatccctctgttcactttctctttcgtgaaaacgcagaagtaactgctgaagaatggaaggaaatctattgagggaagtctctcttaaatggatcttcctagtctctgactccggcccaggcaacccaatccatacaggttgataatccctgtggatctagtagcggatcagcaatatcagtggccgcaaatttggtggcagggtcacttggtagtgagactgatgggtccattttatgcccttcaggttctaactcagtagtgggcattaaaccaacagttggcctcactagtaaagcaggggtagttccaatcaccccattacaggacacagttggggactgtattagatgctgctcttgttcttgaaaccattgcaggcatcgacgtcaatgataaggcaacaatcaaagcatcaaagtatcttccaagaggtggctatgctcaatttctaaagaaagatggactgagaggaaagagattaggtgttgtaagagcattctacggttttggaaatgacacttttatgcatgatactttcaaactgcacctgaaaacactaaggcaaaaaggagcagttttggttgacaatttggagataaacaacattcaggaaatcttaatgatcaaagagaaacttaaggagtatggccaagatctcatgctggtagctcaaaagacaaatggagttagggaactgaaggaagcagtgctaaacatggcaagattgtcacatattggatttgagaaattaatgataacaaataaccttgacgcaatggtggtacctttttcattctttgctagtatacttgcaaggggaggttatcctggagtaactgttccagcgggatatgaaaagggtgcaccatttggaattatctttggaggtttgaaaggctcggaaccaaagctcatccaaattgcttattcctttgagcaagcaactttgatcaggaagcccccaccactccgaaagttggaggctgaggtggtgttttcatggcttccgacacggtacgaggccaaaggactctcaatcgaagaggcaaccgtttatgatctccaacttgcttttcggacaaaacaactaacctctagggaagtcgttgacttctacctcaaacaaatagaaacgcaaaacccagttctgaaaggggtgttggagttgaacccagatgcactatcacaagctgataaagctgaccatgagagaaagactaaggcaccggggtctctttcaccactgcatggaatacccattttgattaaggacaacattgcaaccaaggataagatgaacaccactgcaggctcttttgctcttctgggctctgtggtgcctagagatgcaggtgtagtttccagattaagagaagctggggctatcattttaggcaaggccagcatgagtgagtgggcattttacaggtccaatgcagcacccagtggttggagtgccagaggtggacaggggaagaatccatacacaatggatggtccaagtggatctagtagcggatcagcaatatcggtggcagcaaatttggtggcagtgtcccttggtactgagactgatgggtccattttatccccttcaaacgttaactcagtagtgggtatcaaaccaacggttggtctcactagtagagcaggggtagttccaatcaccccaagacaagacacagttgggactgtatcagatgctgctcttgttcttgaaaccattgcaggcatcgacatcaatgatcaggcaacaattgaagcatcaaaatatgtcccagaaggtggctatgctcaatttctaaagaaagagggactgagaggaaagagattaggtgttgtgagatttttctacggttttagtggcgatactgttatgcacaaaactttagaactgcacttcaaaacattaaggcaaaagggagcagttttggttgacaacttggagatagaaaacattgaagaaattattgatggtcaaagtgaagagattgctatggcatatgatttcaaattatccttgaacgcgtacctcagagacttggttaattccccagtgagaagcttggccgatgtgatagccttcaacaaggaacacccagaattggagaaacttgaggagtacggccaagatctcttgttgttagctgaagagacaaatggagttgaggaacttaatcatgcggtattaaatatgtctagattgtcccacaatggatttgagaaattaatgataacaaatgaacttgatgcggtggtagtaccttcttcaacctttagttctatacttgctataggaggttatcctggagtaattgttccagcaggttatgaaaagggtgtgccatttggaatttgctttggaggtttgaaaggctcagagtcaaagctgatagaaattgcttattcctttgagcaagcaactatgatccggaagcccccaccactccgaaagttagagatttgacagttaaaaaagaaattgtaaaaaaattgatggaattgaatagcacttgtttagttgtttgtttaatgatggccaagactagttatccatctaagagttaataagtatgccacgtccttctgtcgaaagttctgatagaaaattatgacaatatgattcagaatgtgtctatttagcatcaattagttcattgttgcgat

SEQ ID NO: 49171 - DNA, 524 bp, Glycine max
  Clone ID: PAT_MRT3847_15409C.1
tgtagcagtaccacctgcttggggggggggggggggggaacgttatagaaaggtaggaaacataggccaaatattaaaatccgagtactaatgcacctgagttaaacttacacagttaaaaggataaacctaaaagcagaaaagatccaagtaacaactaagaaaaggtgattagtacagcaagtaaaaggtaaaagtacgtgatttcggcagtaatgttgctagagcgcccaaatcacggctaagaaaaggtgatgattagtacagcaagaaaaagttaaaagtacgtgatgccggcagtactggtgctcgagctacgggtaaacgctctggctgtgctggtggcgattgttggtgtacggggttgctttggtgggcagggcgacgagatatgtagaaaccgtttaatactgttagatggttgttgacgagctgtagataaattactagtaaatagcctgtacaacgggggtgtacatactgtacatatactagatgcgcctggcaaattagcaggggtaagt

SEQ ID NO: 49172 - DNA, 246 bp, Glycine max
  unsure (1)..(246): unsure at all n locations
  Clone ID: PAT_MRT3847_1540C.1
gcgttacaanttgcgttccgagcttgcnaacgcaaacgtatcgagccagcctcacaagctagggntnttcaccgcgctccaccnntcttccctcnnncttcgtcncctccaattggaatgtgtttgganttcatatgntggtagttgncntttngaaattntaactgtggtgggagcantactatattnggnggtcatcatggcgatncanccnggnganagnccgantttctcctgcnanaaaag

SEQ ID NO: 49173 - DNA, 168 bp, Glycine max
  Clone ID: PAT_MRT3847_15410C.1
gcgattctgagcgaaaactgaagccatgcatatctattgtgaccttcatactgtgcttaggctctatcatctccctctctctggggcccaaattcgcgtgggacccaaccacttctgtgcgaatgagtatattcatcagaaacctgatgagatgacccagattgaccc

SEQ ID NO: 49174 - DNA, 679 bp, Glycine max
  Clone ID: PAT_MRT3847_15411C.1
ttctgtatgaagaaaagacatgcattaaatgcacccaacgacctcctttctttattagacgaaagataaaagcaacacctactcgtcatgagacaacatatctctaaagtcgaaggcttatataaaccataagtttttgaagattgatagagtttatcttctacgcataattttctcttactcttcttcttcaacaagtctttctgaatattttcttataaaattataaaactctcaaaacaccttgaacatcttgagagaaaaaggttatatgcttagataatttatgtgtttgtaagacaattgagtgttagtctttgagtcatctttcatcataaatttcgtctaatggcttgatagaagaaagaatactggatgttgatcaaacttgggataaagtttgatttgtaagagccaaaagtggttatgacataatacttgtaacttgtgaaaaaattagtagaacttggtagtttactaaaaactaaattaatctccgtggtagagatgaatcaatataaaatctttgtgtctatctattatttctccctttctatttgattaactgaagttgaatttgaattgcgtttcaaaaggtataagataatctgcatttctaaaaattcatttttcctcatcatttgaagttttcttgtgataaaaaaattgtctttcttac

SEQ ID NO: 49175 - DNA, 596 bp, Glycine max
  Clone ID: PAT_MRT3847_15412C.1
cacgcgtccgtgaaagaagggaaggctaaggtggtgacgccatcacctccgccaccctaaccttggttaattttccaccaccaccaccacctttgttttgtagagatcgaaataatcaacaacaaggatttaaaaaaccatcggcaaccgtgatttgagttataacatcaatttttttcaactgtcctcaaccacaattgaaatcacatcgggttgcatttgttcgtaatttatcacgatatcaataaacccaaccaaaccgttatgcaactgtaaccgatcaacaagttaagagagggggaaatgagggtatttaaaagagccagtggagccatcaaggacaggaacagcatatgggttgcgaaattctcaccaaagggtccattccacaaccctgatttagaaaccgtgataatcaaagccacaagccacgacgataagcacatagattcaaagaacgtgcaaagagtgttccaatggctacgaacctcgcccttgtacctgaagcctctcgtgtggatcctctccatgcgcatgcaaaagactcgaagcttggttgtggcgctcaaggcttgatgctcatccacggcgttttc

SEQ ID NO: 49176 - DNA, 203 bp, Glycine max
  Clone ID: PAT_MRT3847_15413C.1
gtaattcaagttggttttcagtttgaaagaagccctaatgtggggttcaaggaagttttggggttcaagaaagccagcaagcaccttgcctttttaataatggcttatgccacaagatgttggaatcattggtaccgtgtgagtaaacttctcgcggtcaaggcgtgatggaactggctaattggaacgaattcttgtttgca

SEQ ID NO: 49177 - DNA, 389 bp, Glycine max
  Clone ID: PAT_MRT3847_15414C.1
catcctccgcccacgactacgacgccgttttcgccgccatccaccgtcgcaggctcaactggatccccgtcctccagatgcagaagtaccactccatcgccgacgtcacgctcgagctcgccagactcgccgatagaaaccactacgctgccgccgaagacgacgacgccaaacacgaaaccgacgagaaaacgacgccgtcggagagtgtcggagatggtggtggcggtgatgaacacgaggagttatgagtcacccgagagcgagattactgattcaggatctcaagaaattgcaggctagtccaacgaacgttaatatatgttccaatcatgaagagtgtgaagggcgttcttcaacagtttaagttgacaaaaggtttcacaggc

SEQ ID NO: 49178 - DNA, 446 bp, Glycine max
  Clone ID: PAT_MRT3847_15415C.1
tgggggggggggggggcctctagatagcatatgaagttagtcgtagaaggtattaaaactaggcaaacaaaagtagataacaagagctaataaagacaaagagcaatcctctgatgtatgaacgagaatcatatggaaacaagtagaataaaaagtagcaaaggggcaaagaacaggacagacctacgacgagtggctcttctagaggaccggacggcgtcaatccatgcacagtggtataggaactacagcatcataccggagacgtactgcgctaattagtactacacccatagcgtgtaactgggcctggtcacgagagcgtcctacaaggactactgagtacgcttgttatgaagcaaggcttggcaagggggactactaagacagcgatagataccaaaacctgggtaggtcagcttaaaccataagctagcaaaagaggt

SEQ ID NO: 49179 - DNA, 413 bp, Glycine max
  Clone ID: PAT_MRT3847_15416C.1
gagctcacttgtctgcggccgccctttctttttttttttggggggattgaataaaacatccaccatgttaaagaagaaaactccacacaacgggtgctctgatcctcagcgcagaatgatcctcagaccgccatgtttacacagatcgccgaactgtggcatcaggttcaacacctgtccttccaaatatcccaaccactttaacactatctgtgttcgcgtaagattgctgacccagtccaggaatcatcaggggctgcaggtctatagggtggtcaaacttacaagctggtccatatatgcaaaattcatatccactggaacgggatcagacactgtcgtcagggctacaaggcagacccttgccactgaggttgcatgggggttaccttggcacccgactgttttgatgg

SEQ ID NO: 49180 - DNA, 602 bp, Glycine max
  Clone ID: PAT_MRT3847_15417C.1
tggggagcaaccaaataaatttcaagatttctctaaacggatttgagagctcaaatgcaactaaggcaacaaagacagtgctcacatctaagaatgcattagatgagaatagcctcgcaaacccaacaaatgttcatataacttcttttattctctttcttttattataaactaacaatacatataataattaactaagctaacatctaatgtttatatgtttgttttgtacacagatagtaccaaagcgaagtccacttcagagtgctaacaacgagataaatgacatacttcctccagtttcattgacggtatttgatttattaaaaaatgaatgattagaagatcataaaacaagaatgagggatgacgcagctatagatcttaattttagtttacacaaccaattataacatgctcttaaagcgacatctattgccaagcttttgctagggttatatatgtcaagttgagagttgttatacgggtggccatttttgtaaccttaggccccgtacgtaatctttttatttttattgttaataatgtagatcacagtctgagtttaatctaacttatttaatgttaaaaaaaaaaaaaaa

SEQ ID NO: 49181 - DNA, 272 bp, Glycine max
  Clone ID: PAT_MRT3847_15418C.1
agccaaggtccgggcttatattttgatattggaaagaaggccagagatgttcttcacaaggactatgctcaacaatcaccaatccactttaactacagattcttgaactggaatttagatctctcctgtcaagaagaactggtgcatggactaaggggccttttcacatgtaacatacctgactctgggaagttggaaattcaacacttgagtagattcagtggatttagtgcaagcattggattatcgggagaggcagaaaaaggatataa

SEQ ID NO: 49182 - DNA, 115 bp, Glycine max
  Clone ID: PAT_MRT3847_15419C.1
ttgtttttttacaggttcctcttatcttattcgctgcgtcttacgagcgtaacatcaagtctttctcatttcactacaaggttaccctctctcttggcgtccttttgatcttacg

SEQ ID NO: 49183 - DNA, 370 bp, Glycine max
  Clone ID: PAT_MRT3847_1541C.1
atatttcgcactcgcatcgatcctgcgagttaaagttatgtctatctgaacgggccaatagctactcctgtgaacaggtgagagtctcgaattataatgcgtcagaatcggacctatcttgtttaatagctgatgaccacttggaatttcttaagagcttcaattgctaaatttcgagcgactcgatatattatgcgcctgaatcgggcctccgagtgaaaagttatgtccatttgtaatgctcacgagcttccattgttcaaattagagcgtctcgatatattatgcgcctaaatcggaccttcacgtgaaaagtattgattcattgaatttcatcgagagcattcattttttaaatttcaacgtctcg

SEQ ID NO: 49184 - DNA, 423 bp, Glycine max
  Clone ID: PAT_MRT3847_15420C.1
agctatgtcttcgcatgcacccgcacgtcagctcggaattcggctcgagttttgctttcaaaagatgttattttacaaaagtgcttgtgagtatcgggtctctccagtgtgtttgttcttcttctctttcaagggtagatttctgaagaagaagaaaacccttacaaatctaactccgattgaactttgacagcgttacaccctctacccccagaattgattcattccgctgggcgaggaccctgatatttactacacatggaaagtgacatataggcccatcgcccctatgatcgtgaacatctccgaccactacaccaatggcacagttcacatgaacccaacccacgcgccaccgaacaccaccaccaacaacaacaacttcaacagccgcgacgggccccttttgtcgacgctgcaccc

SEQ ID NO: 49185 - DNA, 266 bp, Glycine max
  unsure (1)..(266): unsure at all n locations
  Clone ID: PAT_MRT3847_15421C.1
gnaatcgcaatatctgttatttccttccatatacgagcttgagcctcgagctattgatgctttgaaatccgagttctctatacccatttacactgttggccctgccataccttcttttggnaatagcctcattgatgacattggctacttccaatggcttgcacaaccaaccctctgggctctgtattgtacatctctcaagggnagtttctttcgttttcccaatgaaacaaatgatgaattgcggccggtgttcgcgaaagtgg

SEQ ID NO: 49186 - DNA, 2121 bp, Glycine max
  Clone ID: PAT_MRT3847_15422C.1
actatcaatcaatactagttaaatgccaaaagtaaaccaagtccactattttagaggtccttacacttactgatggcaatgcttcataacatcccctgccaaaggggttttacaatgggaaggattacacaggaaagcatacagaaaatgatttgatattgagacaaaatgattagtgaaggaacctaggcttaatcagacaaaaccaagccaaatggtatggttaaactttaatagactgcatatataatttttgctatatacaaatggcttggaacctgaaaatcaaaagtaaaagataactagattgaaaagatctacacatacatacatatatagattgcaaagatctacagcctccggtgattggagaggcaatctagtaccattcttctcctacattgccagttgtatggttctatggcgatgaagagcaataataaaagttgaaagaaaaggaccagaaactggaggttgtggagtcaattgatcaaaaaagatggaaaaatgaattaattaattatcaaagtgaaagacattgtaccctgtcagggagattcctaggcaatggaactgcagtaacatattttagggggaacgatttttgagcattagtatttgcatcagaagatgatgaggcctctgccccatcattttgtccccgtccatggaacttggcaaatcgattgatgacagaatatctttccaaatcctgacattccactctcaagtccaaaattgaggctttgctatttaatctcaatatgatcatcttccaatttccttgctctatcaacaaagtctgtcactttcaaaatgtaatgatcaattttatcggatgatttgcacttaatatatcatctggcaaggttcttgaggaggcaaacggagtgtatcacatctggaccatgagattgaactgcatgcttctcctaatgctaatctggcaacagagtagaccacactctcatgatgcaacttcacatctgctacaagaactgcagctggaggagggataaggtccggctgcaaaagctgtgtagtgatcaattttatcggatgatttgcacttctctggcagcaggttcttgttgccaggaggcaaaagtgtatcacatctggaccatgagattgaactgcatgcttctcctaatgctaatctggcaactgagtagaccacactctcatgatgcaacttcacatctgctacaagaactgcagctggaggagggctaagtagttgctgcacaagctgtgtagtcaaggttcagctgcaggaggaagcaataacttggaaggcagatgctcacttgcaactgaagtaagcattggatcttgcccagcatcactgagactgttaacttgctccattgaattagcaagatgcaaactaccagattggttccttataattaaaggctgctccatatctttttgaggagtcactgtccgtacatcatacatttgcaacatcttaccatttttaaaagttccatactgctcaaaccatgatggagccatctgaggatttatcacagaatgctcacttctaacagaagttactttgttattattagcaacattaagagcatttctctgtccatatccaaccacctcctgagaagatgcactagtgtctcgtgcatcacctggctttgttgaaaaccttagcaagttcggatctgatggtggcactgaagaactattatctgacacatctttgactatgttattgtatccatatgactgttgtccacggttggaaatggaatctaccagttgtttgtccatcacattatcagaaaccttgaacctcttgacatctcgattactaggatcaatctccatatttttcatggactgaacttgatttagcatagagaaattatgatgcaagaaattgtttggtcttaaagacctgccaaaatcttcaatatctttagaggtagcagctgggcttgattgagatgtatcgggtgtatatttcacatgctccttcacttgtgaagcacttgcagtctcttcaacagcatcaacactctcaggcaatacccactgctcagaaaggttgcctttctctgaatcttcaatacctggtttctgcggacgcgttgtagtttc

SEQ ID NO: 49187 - DNA, 1620 bp, Glycine max
  Clone ID: PAT_MRT3847_15423C.1
ccgtgcgtaagctcggaattcggctcgagcgatactacttctatcgtccgaagaaaaagccgactccacgcgagcgaagaagaagagaaattagcaaaggagagagagaagagcgagcagaataaggtgtctctcttggactgattcggttcaatcgcatctctattctctactactcattcatttatctatctacctcttttctcttccttctctcccacccttaattaacacagaaaaaaaagaacatagttatttatttttggttcatggccgttcaagctcaatatccatccaatgtccttcttctaaacagcagcagaaacgggcaagaagagcatgagtattcttcattgcaaccacaaccaggaggagttgtactcttgaatcagcctcacatgttatacaacatcaatgacaatggaagtaacaataacaacaacaataccaattctcggaagagaggtagagaagacccgggtgttggcaacaacacaatcactgcagcttctaatgttatcgatcaattctctttacaatctcagcctccgcaacttgttcatctctctcagctccacaatcaccaccaacaacaaaataatgtggtgtccactggccttcgcttatccttcgatgaccaacactttcaacaacaacaaagactacaacttcatcaaaatgaatctcaacaacataggtcccactcttctgctttcttatctctattatcccaaggcttgggttctcaaatcaaacaacagcgcgatgagattgatcaattgctccatgcccagggagagcaactgcggcgggcattggcggagaagaggcagagacattaccgcgcgctgctgagcgcggcggaggaggcggtggcgcgacagctcagagagaaggaagcggaagtggaaatggccacgcgcaagaacgcggagttggaagcacgcgcggccaagctgagcgtggaggcccaggtgtggcaggctaaggcccgggcccaagaggctacggcagtctccctccagaccaaactgcagcagacgatactgtcccacggcggcgaagatcctgctgtcgtgggcgtttcatctgctgctgtagagggacaggcggaggacgcggagtccgcctacatcgaccccgaccgcgtggtggctgccacggcggcgcgtcccaaatgccgagggtgcgcaaagcgcgtggcctcggtggtcgttttgccgtgtcggcacttgtgcgtctgtacagaatgcgatgcgcatttccgagcgtgcccagtttgtctcaccccaaagaattcaaccgttgaagtttttctctcttaacaaccctcctaaatttacccaattgcccctccccttcctttttctttcttgtccataccaaaggaaaaattttctcataaaactataaataaattacatttttgtttctctcttgaattgacatggccaaggtgaaagtttgatttcggtatagttaaaattaagtttaccttctggtgatgtacatggccacgtggctagaagtggcatttttttttttactttttggttattatctctttcttctcctgaaatttctattgcataattaatatataatattcttttattggat

SEQ ID NO: 49188 - DNA, 494 bp, Glycine max
  Clone ID: PAT_MRT3847_15424C.1
ctcgagccgatggtggtcgagcttcaacacactggtgcacaccatatggcgactagtccacaccagaggaagaagtaatgcgttcttcatgatgatgattagcctttcatgttcgctccatccctttccatggctgtaacttccctctcctctgtatctcatctccatctcctctctattctttttcatctcttcacgcttctttctcttcaatccactctccctcctcttcaaacctactcaccctcatattcagaccctccgacgacatagacacaccgttcttcgacatcgtcacatcgctagacgacatcatattccaccctgacgagcccacatagggctctgcggagcctccggacgtctacgaggggcctccgtacactgacgacgaactcgtggagaccgacgacgagctctacggaccctactacgagctctactggcccctctacaacgacgtgtacgtgctggacaccaacgtgaacaaggag

SEQ ID NO: 49189 - DNA, 241 bp, Glycine max
  unsure (1)..(241): unsure at all n locations
  Clone ID: PAT_MRT3847_15425C.1
gagaagcgacggaagggagggggtatgaaacagaaacgggcgagacaccccaacagccangggcggncgagaaggacaaccaaagcagacaagcggggacaagacagaaccngcggacagaacnggcaccacaggggacgcaacgcaggcgaagggccaagaaacaggggaagaggaagccacaaagaaggcaccgcaagacaggagaaaaaagaacagggaacgccagganaggcgcaca

SEQ ID NO: 49190 - DNA, 309 bp, Glycine max
  Clone ID: PAT_MRT3847_15426C.1
ccgcaccactttagactattcctccaaaagagccctgcacctcaggtacctactcttttattgatggggatcctcttacttttcttgttgttcacccatcaacactctttgacaagtctcctcctcctctttcgtataccactttgactacaatcaccactcactcttctgttaattttaccccaaccacccgcgtgttgttcaccgactcacgccgattcagatcccccgttcctcgccgcttttgcttcccccttccgcgctgcgtttcatgcctccccaccctatactggaaataaaccgttttct

SEQ ID NO: 49191 - DNA, 333 bp, Glycine max
  Clone ID: PAT_MRT3847_15427C.1
gtgcggacaggaccgggagacacatgcgccctacccgaatgcctaatgacgaagtgctgcacatccctaaggagaggtttctttggcttccctgtgccgccatcacctatgagcttatccataatgactctctcagcagcggcaggctccacaaagagcataaagcccaagccgccagcgcgaccggttactcgagccctcatgaccacaggctgtatcacctgcccatacaacccaaaacattcctacagacgctcctgatgagagacccaagatattcccccaatgaagagctcgccacgatccgattccatctcatctcaaaattcacac

SEQ ID NO: 49192 - DNA, 787 bp, Glycine max
  unsure (1)..(787): unsure at all n locations
  Clone ID: PAT_MRT3847_15428C.1
tgaatatataattcccaaaactnacatacaagaattcgtttataaataaatgaaataaattctttcattttattttaagattgcaaagtgcaaacgtagttaagcgaggatgagagcatttagcatgacaaaaaaaacaggaagtacaganntctctgcagtcaaatagtatgctccagcttaacagttagcaggttgcttggacttggataaaaatagcaaaaagttacagcaatcaaaattttatattggtatttaatcatacatggttgactacaacttaagtaataaccaattggatcatcacaagnnnnnagttctttattaaaagcttacagttnnntttgtaataggaagttacttaggaacttgtccaagagatcagtgtctccaaaaaatagccacatattgaccataatcttggcttttgaggcaataccttcccatgaaagaaatccaattagttaccattaagaaaaaaatgtttaaaccaagttaccgtcccatggtagaaatgcacgattacgaaatagtcctgtcttcttctgcacgttttcttccacctccattgattgaagttattactggctgttaacgggtcgggtcgcgcagccggggatgttagttagatttagatagaaagggttgacccgacaggagtggctttgtgaagtgcactgctgcgtttacttggaaaaaaaaaataatcagaaacgcaaatgtcaagaatcacccaattccgagctctactactccgcggcaccaccaaccagcgctcccctctccg

SEQ ID NO: 49193 - DNA, 290 bp, Glycine max
  Clone ID: PAT_MRT3847_15429C.1
caacaggcgtcttcagcttttaacggaagacgaataaggatgcgaccggtttttcattgtagaagcctcacacacaacacacaaagaatttttcgcgttgcccaaaaggcatgtttacttggtccttcatccgccggttttgcggaatttaaaaaccgagtttttgaaccttcgcatacctgagttctttgaccgaagccaaaaaaattaagtcccatgttctatcaagagccaagttcccagcttcctgtcgcgtgcattccacgtcttacctactctatcgtgcaacc

SEQ ID NO: 49194 - DNA, 1855 bp, Glycine max
  Clone ID: PAT_MRT3847_1542C.1
gaaagacggcctggaggagaggcccgaggaggccgacgcccagcgccgcaaggaggctgccgccgacctatacgacaccttcgacatgcgtgttgaccggcactggagcgagaagaagctggaagagatgacagagagggattggcgtatcttcagagaagactataacatctcctacaagggttccaagattcctcgtcctatgaggagctggaatgagagcaaattgaccaacgagctcctgaaggcggttgagaaggctggctataaaaccccttctcctattcagatggctgccattccacttggtttgcagcagcgtgatgtcattggcattgccgagaccggttccgggaagaccgcggcttttgtgcttcctatgctgagttacatcacccgccttcctcccattagtgaagacaacgaggctgagggtccctatgctgttgtcatggcccccactcgcgagctcgcccagcagattgaggatgagaccgttaagtttgctcagtatcccgacctcctgtacggctgccggtcccccgaggggttgggcatcaaggtcctctccattgttggcggacagtccattgaggagctagggtttaagattaggcagggctgtgagattgtcattgccactcctggacgtttgattgattgtttggagcgccgctatgctgtgctcaaccagtgcaactatgttgttcttgatgaggccgatcgtatgattgacatggggtttgagccccaggtgatgggtgtcctcgatgccatgccttccagcaatctcaaaccggagaatgaggatgaggagcttgacgagaagaagatttaccgcaccacctatatgttcagcgccaccatgccacctgctgtggagaggcttgctaggaaatatttgaggaaccctgttgtggtcaccattggcactgctggaaaggcaactgatttgatcagccagcatgtgatcatgatgaaggaggccgagaagttttccaagcttcataggttgcttgatgagcttaacgacaagactgcgattgtgtttgttaacaccaagaagaatgcggatcatgttgccaagaatttggataaggatgggtatcgcgtgactactttgcacggagggaagtcgcaggagcagagggagatcagtcttgaagggtttaggaccaagagatataatgttcttgttgctactgatgttgctggacgtgggattgacatacctgatgtggctcatgtcatcaactatgatatgcctgggaatattgaaatgtacactcaccggattgggcgtactggtcgtgcaggaaagacgggtgtggctaccacattcttgactcttcacgactctgatgtcttctatgacctcaagcagatgcttattcaaagtaacagtcctgttccacctgaactggcaaggcacgaagcttcaaaattcaagccaggaactattccagacagaccacctagacgaaatgacactgtttttgcgcattagacagattttttttttgagctagccacttctttagaaggcatcaactattcaactttgcaggtcatatcaagttttctggtgtaatgaacattttgccagtgaggccctagcagcctaatctgctttttgtggttatatggtcctgtataaaatttaattacagcagctcttctattctggtattgttcgttgtccttgcttgtattcttcttagctagagttactactattctgcttattaattatttctaacaggaattgatagttgtagatgaggatatttgattaattttgtcatttggctttgaggtttctcatcttatgctacaatggttgtcttttctgatt

SEQ ID NO: 49195 - DNA, 638 bp, Glycine max
  unsure (1)..(638): unsure at all n locations
  Clone ID: PAT_MRT3847_15430C.1
ggtgaccgnctttcaccgtccatgtgtgtgtaggccctttgattataaaatttgtaaataagtttatattcattcaaggttttgtttttcatcaatcatcatagcgaaagaaaagtcttgtaattttcttttgggttatcattataatcgatctttcgctctccggtcaaattcagatatatttccacgatcctttaagtcggcgacttaatcaaatttaaaattctgtcttttttctctctccaataacgtattctgaaagtatatccaaaccttctttcgcagacttagcgtgatccatcaggatttaatttgatttgcattgtattggaaagacaaatggcgatgttgagaagatatgttacagctagtgctattgcattatttgcacttttgctgttgttggttacttgcaaccttaacatggctttggcctcttctggaggcgtgatgggagggaatttcttcgattcggattcggagtcttcctcctcagaatcatacactagggattcagaatcatacagaatggagcatcatcctcatcgttattatgatgccccttctcctgacaccgatgctgcaaagggaagtcacagtggactcgtgctttttctgatttttgcatcgggtatgtt

SEQ ID NO: 49196 - DNA, 385 bp, Glycine max
  Clone ID: PAT_MRT3847_15431C.1
ggctcgagctttattcttttgatcctttctctctactactctgagtggtgatgaggtttgaagttgaatgctatgtctctctcaaccgctctatacgccagagagagaaaggtctgttctctgacctgcaaaggtcttgctgaggtagcaactgatgtagaggatgctcctgcaagcgaggcaacggctggggaggacgaacgatgctcccagacttgggctacacggtgtcaaccaccaccgacaccttggctgtgggagtggcacctgttgagggtcaattcgaggtggctgaaatgggtgcgcacgatgagaacgacggctgagaacgtgcaccaaactggtcctgcgacccctgcactagcaggtgaggtgttggcagagc

SEQ ID NO: 49197 - DNA, 115 bp, Glycine max
  unsure (1)..(115): unsure at all n locations
  Clone ID: PAT_MRT3847_15432C.1
cggtcggagctgcggtcgtttgcgcngcggcggcgtgtgctgcngnggcgctggtggtgcgccaccgcatnangagctccggaaannngggtcgcgtggtggctantgtgaaana

SEQ ID NO: 49198 - DNA, 299 bp, Glycine max
  Clone ID: PAT_MRT3847_15433C.1
ggcacaagtttgttgagatatcgagaagcaataagatggtgtggaaagtgcatgggccgttggttcctacattcttggaattatggaacagtgacagtgcaaaccatcaaaaatttcccctcccaaataaaactgggttaggggggccgtacaccagtaatgtaacatgtaacatttgggggttccgtgtgaacgcaaaaaatgtattgaattggcacaatgcccctacaatttgctgaaactacatagggaattatctactgcgaaaccaatatatttcagacccaaacacatttacc

SEQ ID NO: 49199 - DNA, 281 bp, Glycine max
  unsure (1)..(281): unsure at all n locations
  Clone ID: PAT_MRT3847_15434C.1
tgcccactgtattccatgattcaacatgtaggtattgtaagagcattttctaatagaagtgttcactagtgacattatttttaaagattttttttcattttttattttatgttaagattttacattattttttaagtccagtaaaaaatcaccttttaatatttattttaaaataattaattatattgtttttaattgcaaaaaaattaattaataattaaaatatttattcatggagataatttaaacttactataacaatatccttaattttaaaaanc

SEQ ID NO: 49200 - DNA, 200 bp, Glycine max
  Clone ID: PAT_MRT3847_15435C.1
caccgcactaatatcatgttgcgtgttgctttcccacaaaaactctgtcaacataggggggggtccattaccttcttacaagcgacaatcttctctttgactccttccgttacaaggacattgacaatggaatgctgtcacaatttgacggtaaaattgttgctacactagcagctgatgtatacattagggcaaaccct

SEQ ID NO: 49201 - DNA, 1003 bp, Glycine max
  unsure (1)..(1003): unsure at all n locations
  Clone ID: PAT_MRT3847_15436C.1
agcgcttgaattcaagcgcttgaattcaagccaaaggtttcactcccatgcctaggaaatgtaaatctgcagaaccccaagttgctggggcaaatgaagatcaagaagatgacaacaatactacagagctggagaagaaattgtataaggaagttaagataatcattttaacaaggcaaaggcaaccccacaaacagaacctaaaataaacaaggaggccaacaaagataatgggaacaacattgctgcccaaacattcaccttcagggaactggctgctgtcacaaagaacttcaggcaggaatgcctaataggtgaaggtggttttggaagagtttataaaggaagacttgaaaaaaccaaccaggaagtagctgtgaagcaacttgacaggaatggattacaagggaatagagagtttcttgttgaagttttaatgttgagcctcttgcaccatcaaaatctagtgaatctaattggatattgtgctgatggagatcagagattattggtgtatgagtacatgccattgggagctctngaggatcatctgcttgatcttcaaccacaacaaaagcctctagattggttcatcagaatgaaaatagctttggatgctgcagaatgtctagaatatgtgcatgataatgcgaatcctccggtcatctaccgcgacttaaaatcctccaacatcttgctggacaaagagttcaatgcaaaactctctgattttggactagcaaagttgttgccaacaggggacaagtctcatgtctcttcaagagtaatgggtacttatggatattgtgcacctgagtatcaaagaactggtcagcttactgtaaaatcagatgtgtacagctttggagttgttttgcttgaattgatcactggaaggagagccattgataacacaagaccaacccgggagcaaaatctagtttcttgggcatatcccagtattcaaggaccctcccagatacccagaattaccagaccccca

SEQ ID NO: 49202 - DNA, 267 bp, Glycine max
  Clone ID: PAT_MRT3847_15437C.1
acaaaatcaccacctccaaagtcttctctatttagaatcatctaatctaactgagtattctggtccttttcgagcagaatgccgactaacaatacacaattactaaagaaccacattctcattatgaactacgctgactaccagaaccggcatcttctgttcaaggaactacacatcttattactcacaaaatactcctgatgcttatctactaccttttctaggcaatattcatcgactgcaccaaatacctatcacacatccaag

SEQ ID NO: 49203 - DNA, 320 bp, Glycine max
  Clone ID: PAT_MRT3847_15438C.1
gcacgattagcttgttgtttggagcgatccgaggacgactctgtaaacaggttgggttaccagcacatccttacacgtgatcaacttctcgctgacgccggccgttacaaggaaattgacaatggcatgcagtgtgaacttgacgggaactgcgttgttaaaggcgcacttgatgtagacattggtgccaacccttctgctgaaggtggaggagaatatgatggagttgatgatgcatctgttaacgttgttgacactgttgacacattcaaaattcaggagcaacccgcaatctgacaagaagcatgttgttaccgtca

SEQ ID NO: 49204 - DNA, 237 bp, Glycine max
  Clone ID: PAT_MRT3847_15439C.1
ctcactctttcgtccacgccagcgtcttctcggtctataaaaaacaaaaattaagatggacaataagcagcattaatcgctactaaaaacaattctacttctgctttagacagacaattattcctttcactcaaacctcttcctactcctataactaccataagcctctaccttcatcactatatgatcttacataacttacgtcattttcctttccattgcatccacctcttcact

SEQ ID NO: 49205 - DNA, 860 bp, Glycine max
  Clone ID: PAT_MRT3847_1543C.1
cggtcgcgtgggctcacattgtgctgctgcgccactcaggatggtggaacctgcatatactgtgacatctgacagtgaaaccactggtgaagaaaaatcgtctacttttcctgaaatagcaattggcattgatattggcacatcacaatgtagtgttgctgtgtggaatggctcccaagtggagcttttgaagaacacaaggaatcaaaagattatgaaatcatatgtaaccttcaaagataacatcccttctggtggagttagcagtcaactctcccatgaggacgagatgttgtctggagccacgattttcaacatgaaacgcttgattggaagagttgatactgaccctgttgtccatgcatgtaagaatctcccatttctagtgcagactttggacattggcgttcggccatttattgccgcattagtgaacaatatgtggagatccacgactccagaagaagtcctggcaatatttctggtggaattaagagcaatggctgaagctcagctgaaacgaagaataagaaatgtggttcttaccgtcccagtttcattcagtcgatttcagctaacccggatagaacgtgcttgtgccatggctggccttcatgttctcaggttgatgcctgaaccaacagctgtggctttgttatatggacagcaacaacagcagacttctcatgagaatatgggcagtggaactgagaaaattgctctcattttcagtatgggtgctggttattgtgatgttgctgtcactgctacagcgggtggagtatcacagattaaagccttggcaggaagtaccattggtggtgaagacttgcttcagaatatgatgcatcatctgctac

SEQ ID NO: 49206 - DNA, 295 bp, Glycine max
  Clone ID: PAT_MRT3847_15440C.1
ggctcgagtggaagtggttgtggatttggtgatggtggtggtgcaagaggagagcatggtggtggttatggtggtggccaaggaggtggggttggagcatgtggagggtatggtgatggtggagcacatggaggtgggtatggcggcgaccaaagtggtggagcacgcggagggtatagtgaaggggatccgaatggactaaccacactatgatatattatatcacggttaattcatgaaccgcgtggctattccgtccatggccttagtggggttctcccgatacctctaaaca

SEQ ID NO: 49207 - DNA, 487 bp, Glycine max
  Clone ID: PAT_MRT3847_15441C.1
ggctcgaggtaagcggcatgagagacatagattgctgtttctaagtatgcttacttgctcccctgttatctcacaggagcgtgtaactatggttttcattcaacgtactagcactcttgttttcttattgctccgtttcacagtaatatttgctctatgttattgaacaatggcatattcgatgttgcccccaaacgacaaatccgtcataaaaacattagcgaattgcgagtttcgatcgtaggcacaggattttcagggaggaaacccaacgggtcgattttgcaatggaaaaattccttctgacttaatagttgaacaattgggtattgtcgagtatttgcctgcatatttggatccgaatctcaatctagtgatcttgttaccggcgtctgctttgcctccggtgcttcagatacgatcctttgacacccaaataacgtcaagtctatcgttatctactcactagacatgttcagggaataca

SEQ ID NO: 49208 - DNA, 392 bp, Glycine max
  Clone ID: PAT_MRT3847_15442C.1
gccttagtagtaccctgagcccgctctcaccggggggggcacttataggacccggggggccacacaccaggcaagccatgaggcagaccccaagtctttagtggcatccggagacccgacagagacagcacgagtatccaaaaagcctgggaggataaggccctgcagataaacttgcaccaaacgagtcctgtccatgtgatacacactccaaggaaggaatcaagaatagatcccccgcaacatcttccagtggtggtcatgctcttgaagggcataatggagatgaaatctgccaaccatcagggaggaggagcattaaaccacagatctggcctcgggacatgcaggcacggctgatttggtccaattggcttcacaacttcagaggg

SEQ ID NO: 49209 - DNA, 272 bp, Glycine max
  Clone ID: PAT_MRT3847_15443C.1
ttgtaaacaaacaatactagtgattcccctatactaatcttattttccaatacctcaaatgaaggagtttgctgtcctgcagcctcaccacccatcaccagctccactttgatttttcctctgtccaattaaatgcaactaaaccgtttttggtatctatctattaccattagggtacgtaataattaacaactcggtaaaccgactcttttactataattttcttaatcattatcctgagagacaatgactagcacacctaaaaaaggcac

SEQ ID NO: 49210 - DNA, 270 bp, Glycine max
  Clone ID: PAT_MRT3847_15444C.1
ggacaactctgcttgcaacgatgcaaggtggtctagactgcacgggaccgggtgatcacgttattgttgtcaaaatcacaaccctcaacactaagtgtgcatattggctaacatgccgccttctactttatactatggtgcgcaccattactacgtgcattatactccaaactctttcgaagcaaaaggctaccttgagaacaccaaactacatagagaggggcaagcaaagatcttgactggtgtctgtcgcccttctgcgttggggca

SEQ ID NO: 49211 - DNA, 647 bp, Glycine max
  Clone ID: PAT_MRT3847_15445C.1
cccacgcgtccgtacggctgcgagaagacgacagaaggggaatactctgaatcagtttttagtattcacactccttcatcattaaagatgtcttcccattccaagacggtaaaagcgcaaagtccagtgtcaaacggcgaacaagtcgaaattggcatctcggaggaagaccaattagaagagttggagaagaaagattcattgtctgtgactagccaattgtgcataaaaccaattcggaactcagagaaactggataaggaaatggttctgcggcgaattcgtcatcggaagcggatgaataaggtgcgatctgcagtgggagccttcctattctccaccagcacagccgatgcatctgctcagggaaagaagtgggtcgatgatgcatttgctgccttgtaaattactattataatctttcctttctaaactaaatgtaacaatatttcttagttcttcgcttcgcttttggccttaattagtgttatctatgtattattgggaaattgtaataaccttatgctaccctcttagtttctggctttctgctagttcactcctaatattggatgttgtactaagaaagcttctttatgttaattttcattttcattcaatataaactttattttttgttttagcac

SEQ ID NO: 49212 - DNA, 252 bp, Glycine max
  Clone ID: PAT_MRT3847_15446C.1
gttacatatacaaaccctctggggggggctgtgtacttgagctaatagcattggtggcgcactaaacggacgtgaagagagaatgatgtacaagactgctatgtgtgcatcggttctcagagcactgattgtgggagaagtcgagcccatggctcatgctgacatgacttgcaacccaacacaatagactccttgatttacgacactgtaccgaggcactgcaccttcgcgtgctcgttggccaaatctaca

SEQ ID NO: 49213 - DNA, 460 bp, Glycine max
  Clone ID: PAT_MRT3847_15447C.1
tttatgatgatggtgttgttgtgggtttagatttgctatgttgcttgttaaacggctaccttctatgttatgacaatgatatgatacgtcatacatccaatctagtaagttgcgattgtttatttatggtatgcggggtgtggggaagaagaggggtatataagtttcagccgtctaattaatgaactttaattgtgacattccttttctgtttccccttttatagctccatactctattgtgattgaatccgtttttcttttaaggaaagttgtagtgtttattgtttagtggctttttatgccatgtgtctattactgatgcactttttttttgacgtttttaccgatgcacctttagataggagaaaaaggaaaaacatttattctgtgtcattaactattactgtgagaagttggtttatgttaaaatttcacttaattggctcgtgacttttcac

SEQ ID NO: 49214 - DNA, 350 bp, Glycine max
  Clone ID: PAT_MRT3847_15448C.1
gaccaccgaaggggaactgaaacaacaaatattagacatcgatcggttaggttacttgctcgaattgcctcgaatcgctaaattggaattagattaggtaaaccgcaacgagtaatctatcgcctcgaactggatagctctcaggcaagaggttcagacgctgattacagcaacaagcggttggtgctcacactgcatgactcactacactccggcgactcatacgccgtcgtaaacatcgtcgccggcgacctcaagtggtggatacatggtccgacctcacaccagtgtctgatgggcatgctcaccgtcaactgcgctgtcgacaactgcttccacttccttacgga

SEQ ID NO: 49215 - DNA, 229 bp, Glycine max
  Clone ID: PAT_MRT3847_15449C.1
gttctagatcgcgggcggtcgcccttttttttttggacatgattgatatgctgttattcaagtgcctcgtgatttcttggctgctcgtttagtctaagagattatcccaatgcatattacaagccaaaatattgtctgcacctgccttgttcaccataaatattcaacctgccagaaagtttgagccaccattttcaaaggtttgcctcatcagcgcaaattttttaag

SEQ ID NO: 49216 - DNA, 553 bp, Glycine max
  unsure (1)..(553): unsure at all n locations
  Clone ID: PAT_MRT3847_1544C.1
cagccatttttgatcggtgaagttggggcgttgagaatcggagaaggggaatggagcagcacaagaatgagagccatacacaaacgtctttacccctttctcctttcactcaaccaatccgttgtatagtcaaactcggaggagctgcaatcacttccaaaaatgaattagagatgataaatgaggagattcttcagaaggtttcagagcagctgagggaagcaatggttgcatcttctgagaagcctcctgggatggattggagcaagagacctggagcttcagagattttctgtaacccagaagaatttggggatcattctgctattgactgtagccctttcattgttgttcatggagcaggttcttttgggcacttccaagctagcaaatctggtgtccacaaggggcaactgaataaacctcttgtcaaaggtggctttgttgctacccgaatatctgtaaccactcttaatcttgaaattgttagagcactancccgagagggcattccttcaattggaatgtcacctttctcatgtggatgggtcac

SEQ ID NO: 49217 - DNA, 491 bp, Glycine max
  Clone ID: PAT_MRT3847_15450C.1
cttgtttttttttttttttttttttttttttttttttttttttttttttttttttttttttttttttttttttttttttttggaaaaactaaaaaaaaaccttttttttttatggaggggggggaccctaccgccctagcttcatgtccccccagacgggggggggggctctgaaatttttcagggagaaaaaccctccctttagtcagaaacaaaaacaacccaccatgttttgtttgcatgttttgtcgagtacctcaccttcccgtgctcccgagagaaaaagaaaaaaggacaaacactaaaccccaggagggggacccaccctttctacacaaaggcggaaaataataagaaaacccgggggggcaaaaccgtcacccaaaacttggacggccgaaatggcgcggggcccttttcgaactgaagcgaatcaacggccaggggcatgttctcttgggcaggactaccctgggacctcggagggggcc

SEQ ID NO: 49218 - DNA, 407 bp, Glycine max
  Clone ID: PAT_MRT3847_15451C.1
aaaggaaccttaactttacattcccccaattataaggccccaattttaaggctctgaactcaaggtgaaagctccaaaaaccactggtcagggccaaataagggccccaggaaaatgccacaccattgggagaacattttttattcaaaggttatttatggggaactccaaacattcaaaacttaaggcatccaaaaacttcaacaaggccttttaaatgctcaaaggaaaagttgggggggcatagggataaaaaaaattcccctttttataaacaaggaacttggggaaattccgtttgaagccctccccaagggggccccctttggtggaatttagaaatttgccccggggacacaccttgtgccctttcaaattaaccttggtaaaaacgggaaacccaccct

SEQ ID NO: 49219 - DNA, 330 bp, Glycine max
  Clone ID: PAT_MRT3847_15452C.1
aaattcatcaaatccttcttcatttggtttactgccaataattcatggactaggtctcaaatttgaaatgggtcttatatatcaaaacaacacttactatagaatatattaccctccattatatccttcccactaacttttttcatatctttacatatttgtctataaatatcttcttgtaacaatttctactttttacatgattcaacatccatatttcttcattactctttctaattctcatcaaatgattcaacacttgaatctttacctacacatttctttttatatatcaaatttaattaattcaatgatatagtaaaatcattt

SEQ ID NO: 49220 - DNA, 542 bp, Glycine max
  Clone ID: PAT_MRT3847_15453C.1
tatttttaaaaaaaaaaaaaatacaccttttgttaaactcctgcatacatcattaatgacatataaagcacgaaagctagaaacatagggacataaataagaggatacgaataacacccttaatttgtattcctaatttaacagttgctgcacctggctagaaatgaatatgaatgatatctgctacttaggttgtaatgttgtcatccttgttagaccacatggttcgcaattatttatcctgcggttgttcttatacgcagcataatctatgatgtaaagaaccacaagggttaccatgacaggaatattaaagacggaaaccttccttcaacttttctttagagtagccaacacaccagccttgcatgagtcacagtcatagcaaaacaagtgttggtcattgctccacctagtgcagtctgggttgcttcccaccaccactcctttttttggcctccacaccgtctcgttctcatacacatacccacactctctctggggcttgcagaatccacactgaataagaaagagcttcctga

SEQ ID NO: 49221 - DNA, 161 bp, Glycine max
  Clone ID: PAT_MRT3847_15454C.1
ggccgatagaagtttgaagatccaagcacaaacatagagaaacgagggggaatgcaaccgaacaaaacacattaactcccatatccaaacattcatcctcaaacctcctttataaaaaaaccaaacatgcgcaccacggagagagagagaaatagaaagac

SEQ ID NO: 49222 - DNA, 935 bp, Glycine max
  Clone ID: PAT_MRT3847_15455C.1
aattcggctcgagtactgttcatttcttataacaactctcatattaagccactgttgaatgaaaaccttgggaatatgagaaggccttgcaaacattctaagaagaaacatgatctctttgaatgtctccctgacgatctccttgtccttattctttctaagctcagctccaccgcttcttctccttctgatttcatcaacatcatcttaacatgcaagaggttaaaccggttaggcctgcaccgtcttgtgttatccaaagctgcctctaaactattcgccataaaaccgaaaaattggtcggaatatgctcactcttttctcaaacactgcgctaacgccggtaacgtggatgcctgttacactctcggaatgatccgattttactgtttgaaaaatcgagggagcggactctcgttaatggcgaaggcggccatgaagctgcacgcgccggctctgtactcgctggcggtgattcagttcaacggcagcggcggttcgaagcgcgacaaggatctacgcgcgggcgtggccttgtcggcgcgtgcgtcgttactcggccacatcgacgcgcttcgggagttaggccattgccttcaagacggttacggcgtgcggcagaacgtcacggaggggaggcggctactcgtgcaggccaacgtgcgcgagctcgcgtacgtcctacgcgccgtggcgccttcgcgctgctacgagacctcgctgctgacgtggcgcgcgctgagatgtcagagaaacaacaacaacaacaacgcggtggtggcatgtcctttgctgagtgattatggttacaacgtggcggtgccggaggtgcagccggcgaattggtttctgagagagtggtttgagtccggtaagggaaaattggaggaaggactaaggctttgcgcgcacattgggtgtggccgaccggagac

SEQ ID NO: 49223 - DNA, 495 bp, Glycine max
  Clone ID: PAT_MRT3847_15456C.1
taaaacgagggggggcactaaaatattttatatttttttgtcattatggagcacaactaagtttattttgtttacttgtgtgttggggaccacatgttaaattctgtaaatatgtctcttactaatcttgttagtgtgcctgcaaccaatatgtataatgttcctgatatgcatgaagaacctaacattctcaatcctaatccatgtgttaatggattttatgccagtgaagaggagacttgtttgctggttttgataatggtttttctggaagtgaatatgagccagtggatgaggatggaaatgacaatgaagattatgaaagtgaaaacattagtgactttgaggaaacaatagatgtcactggaaataactatttagatgatgatattgaaaaaatttatgtggagagggggattaagtgccaaccatttaagaaggatccaaatggaaagatcaagcttgctaaggatcaattattttttaatgtagatc

SEQ ID NO: 49224 - DNA, 380 bp, Glycine max
  Clone ID: PAT_MRT3847_15457C.1
gagaaaaatcaatggttcaaattaattattcagtaaaattgaaaaatgctttgtcgtatgaaaattatctgaattgttttgtgtacaagctagattctcaaacgatatacttaaattgttttaatgtaaaaatctcacctcatcttatcataatctatagaataccaagctaattcagtatgtggcacgggcaacaaggtggtcctaagtttgctcaatctcattggtatatttcttgtgtaaaaaataggaaaagtgaactaatacaaacatcttaaaataattaaataatatgaatgtataataagagagaatgatactttcatcatataagtgatgatttttatgccacaagatgcatttaactttgcgtctttggg

SEQ ID NO: 49225 - DNA, 302 bp, Glycine max
  Clone ID: PAT_MRT3847_15458C.1
gaaaagagaagaagggtgggaagcaaatagggggatgatggaccgggaattacactggatagagcccaaatgggaaacgggccgggataggcggaaacaacggagaagggaaactgggggaagcacaaagaggaaagaaaggcaagaacttgaggaggacactaggaagagggaagaggaggagcgaagggaagagacagccgaatctgaggtagagggagaaaagaaagaacatggcgaagcagggaaggaaggaacaggtgaaaaaaaaacggtgggcggaaaggacaccaaggaagaag

SEQ ID NO: 49226 - DNA, 773 bp, Glycine max
  Clone ID: PAT_MRT3847_15459C.1
ccacccgtccgtccggaagtatttcccttttccaactttcattgccacaccttggtgagtagtgtggccaggctaaggtaggtatcttcacaataaggaatagttccattttcaaatgttgctctacagggtgcccctgcttctttttgtgtgcttctgttttgccaattctgctgctgtatctgctaatgaagcctctacaggaactgaggtgaccattgatgccaagccttcagataaaaagttaaaaggcacagagtcatttccaaaagagaaaaagacattttcaataccattttttaagcctgtaccaaagttggttccgattgttaaacctataccaatgccttttccaaagcctctacctctacctatcccagttttccagaagcctataccaaagtggattccagatgttaagcctataccaaagccaattcctatcccggtgttcaggcctgtcccagttccagtgaagccaataccaaagccatctccaacaattgagaagccaaagccatgtccaatagccaaaaaacctgtacctactccagtggttaagaagcctttaccaaagccaattcctattgttaagtcaatcccaaaaccatctccaacagtgaaaaaacctctacctatcccatcaattaaacctgtaccaaaatcaattccaatagctaagccaattcctatccccagtgttcaaacctatcccaaagccatttccaatagagcctttacctatttccagtattaagcctatacccacgcca

SEQ ID NO: 49227 - DNA, 701 bp, Glycine max
  Clone ID: PAT_MRT3847_1545C.1
aattcggctcgagacggctgcgagaagacgacagaagggccctccttctagatgtcctatgcaaagtcacccaatgaaaaatcagatgccacatcaccaaatttgcctagttccgagaacagattccaaacagggcaaagcagtttttttgcctcgtttcagaaaaccagtgttattatttggttcacgtttacaattacctcgcacaggttttacccctagtgtccagataaagtacatttccagctaagaacgcccagaatcagtcatgatacaaatataactataaaaatggcatttactaataatgtatccattctatatattattgccacatcaaatcgaaacaagcaaaacaattatttgatctcgtccaaatgatagcacatggaaaaagtcagcaaacattaccaagatatctaaataagcaaataaaataatcttaaatttcaacaaggtgcttacggaacaaaattgtcaaggaaagatgttctattttgcaagcccgatgtcaatgtatgacattctaagtgttacagtactctgacccagatgagatggattaaagaactcgaccatttgttttaaactttcaagtttcaatgcatggaaatccatccgacaaataaccttcattcacaaatccagagagacattacacgatcgcctcacagaatcagaatatataattacatattcac

SEQ ID NO: 49228 - DNA, 197 bp, Glycine max
  Clone ID: PAT_MRT3847_15460C.1
atataaatctgatttgaaacttgtttagtccttaaggaatcaggtaagaaggatcgggagttaggaaatttaaattctataaagaggcctattcaattgttgagtaaaaaaataactaaaaattgggctaaattcaggcctttttttttgcaggtatataaatttatttattttgtagaagctaccatttaaaattt

SEQ ID NO: 49229 - DNA, 267 bp, Glycine max
  unsure (1)..(267): unsure at all n locations
  Clone ID: PAT_MRT3847_15461C.1
cactactcacactactcttcctctttccaagccagagaaggagttttccattagaccnttgcaattgatcanacacccanttgancccttaaanaaagcaagaaatcaccctcgtccaagccanagtcctaaaggaataccccanancanccaaccatgtcttcttccactacgtngggctcgatgatcccgacaagnnccacgtnctnaagngggccttctccgggntcaaaannccagcccaangnanggncttcgttgtngcca

SEQ ID NO: 49230 - DNA, 373 bp, Glycine max
  Clone ID: PAT_MRT3847_15462C.1
tttttatttgttggctcgtgagcaaatggtagtggaactgcgatctctggggaccggatgtgaaaaccgcaaacaatagctgtttaaagctcaaacccgagattggaggcaagcctttccaacatattggaatacaacctttttaaggtagcgaaaaaaacttctgagagctgaccttatgctacgcgaatgattgctgttcccgctgtgagaccatatgctggacactctcacatatgatatctgactacgcgtcagagttaaacatttccatgatctttctgagtaaactggttaatgttagagtactggctgatgcaatcttggattgcatagactcactctgcttcccggtttatatgttcgagggtag

SEQ ID NO: 49231 - DNA, 3198 bp, Glycine max
  Clone ID: PAT_MRT3847_15463C.1
ctttccttcagctgcagcccccgttttgttacgaccgatgcgagctctgttgtgctgccaccgagctgccatttcaccattgtgacccattgatcggggaagtgccaccctctggtgaacccaacgctgccaaccgcatcgccacccaacttcacacgcgccaacatattctccagcttaccaaggtatgtctgcatgtccatgttctccagcttaatgctcattaagctggatggtttaattgccgaatattccactcttacgccctttactactgatgcagactttttacaaacagcacggacagttcttcatggtggttgctcttgctggacacataccagaccttgaggcagtccgtaaccagattttatcgagtcccatggttcctacctatgacttagttcaggaacagttgttgtgtctctccattccacatacctttgggcagaccctcttccacttctaccgaggattcctctgcccttgtctttcactcctctcattgtggaagacgaggtggaggacgtggtattcactgccactactgcaagaactggggtaaggagattttcacatcaaagctagagaattgtcctggtcaattaatgtgtcccaagtcaccacctctacctcatatattactatctctgctgctaaatataatgagcttctcaagcttcgagcagccaacaaacctgcatcacttgttacctctgtggctcaatctagtaatcctgtagcctttgtttctcaatcctcctatcttggaccttggattcttgattctaatgcctctaatcatatgactggtaaccaatctcttttctcttccttgactttttcggacacctttccttttgttactcttgcagatggctctcatattaaaatctagggcatcagacaaacacaccctcttcctcaactttcattaaattttgtcttatttgttcttggttatccttttaatttaacctctattagcaaactcacccgcactcttatttttctgtcctatttgttagtaatttcgttcttgaacaagatcgacgcactgaatggatgattggagcaggatatgagtctggaggattatatcaacttacacctcgggttgtttgtgtctcatctgcatttgcatgtattagttcccaatcattctaattttaagtcctttccatgcgagttgtgtcaactaggtaaacatactcgtatcagttatggctctcatgtcaataagggtgatgcgttaccttttgtcttagttcactccaatatttggggtctcaattgagtctattccaaattagattatttttattttgtcacatctatacaagatttctctcgttgtacttgggtttttctaatgaagaatcggtatgatgtttttttttctattttttgaagtttttccactaagattcaaaatcagtttgcctcctcaattaaaattttacgaactaataatgcaaaagaatatttgtcgtcccagtttcagtcctttttaaactcacataggattcttcatcaaacatcatgagcccatacaccacaacaaaatggtgttgcagaacgcaaaaaccgtcacttggtggaaacagcttgcacccttcttcttcactataatgtcccacttcgtttttgggggatgctcttcttactgattgtcatctgattaactgtataccttcatcggttctcaataatcagattccttattccatctaaatcctatacaggaccttcattatgttccccttcgtgtctctagaagtacatgttttgtccatgatctcactccaggtagaaataaactctgccaagtatctaaaatgtatttttctaggttactcctgtctccaaaagggttaccgatgcttgtctccttaactttaatggtacctggtctatgcaaatgttacattctttgagactactcttttcttttcttccaccattgaagatgtcctctagtggttccacctattgttccagcaccacttgttgctcatgctccaagttcacctccacctcctctactcacataccaccaacaaacacaagcactaccagcagcgccacctactgatcctccaacatcatctcctgctccaaacatttgtccaccaccaccgcctacactttaatttcccatctacacaaaggtgttcggtccactcataatcccaatcctttatatgcttttactcttaactttgattatttatctccctcctattactctcttatctcttctttggattttgtgtctattccaaagtctacacgtgaagccatggctaaccataattggcaacaaccgatgttggcagaaatggctgcgcaagatgccaacaacacatgggagcttgttcccttgcctcccaacaaatccactgttgggtgtcattggatctatacgatgaagatcgcaccatatggcactattgatcgctacaaagctcgcttagtggctaaaggatatattcagatttttggtcttgattattgtgacactttatcacctgtgaccaaaatgacctctattcatctttttcatgctatggctgcaatctgacattggcctcttcaccagttagacatcaaaaatgccttcttgcatggtcagttgcaagaagaggtgtacatggatcagccacccggttctatagtctctggtgactcccgccttatctataagcttcgccgctcaatctatggcttgaagcaatctccccgttcctggtttggtcatagttcagctctactctacttgagtttggtatgactcaatgtgaagctgatcactcagtatttttccttcattctaagtctagactatgcctctatcccattgtatatgttgataacatcgtcatcactggcgatgagtccgcaggtatcctacccctcaaatctcacaccttcatagtcacttttagactaaggacttgggccccctcaagtacttccttggcatcaaagttgctcaatcctcatctggaattgtcatttcctagcaaaattattcctgagtcatactgccatggatcctaatatgaagcttcttccaagtcagggggagccattcaaaggccctagaagatattgtcgtctagtaggcaagcttaattacctcactgtcactagaccagatatcacatttgcagttagtcaattcgtgaaggaatc

SEQ ID NO: 49232 - DNA, 342 bp, Glycine max
  Clone ID: PAT_MRT3847_15464C.1
ccacgcgtccggggatatatgttatgcttactcctcggaaggatgatactaagttggtgatactttcctttcccatgatctctacagcttattttacagcatatcaatatcttcatatcttggaggacttgagtgtaaaatcacatcaccacataaagaatttgaatttgtgcttattgacccgatccacccgtaagccaatgttttacgcgcatctttgaagaacctttttgaacatggaacgtgattgcccagcaacttggttgttttagggtgcatatcaaagctttgatttagatgcctagttacaaaattggaataaagagtcacttttcttttgtt

SEQ ID NO: 49233 - DNA, 210 bp, Glycine max
  Clone ID: PAT_MRT3847_15465C.1
ttctactaatttgaacggccgggctagacgaccacacaagttgaggtgtctcaagtaaccatagggtacgtgatggaaacgttcctcgtctcttacatttgatttcaggtatagcagcgcctaatatgctgaggatcaaggctttagcacgtacgtacgctcgtcgatttcgggatgcatctggtggctatgcacgacctcgtgatacgt

SEQ ID NO: 49234 - DNA, 235 bp, Glycine max
  Clone ID: PAT_MRT3847_15466C.1
gaaacgactaaaaataaactccgagttagtaaggcccaaagggcaaggccaatgtccaacagttcaattggaaagacataagacaaacaccttaaatgcgaggaaaataaataattaccaattagaacaagcaactccaactccaatctaataacgaatctgcccaaaatacaggaacaatcccatcctagaaccaccagtgtgtgcagaaattcaaccactacctgacaggacc

SEQ ID NO: 49235 - DNA, 156 bp, Glycine max
  unsure (1)..(156): unsure at all n locations
  Clone ID: PAT_MRT3847_15467C.1
gggagtttttaagcttaaactcttnttacctgaggaatatccantggctgccccaaaggttacgtntctgacanagatttatcatcccaacatcgacaagcttggtaggntatgcctcgncattctcaaggacanatggacccagcacttcagttc

SEQ ID NO: 49236 - DNA, 535 bp, Glycine max
  Clone ID: PAT_MRT3847_15468C.1
ttccaaggaaggctttcccgtcatcactgtatgacgtcctccttctttggggggggggggggggacataaccacttgggcgaggaggtataacgaaaacaggattaagaaagagataaccgacacacagaccagaaaaacaacataggggaataatagaaaccaaagataggaaacggaaaagcccgcaagtaatgtgttgaccggggacgtatagacctgcacgtgcacccggttgtgcggcaaaattgggggctttgcccgcggctgcaggccgggacgaatagcaaccaaggggtaaacgtagtgagagaggggcaagaatggcgactgttggtttggggcacaaaagacgtccaaaaattgccattaaaggcaggcagcataataagacgtgattggagcggatggaccgacggtggtaaaaggtggtaagattaacgaattataatgcgtggttgtgcccaaggtaagttgtagaaaacgtggcgtggttgcagtattttgtaagtttattggcgtaatggggcgaaaat

SEQ ID NO: 49237 - DNA, 525 bp, Glycine max
  unsure (1)..(525): unsure at all n locations
  Clone ID: PAT_MRT3847_15469C.1
acggtagcgtgtctgagaatggcgtgacgcagacgagcgagggtgcgactatgacctgcgacttcgatctccggcaatccgcggcgaggttcgtccagtaaaacggcgccgnagagcgggagctgcgacgctgggcggagtggcaatggagggcgagaacgcgagcaacaaggtgatcgagttgatgaaacgaaggtaattaggncccccaangnncccaattnncctttcgatacaggcctcgggaagaagcagactgcaacttggcgcggaggctgaagctttgacccgatgtcgggagatagggcatgaacaaagacccttccgatacatccacgcgcctgctcaggagttcaatcgtaggactctagatcgaaggaggagagcttactggctggcgacaatatgaaatctacaggacgtagtggaagcgtggggatttctagataactgatatatcagagaagtaaagagcggttgagttggttctggcccagttcagaagagctaaagggagggttgatg

SEQ ID NO: 49238 - DNA, 418 bp, Glycine max
  Clone ID: PAT_MRT3847_1546C.1
taatcataaaagctgtcatcaaaatactgattggaagattatctgcaatcagtggagaatttcttcattgtaaatcagtaccacctgtgtatgatgttgcttttagaggctaatgcggtgggaatgtagttggggcatcttctgtaggttccaaaattactcatgggcaacatcctctttccaaccaatatgagctgctgctgtttgagaattattccacatgaaaaattcttttattttgaggcggagctgattgtgccttgatgcttcaagcatgatgtattggaatcttgaaaatttgtgcgatttgtttgtattagttagatgaatgtgcttagtggccaacagtgaatatgttacttgtgctgatggaaaccttgattgggacacggttttaatgcccccatttttatttttt

SEQ ID NO: 49239 - DNA, 347 bp, Glycine max
  Clone ID: PAT_MRT3847_15470C.1
gttgggattacattcaagcaatcaccaacctctcaccaggcagattggtcttctgtgagcgacgaaggtggaaaggttttctacacacaccaactgccacgggagcgggtgttcattcacagacggatcccagaaacaagacggaggaaccctcccttgggaattaaaaagaaaccctttagccgatttcccttcttgctcgaaaaacaaactaggagggccatggcgccatggagaaaggaagccccactaactcgcgccgtgtgtttcttgaccccctggccaggttccatggttatttggacttgcctcgggagaaatagccaaaaccctttatatcaccaccc

SEQ ID NO: 49240 - DNA, 2296 bp, Glycine max
  Clone ID: PAT_MRT3847_15471C.1
cccacgcggaccccggcgtccgggaaccctggtttagccgccaggtggacctttctctctttcttccattccatcgcattgtatggtccccttttcatacacaacacaacacattccctcaacacaacactttccattttcaaacacccaccaccaccaccaccaccaccgcttttctctctctcgggttcggatctccgaccaccgccgcaccgcggaacgagcttccaaactcagaatccagatccctacttccacaaacaaacatgattgcgattccgtatttaactgccttaaccacctacttcagctacggcttgctcttcgccttcggccagttcagggatttcttccgcaaaatcttcgactggtgcagcgccaacaatcttcagggttacgcgccgatctgcttagggctcgaagatttctatattcgccgcttgtacctccgaattcaggactgttttgggagaccaattgcaagtgctcctgatgcatggtttgatgtagtcgaacgccactcgaatgataacaacaagacactgaaacggactgataaaataagtagatgccttaatttgggatcatacaactatcttggttttgcggcagcagatgaatactgcacgcctcgagtagttgatacgttgaagaagtattctccaagcacttgcagtacacgtgtggatgggggaacaactgtgcttcaccttgaattggaggagtgtgttgcaaactttgttgggaagccagctgctatagtttttggtatgggctatgtgacaaactctgctattcttccagtcttgatggggaagggaagtttgattattagtgattcattgaaccacaactccattgttaatggtgcacgaggatcaggagcaacaattcgcgtttttcaacataacgagccatctcatctagaagaagtgttgagagaacaaattgctgagggacaacctaggacacataggccttggaagaagataatggttattgtggaggggatatacagcatggaaggagagctttgcaaacttccagaggtcatagctgtatgtaaaaaatacaaggcttatacatatttggacgaagcacacagcattggagctgtgggcaagtcaggaagaggtgtttgtgagctcttgggtgtggatactgctgatgttgacattatgatgggaacattcaccaaatcttttggatcctgtggaggttacattgcaggatcgaaggaccttatccaacacttgaagtacgcttgccctgctcatctttatgcaacttcaatttcaccaccagctgcacaacaaataatatcatccataagagttattcttggagaggatggctccaatagaggtgcccagaaacttgcacaaattcgagagaatagcaacttttttaggtcagaactgcagaagatgggatttgaggttcttggggataatgattctccagtaatgccaatcatgctttacaacccggccaaaatccctgccttttcaagagagtgcctcaagcagaatgttgctgttgtgacagtggcatttcctgcaaccccactgctactggctagagcacgcatatgcatatctgcagctcattcaagggaagaccttatcaaagccttgcaggttattagcagagtgggtgatcttgttggcataaaatatttccctgctgaaccaacaaagcagcaacaagggggtaaatctgtgaagtttgattgagagagaagcttttctttaagcagaaaggggattagagactgctgaagatagagctgtagtgataagaaagcaatttgtttaaacaagggattggtttcaaactggctggtgttgttctgtatatgaattcgttgccatcttcggaagtgtggattttgcccggagcagctgatccatataattgttctcagattcaagtgaacgtctcttggagggaagtctgttcttattttgcccagtcattagataaatatgtataggtgcagtttggttatgcatttgaaacttacttttgcttaaacaagtaaaattgatgatacattggactgctcctttggaaagtgtataggccacttttgctatgttttttacattcaaagcaattggttgtctgcttgaattgtcatcatgtggacatgggtttctagtttcttcaaaagctgacggtcaaaatccaattttccgacccacatcttgttcatgatatttcatttgcccatttgataaaaaaaaaatataatacgatgagtctggcgttgctgattttttacttaaaaaaa

SEQ ID NO: 49241 - DNA, 367 bp, Glycine max
  Clone ID: PAT_MRT3847_15472C.1
tagccttcttgagctggttcccaatttcaatatcatccctaatcatgctttggctattagctgcagggtagcagactctatattccgcccaagttctctcttccaacacatgttcatcttattggaaattcttagaaagtgtcaatagaaaagaaagtagagtagatgcttacactcatttaaattgattccttcatttctaccggaaatgggacagtactggcagattgtaaaaactaaaaatgcatacatgatttttccatgcaaagaaattaggctaccaaagtgttatgctgatttcctgatcctgtgattgaaggttaaacttttatgtttaccgggaattgggttgctaacatatgttttt

SEQ ID NO: 49242 - DNA, 1098 bp, Glycine max
  Clone ID: PAT_MRT3847_15473C.1
gaagaaatggtatttatattcttttaaaatgtaatatttctaagaaatatacatcccctattccaaaatttatcaagggagctcaataaaaaaaatacatatctgatatctccttatgcttgacaagcagcattggatgatcactttacctcggtggatgtagtttcgtcatatacttcatctagatgatttttgagaaggttactaagatactctacttgttcgaatgctccttgaagttcctcccactcctgagaggatactgatgcgactttccaaccagcagcagtgatgtaacggcgttttaacatggtatgtcctaacggtacaccagtatttcttgagaaatgagttggaccatcaatctccagagcaagcttcttatcaacaatcacagcatccaaagtgtaaccatccacaacatattctttgacccattcaaggccggtgctaaggagaaggcgtccaacctctttctgaaacgatgaagttattttctgattaaaccttttagtctttctggcaagagcaactttgtcctcaaggtcgccacataatgacaactgaagatgtgggaattcaagcttcaagcactggtttacaagatgaacctgagaagcaaacatgatatcctccctatacagctctgaaatccttcgctcctcataatggctgagagttttccagacatgagagaagaaactcctatccatttgtccaaagacggcataggaccaagctatagtcccaagctgatccctagttaaagttagtacaggagatccatttgaggcaccacttctatctaccctgatttgttcatgattatttgatgtcctttcacctgtacaacctctcaattggctatgatctttgaagactatgtctaaagaatcaaatatagggtcagcaggctcatatagagaagcaaaagcccacaatagctgagcaagttcttgttcttggaaagtgtgaattatgtccgaagccctttctgacaaaacagagaaaagatcaggagcagagtgctgcattgcggcaaaagcacctgcaatattagcaatgttttgagagttgaattccccaaccttggtcagc

SEQ ID NO: 49243 - DNA, 448 bp, Glycine max
  Clone ID: PAT_MRT3847_15474C.1
cggacgcgttggtcggacgcgtgggcccggtcattgtaaaggcggcatacggtggcggggggcgaggaatgctcaaaatcgaaatagaggaagagattgtagatgcgttcaaccgcgccttttccgaagctttggccgcgttgggtgatggttaactgtttgtcgagaaattcgtggaaagacctctgcatatggaagtgcaaataattggggaccattacggaaatttggtgcatttgctcgagagggactgatctgtgcatcgacggcatcagaaggtcgttgaactggcaccggcacctgttttggatccggcaatacgtcagctaatgatggacgatgctttgaaattgacacgccatgttgggtaccaaaacgtttgaactgtcgagtctttgctggacactaaggggcattattacttcatggtagtgaatgcacgttttca

SEQ ID NO: 49244 - DNA, 220 bp, Glycine max
  Clone ID: PAT_MRT3847_15475C.1
ttacgtggtccgtgtgaaactgggttcaccgaaccagctattttttatggttctggataccagtaccgataaggcttgggtaccgtgtaccggctgcactggttgctctttctactacacctattattcccctaatgccttcaccacttatggcggcgccggaacttgctactgccccgcgttgtgcccatgctctcggtgccctcccttgtccctacaa

SEQ ID NO: 49245 - DNA, 122 bp, Glycine max
  Clone ID: PAT_MRT3847_15476C.1
catttctgtttccgcttcttcattttatttcagcacaagtaattatagaaagagactttattcctcacacagacgaaaacatatatctttcactttttctgcatccgacgctagatgaggtg

SEQ ID NO: 49246 - DNA, 478 bp, Glycine max
  unsure (1)..(478): unsure at all n locations
  Clone ID: PAT_MRT3847_15477C.1
gagccacagacacncacaccaagggcccaaaggccaaaaaaaggggaacccggaaaaagggacaaaaagaaaanaagcancaccacnncccggccacagacaaaccnaccnacgaagacaagaaaagaaaaaaattttgttttctncncaacannncngggcccgccacanccagaggggggccacacannacacgacccaccaagcccgccgaananacccnccaanccaaacccaccncgganccaggacaacanagnncgcacgacaggacacagacaccaaaaaagccacagcaaaaacacaacccaccaccaaagcaccagcccgggacccagaagcacccccggggggcaagggggggaccagacccagcagaaccacccgncgananccacancggccggaaggggccgggggacgcaaggancgacccaccaanccaaacaccagaccggcgcccggggggggccacaac

SEQ ID NO: 49247 - DNA, 149 bp, Glycine max
  Clone ID: PAT_MRT3847_15478C.1
tccggaattcccggggcgacccacgcgtccgcccactcgtacgatccgatactaaggtgacttcttatgggagtgtctccgcattcgggagggctcttcactctgttgtggacatcctattctatttgcttttctaataaggcctttgc

SEQ ID NO: 49248 - DNA, 738 bp, Glycine max
  unsure (1)..(738): unsure at all n locations
  Clone ID: PAT_MRT3847_15479C.1
ccattcctaaactgcattatctctctactttcgtccggagagattcaagtgaaggttttgacccaaaaataaagtacctttggtacttgccacccaaagccagagttcgaggcattaaaataggcaacttttgcagaacctccaccaccaccccattttttgagcacagcaacagacacagatacaaaaccaacctttattcatttcccacactcactcactcaaaccgatcccataagaacaaaaagagaagatgggttgctgccactccaaaatagagagggaagaaacggtgtcgcgttgcaaagccagaaagcgttacatgaagcagttcgtgcaagcaagacacgctttttccgctgcacatgttatgtacattcgctcccttcgcgccactggttctgcactctttcagttcgcaaatgccgaaaccaccgtcctccaccaccaccttccgtcgcgccctcatcccattctcccgccgccgccgcctagaacccccaccccgatgccgccgccacctcctcctccgatgagccctagttcctacacgtggacgtcggacaccacctcctctcccgcccttcctcagccgccgccgcctcctcctcctncggtggcgtcctccgcctgggacttctgggacccgttcatgcctgtggtggcttcccggttggcaacggaggaggagtgggaggcgacgaccaccacgggatcggaggtggtggtgatggcggc

SEQ ID NO: 49249 - DNA, 266 bp, Glycine max
  Clone ID: PAT_MRT3847_1547C.1
tgaaaacaaaaaataaaatatttgttttctgctagatgcaaaactgactaagcatgtatattttaccaaacttatgtattttttgaagttatgcactataaaatgttaaaacattttttgctgggacaaaatgttaagtaatttgcagtatgtagtgcccccagtattgggatttttgagctaatgggcagcagtcagctgggggcttctgagggatgctcatctttaacagtctccctcatgtacttttgctgttttacacagag

SEQ ID NO: 49250 - DNA, 656 bp, Glycine max
  unsure (1)..(656): unsure at all n locations
  Clone ID: PAT_MRT3847_15480C.1
gttagaatcgcccacaagacgccctgatgacgtgaaacagactcaccggttacctcttcctccaataacagcccctaaatcattgtccattttctccaacctattctgcatcgactactccttcagcccctcgtagtcccggcagagcagaaaatccatcatgccctggctcgcgctggaaaaaggggcagctgcttggaagggggacatttgggcatgtatatcttggttttaacagtgaatgtggtgagatgtgtgcaatgaaggaggtaacccttttttctgatgatgctaaatcaagggaaagtgcgcagcaacttggccaagaaattgcattgcttagtcacctgcggcatccaaatattgtccagtattatggatctgagacggtagatgacagactttatgtatacttggagtatgtctctggtgggtcaatctataagctgcttcaacagtatggccagttaggtgaaattgctattcgtaattatacttcggcaattctattaggactngcgtatttgcacaccaagaacactgttcacagggacattaaaggagcaaacatattggtggaccctagtgggcggataaaaattgcagatttttggatggcaaagcatataagcgggtgctctggtccattttctttt

SEQ ID NO: 49251 - DNA, 573 bp, Glycine max
  Clone ID: PAT_MRT3847_15481C.1
tacagaagtagaattagttccagcatgttgagaaggagtgggtttattaggagaaggtgaaacaagaggaatatgagcagtaggtaaaaaatcactcttagaagaagtgacagagttggataaagatgaaaaagatcactgtaaggatatttaagctcattgaagataacatctttggaaacatataatttgccattaggagagagacacttgtagcctttgtgaggagtggaataaccaaggaacaaacactcatgtgacctgaaatcaagtttgtgtttgttatagggtctaagaaaaggatagcaagaacatccaaagttcctcaaaaaattgtaattaggtaacttgttgaaaacagtacaaggaacttgaaatttaagagaggtagtgggaagtctgtttatcaaataaacaatagtttggaaggcaaaatcccaaaattttaaagggagggaagcttgtttgagaagagtgaggcctaactcaacgatatgcctgtattttctttccacaacaccattttgatgatgtgtgtgaggacaaattaacttgtgaatgatcccatgggtt

SEQ ID NO: 49252 - DNA, 444 bp, Glycine max
  Clone ID: PAT_MRT3847_15482C.1
cggctgcgagaagacgacagaagggactagtagttttctcctgataaaataattatgcttccttcttcagcaataaaattttccatatatagcttagttcacaatcgttatggggtttttgagaagattaaacttttggtatttagatgatcaaaataataggttgaagttgcattcattacagtgatgcttacaacccagttcctgggctgatggaaggggtgccctcgtcaggggattataacggagggtttgcatccaagcttatggtaagtaactgagctttaactcaagttgcaaatgtttaattctgatgattgtaccatttggaaatctttagtgtgaatagtcattacagtgggatgcaattaagccaaatttagaccgactaataatcattaatttcaacagttcaagcttgcaaaaatgcatcaactactcaca

SEQ ID NO: 49253 - DNA, 373 bp, Glycine max
  Clone ID: PAT_MRT3847_15483C.1
acaaaagccaaacaaagttacgcatttattcagaaaaaagcaagttataattttgggtggggctgccaaaagcaaagacagtgaactattccaacgattcgcggtctaaaaatctctacttctatctcctaaaggcaacaaaagaccttttaactagctacccttaacttgaatttactacacgtcgatgtatcaccctgaagaatgggaaacccctgctgatgaacaaattattcccatctctcattattcaccagtgcacaccatggcacctaaaggacaggctctacatgtatttccaaaataatacttgcgttatcgtaaatcccaaaggaaaaatcaaaggttctgctataactagtcccattggaaa

SEQ ID NO: 49254 - DNA, 254 bp, Glycine max
  Clone ID: PAT_MRT3847_15484C.1
ctcgagccgttcgaagtgcgcgaagaactcgggttgctacaacatcaagagatattgtagctgagaatgaactgtctgtggcttccaactcattagctcaggcatcagttcaccataaatatcatttggaggaggctgatgagtttgcagatgaaaatgttactagggctccaaaaaatgggtgtggcattccttggaattggtccctttcttcaaccttgaatcggatttaaaaataatactgtttttggttg

SEQ ID NO: 49255 - DNA, 360 bp, Glycine max
  Clone ID: PAT_MRT3847_15485C.1
cgctgttcgattcgagttgggacggtagctaccgctctaaaccgtggagcacgctattactggagtccaaattctgattccgggaggattgcggattatgggtccacacgttcgatcgaagatgcttagggttcatcgaatttctgagagaggatatcgacctagtcgagttgaaatactgaaagccgttttcagtcccagtgcgatagatcgccaaacagctgtgcaaagctgagccaatcatgctctatgcacctcaccaccagctgaagtaggcgcaaatgattgtaagactctacttcgataggggtgtacgacaccgggcggagtctacataactagaactttgccgccagagac

SEQ ID NO: 49256 - DNA, 527 bp, Glycine max
  Clone ID: PAT_MRT3847_15486C.1
tagataagaaaatacattttcctttcagcttattgattagttacaaaaagaaattttcaaagcagtgtgtgtaggcctactttatatatgcaacatcaacaaactaagctaagaaactgcccttttttccttctctctttatctcccaaaaaaaaaaaccaattaaagaatatcttagggtacttaaaatacaattcagcacatatttctgcattagtctctttttatgtttcaatgcttaatgacataagcattgctttcttcgtcccatatttctccatttggcaaccactttgtgtgctttcaaatatagaaccctgctccccctccgtgtcacaaggcaagaattgcagggcaacaatatgcatcattgccaatagtatatctctgcttaaacttcagcaagagatactacattttggcttcaccttctctttgctaactggaatgtcctcttcaagaaatgatttgcagctctgtcatttctactgcacagcaccctcagtattgcgtttggatctgaccta

SEQ ID NO: 49257 - DNA, 1218 bp, Glycine max
  Clone ID: PAT_MRT3847_15487C.1
acattctactcactcactcgcaagcaaatagaatgaatcccaggcgaggagaaagatggaggggaaggagcaggatgtgtcgtatgggagcgaacaagttccccgagagacagccgattgggacggcgtgcgcagagtcaagacgacggcaaggactaccaggagccggcgccggcgccgctggttgacccgacggagtttacgtcgtggtatttgtttgtccatcatcggctagagataaaaaacttctccatcggggtccacgccttcaattcaaagcaaagatgtgcactttggagaagagaggcagcatattcatcctaacactcaccggcgatggcgagcaccgtctcaacccaacactcctcgattccatccaatcctccctccgccgcgtccgccaagaagccaccgcctcctccgccctcgtcaccaccgcgcacggcaaattcttctccaacggctacgacatcgcctgggcccgatcctccgatgaggtcaaagagcgcatgatcctcatggactccctcctccgctccgtcgtctccgatctcctcaccctcccgatgccgaccatcgccgccgtcaccggccacgcctccgccgccggctacaccctcgccctcgcccacgaccacgttctcatgcgcagcgacaggggattcctctacatgagcgagcttgacatcaacctcgttattcccgcgtggttcgtggctctcctcgaagccaaaatcggctcgcccgcggctcggcgccacgttgtcctgaacgcggctaagctcactgccaaggaggcgctgcggctcggcgtcatcgactcggctcacgacagcgccgctgagaccgttgaggctgcgctcgctttagccgcggatttggtgaagagaggatgggttggacacgtgtacgctcagaatcggaaggtctttctgggtcgcgtgattcgagccgttgaagatacctctgagagaaagtcatacactacttcacggctttagccttttaggataggggctcgtgtgacatgaagacatttattgggccgctttgtaattcttagtatgttgggctctgaagtccaatagttcagtgattgttttaacgtttttaatcactctgggcctattttatttgtaatatgcactgttgcttgttgtaccttcctggcaccccccattacattacggattatattgggttaaaagtatattttta

SEQ ID NO: 49258 - DNA, 394 bp, Glycine max
  Clone ID: PAT_MRT3847_15488C.1
acgcgtccgacaactgatagatacagatgcaaggggcatacacaaggggttattccacttgttgcattgtacttaggcaagagtattaggcaacggagtcttctctaacatcaacgacacttgctcatttgctaaccaacaatttgcgtttctttgtcatcgcaaatggctgctagacatgtacacaccataagccaaaccgtatccgattcccttacgctgagcttagtcgtgccgcgaagaactaccccagggaaccacataatcctcgagtgtgcgcaaacttgcatactggaccaagtggtgctacagtggggtcaccacgcgatcacccatgttgctcagtgccagaatggtatcctgatcttgaagttaccattagcctcagcactgt

SEQ ID NO: 49259 - DNA, 1257 bp, Glycine max
  Clone ID: PAT_MRT3847_15489C.1
ctctctcattctcccacccacccaccgcaacaaaacgccataaaaccacacagcacccttcttcccacttcatttccacgatggactcttcaccaaatagaaccagttgctgcaattcacccgaattcgagttctggatgctccaaaacccttcttttcctcaacccaaccttctctccgccgacgaactcttcgtcgacggcttcctcctccctcttcacctcctccctaacaaaccacaccctccccaagcctccaactttataactccgatccacgaacccgaaccttcgccaagcataaccgaatccacctccaccaccacgttctcctcgtcgaaacggtggaaggacattttcaaaaagagtgataagaaaaacgcagagaccaacaacaacgaagagaaagagaaagcaaagaagaaagagagaaaaagtgcaagtggagcgagttctgcggaattgaacatcaatatatggcccttctcgagaagcaggtccgcgggaaacgcgggtacccgacccaagctgttcgccggagctccgccgacccggaaggttaacagcgcgccgtgctcccggagcaactccgccggcgagtcgaagtccagaaagtggcccagcagtccgggccgggccggagtccacgtgggccggagcagcccggtttggcaggttcgccggaagaactccaacgagcctcctcagaagcccaaagctcgccggagcaaagtcaccgccggaggaggaaccgccagggttttgaatctgaacgttcccatgtgcattggctacagacaccacctaagctgcagaagcgacgagaacagcgccgccgccgtcaccaacggtaacagtaataataattctactactaataataataacagtggcggcaatgatggaggaagtgggggtaacatttttaacctacgcaacctcttcaccaaaaaatgcgcagtaacttctcactagtgttacttttttaacttgtataattatttttgacttttttttttgttgggggtttagaattttgattttcgtatacggaaagctatagtttcacttttgatttgtgactttgtatgtaaccaaaaaggtatctctttctgacttacagagattaggacttgaaactagattccttcatgtcatctgaactgctttgtactcctcctcgtgtaatctgaactgctttatcagaatgtatttattgtttaatattatattattattatttaagttcggttcggac

SEQ ID NO: 49260 - DNA, 351 bp, Glycine max
  Clone ID: PAT_MRT3847_1548C.1
atcacacttatacaaaattctgcaattaggaacttgctgagagttgctgtttggaagaaaggctgaacaatggttaagattgagatgtctgggaatgcatcaatcaaaccgagtgatagggcctcattgttacaggtatttttaacacacaccatcagatcaaagcattttgatgcacgtaagtgggcaaaatcggcaccacattcctgggaatcgatctctacaatagaggagagtggccccaataatgggtgtgaaatgtggagatgtgagtgctcacattaaacttcatggcattcgagtttgcttattgacaatcccaaacagtctacagaggatgatattgctctt

SEQ ID NO: 49261 - DNA, 108 bp, Glycine max
  Clone ID: PAT_MRT3847_15490C.1
gatttccacatacaatggatacccctgcctcggggcacactgcacatcctcctatcgccgctgctttattcattctcaaaatcaaaccaatttttcttagaaaatgat

SEQ ID NO: 49262 - DNA, 655 bp, Glycine max
  Clone ID: PAT_MRT3847_15491C.1
ccacgcgtccgtaagaaacctatagctcttatggaggatggaaatggggggtgtttttgtcagaggtttagaggaagaggttgtttgcactgcaaatgaaatttataagatattggaaaagggttcagcgaaaaggcgaacggctgagactcttcttaacaaacaaagcagtcgttcccattccatattttctatcactattcacattaaagagtgtactccagagggtgaagaaatgattaaatgtgggaagctaaatcttgtggaccttgcaggttctgagaatatttcacgttccggtgcaagagagggtagagcaagggaagctggggagataaataaaagcttgcttacacttggtcgagtgattaatgctctagttgatcattcaggtcatgtgccttatagggatagcaaattaacaagactgttgagggattccttgggcggtaaaaccaagacatgcatagttgctacgatatcaccttctattcactgtctggaagaaactcttagtaccttggattatgcacaccgtgccaaaaatatcaagaacaaaccagagatcaatcagaagatggtgaaatctgcactcataaaggatctgtattctgaaattgacagactgaagcaagaggtgtatgctgcaagagag

SEQ ID NO: 49263 - DNA, 418 bp, Glycine max
  Clone ID: PAT_MRT3847_15492C.1
tttttttttttttttttttaaaggaaatacaataaaattttgcttttaaaaataattaaaattcatagcattaaagtaacaggatactgtccaatttaaagctgagataacaaggacgaactacactatacttctgtatttcttctcaatatacgactttataattgcatttccgctgataactttatatgctatatataatacatttatcatatattttacaagtaaaaaatgcatagtcaaagttagccctaggttccgcactgtacagaagattctgctgcaagcagttggcagtacacacgtctattgcgcagcagcaactcaattcaggtgttggatatcaccaacattaaaatttcatgatgaatttccttccctgaatgttgattataaatttggggggtcattaaagctt

SEQ ID NO: 49264 - DNA, 665 bp, Glycine max
  unsure (1)..(665): unsure at all n locations
  Clone ID: PAT_MRT3847_15493C.1
ccacgcgtccgcaaaaatggcattttggaatactattctgtttctgagcttccaagttgtccatgtcattgcgatccaccaacatttccaacttataagtttttttctgtctgcaaagtcgggcacgtgctgcaagtaatgatccctaggactttgaggtactgctgttgttaagcccatccaagataaagactcccaccataggggtaggatattgcggcagttgaagaataagtgagcagcctcctcctctacctctccacatagtgggcacatcaagtcattgaccaccacttgtcgccttgttagattcatctttgtaggaagtctgtcccttatacatctccaagcaaacacctgtgctttagctggaattttaagcttccataaatccataaagtctgaattctgctcagctgccatatgttctccccatatcaaatcataaccactttttgttgagtaatatccactttgatttatcttccagctccatttgtcctccacatttggctgtatctgctgatgtgataattcctcaatanaattgtctgccatttgtacttcacaatcaaaaagtgccctcctccaagctaaattccattcccattcattgttgttgctggtccccggatggctgatgatttgtttctgtggggatgata

SEQ ID NO: 49265 - DNA, 432 bp, Glycine max
  Clone ID: PAT_MRT3847_15494C.1
caaggatcaaattcctgctgttgacaagttgtgttctactaaagttcataagctagcaaaacttatgaaccttagacaaagtagcagtgctgatcttaaacttcttactcgtgggaagttgtctgagggcgagcatattcctgtatctaatattagcgcaggggaaaatcatgtcatttcaaataccctgactgtcacaagaggaaactctgtcttgtagtgcacgcgatttctgaactgcaatggtgagtaaaaatagcttacctcatgctactgcgatgcgtgtgggagctatagaaagtatcatagatagcgtcgcaagtgctgattgcatcatagtcggagcaatgcttacgcgtgatacatatcataccaatcctgaaactgcatttcggcgtatattagctgcacctttcacaggcggaaggccca

SEQ ID NO: 49266 - DNA, 1344 bp, Glycine max
  unsure (1)..(1344): unsure at all n locations
  Clone ID: PAT_MRT3847_15495C.1
cccacgcgtccgcccacgcgtccgcttctctctttcaccaatcaacacaaactaagttcttccttctgttgaaagcgatagcaatggccacgaatccaatcgaagcggggaacggcgacgctgctcccaaccctaacgcgactaccaaatcctccgtgtacctgcaagactcggaggagctgaagcgagtcttcagccgcttcgacgccaacggcgacggcaagatctccgtctcggagttggacaacgtcctccgctccctcggatccggcgtcccgccggaggagctccagcgtgtcatggaagaccttgacaccgatcacgacggcttcattaacctctcggagttcgccgccttctgccgctccgacaccgcggacggcggcgacaccgagctccacgatgccttcaacctgtacgatcaggacaagaacggcctcatatccgccacggagctctgccaggtgctgaaccgcctcggaatgaagtgctccgtggaggaatgccacaacatgatcaaatccgtggattccgacggcgacggcaacgtcaacttccccgagttcaagcggatgatgagcaacaatcgcgaaaatgctagcaatgctgaagaaaaaacagattaggccctttggatttgaattttatagataggctaggcactttcgctgcacaatctcttgactaataaatctaggtctgttatgatccgctatttcttttctcctcgtttcctctttttatatatatatatttatatatatttagaaatcgaatgaaaactattcctatgcttgccgtttcagtcaatcgtgaattcaaaatttgctctgtttatttgttgcaagtcgtgcttaattggtggctatattgacggaatcacgccgtgacgatttatgcgtgttcaatggtcggctttgaagaagaaattctggcattcggaatcacgccgtgatgatttattcttgttcaatgatcacgccgttaattgatatatgaaattttaattggatactggtactatttgtataatcgaaaatatctgtacgtagagtgtcacaaacacaagaagaaacggaaaatggtgatactgacagggccatggaaattgcgagcagcgcaattcaatggccgtactggtacatcctagtggatggaaaaaaaagatgtgtcagaggacatttaatatcagacaacgtggttgaaggaatatgtttcagtttgggattatcttacgatcactttttttattatttttaaaaagggaacttttgttggttaggtttggattaaaatttgaaaaagtatcttttgcaaaatgtataataacaaatannatgggtt

SEQ ID NO: 49267 - DNA, 359 bp, Glycine max
  Clone ID: PAT_MRT3847_15496C.1
tggtctttgtctgagtgcttggttgcttccttggtgattggtcgggtctttatgcgtcggcgtccgtctttggggtgtgtttttgcttcgtctcttgggctgcgagagacttcaggtatgccagactttttatccaactaaccaggggacgagattacgtggatacacatatgcccaatgctaatcatgtttcggatcagatcttcaattacttgctttgtgtcttcagattatggtagaagatggcctgatgttatctcttgtttcgcatcactccttacttctgccacattactatcttaagatgtgtatgaatttagtatataactttgaacttagttcctcgttattattagctc

SEQ ID NO: 49268 - DNA, 857 bp, Glycine max
  Clone ID: PAT_MRT3847_15497C.1
cccacgcgtccgcccacgcgtccgctctttcaccgataaaacaaactaaattcttcttctttctactgaaaacgatagtaatggcgacgaatccaatcgaagcggggaacggcgacgccgctcctaaccctaacgcgactaccaaaccctccgtctacctccaagacacggaggagctgaagcgagtcttcagccgcttcgacgctaattgcgacggcaagatctccgtcaccgagttggacaacgtcctccgctccctcggatccggcgtcccgccggaggatatccagcgcgtcatggacgacctcgacaccgaccacgacggattcattaacctctcggagttcgccgccttctgccgctccgacaccgcggatggcggcgacgccgagctccacgatgctttcaacctgtacgatcatgacaagaacggccatatctccgccacggagctctgccaggtgctgaaccgcctcggaatgaagtgctccgtcgaggaatgccacaacatgatcaaatccgtggattccgacggcgacggcaacgtcaacttccccgagttcaagcggatgatgagcaacaatcgtgaaaatgctagcaatggcgaagaaaaaaccgattaggcgctttggatttgatctttttagctaggctgggcaaggcacaatccctcttgaataataaatctatgcctgtttgttatgatcgatttgttattacttttacccctcgtttcctcttttttttttctataaatataaatatatttgtgttgaatcgctgcgcagaattagaaatcgaatgaaaaactattcctatgcttgccgttttaaaaaaaaaaaaaaaaaaaaaaaaaa

SEQ ID NO: 49269 - DNA, 634 bp, Glycine max
  Clone ID: PAT_MRT3847_15498C.1
tcggaattcggctgcgagaaaaagttgtaagtcgtaataatcatagacaggcacagacacagagggccaatatgaagactcgtacctctaagaagatctctgcaaaatgggttccaattttctctgtatcttccttccttattggaatgctcataacaaccaggatgtgggaaccaccagaatctaacggggtgttactgtcaaatcaccgacatgagcaagaactacaagtggtgtcaggggattgtgctactaaaaagcctgtgcaggatgaggatgtaatgagtaaagtgtacaaaacccatgaagccattcaatctctagacaagcaagtttccatgcttcagatggagctggcagcagcaaggagtacacgagaacccgagatctcggatggttcgaataacaccttggcctcgggggtaaccactgaaggcccaccaaggaagaaggtgtttgtagtgattggcataaacactgccttcagtagcaggaagcggcgtgattcggttagagagacttggatgcctcaaggtgaacagcttcttcaattggaacgcgagaagggaattgtcatcagattcatgattggtcacagtgcaacttctaacagcattctagatcgagctattga

SEQ ID NO: 49270 - DNA, 492 bp, Glycine max
  Clone ID: PAT_MRT3847_15499C.1
atggtccgttatggactccttctcttttaaacaagggcacccttatggccgtgcgggccccagaaagccaaggcacgaactcaaaagggaacaccaatttaaccagcggtgctgactgcaaaacggtgaactcacacgccgaaacgaaagtaggcaccccccctgacggggaacaggaaaaagcctcaatgaccaaaggatgggaagccgccccccggaagggggcaggccaaacgacaagcctcaaacaagggcacagatggcaccaaagagaaaggggtttacttacacaaaaacgcaaaaaaacaaaaacgggggcagaaagagatacgcctgaggagactaaagggtgaacaaacaaacaggagaggggtggcgctcaccgcccgtgatacagtggggaaacctgccatgccagaacaagaaacgaatctatgaacgcgcaacgagagccacactgcgtactgcaaacaaagcccctccctagctcac

SEQ ID NO: 49271 - DNA, 337 bp, Glycine max
  Clone ID: PAT_MRT3847_1549C.1
cttcactgtttgttattaaaggtgaacacaccacaactccattgaatacagagtctagcgagcggcgcttttgacaggtggctattgaccttgtccgtggaggaataataagggacaaaactcgagagtggatcacacttatacaaaagtctccaattacaacttattgagagttactgctcgaaagaacggctagtgaatgagaaacattgtgatgcctgggactgcagctctcaaaaagagtgattgggcctaagtgctacaagtgattgtaacgaacatcgactggacagaagatgttgatgcatgtcacttgactacatcaaaacgacattgc

SEQ ID NO: 49272 - DNA, 196 bp, Glycine max
  Clone ID: PAT_MRT3847_154C.1
aattgaataaaatttttattacatgaacaaacttactagtaaacttatcaaacgtacagcatcacgcaaatgattggggtcacactttgggtctggctcatccaaatgcatccgaactcacagtgccaggggcacgcataatactctgaaccccttataattgacacagtgaaaacttctccttttaaaaaggggg

SEQ ID NO: 49273 - DNA, 556 bp, Glycine max
  Clone ID: PAT_MRT3847_15500C.1
gcgaacgcagtgtctattccggagcacatgaagagggtcctacgcgagggggacaattgaagaacatgggggtcaccaccatcgcagattgaaggtctggaaaggcgactaaaccgggcacgttaaacgcagcagatgctgaattgagctgaagcatcaaattggtgtacgccggcataggctagggcatgaactacaacacgctaaccggaaacggcgccgccacccctgccggcctcatctccgactacatcgcccatgcattcgccctctacgtcgccggctccgtcggcgccaacatatacggcggccacatcaaccacgccgtcacctacggtgcctttgtcggcggcaacatcaccttcctccgcggcatcgactacgtaatcggccacctcctcggctgcatcgtcgactgcctactgctggccttcggcaccgacttcgtaagaccgctattacctatctttattttagttgattaattaacgaactataataactaaaagttaaaggttggtctggtgttacgcatcggaaactggttccagcaatt

SEQ ID NO: 49274 - DNA, 771 bp, Glycine max
  Clone ID: PAT_MRT3847_15501C.1
aagcctcgggaattgcggtctcggagggttagaaacctgaaagatggctactcttcctcttctccgaccatgctgcttccttcccactcccaccctcaaaccctcactcacaagacccacacccttcttacctctcaaatcgaagaagaaccctcaaaacggcgccgttgggactcgcatgtcgaacaccgcaactccaccaccgacggagcggctaatctcaatcgcatcctacgcactcccattcttcaactccctccagtacggccgctacctcctggcgcagaaccctaccctcgccgtcctcttcgaccccatcgtgcccctcctcgccttctacagatccatcccttactcctccttcgtcgccttcttcgcgctctacttggggatcgtcagaaaccctagtttcccccgctacgtcaggttcaacgccatgcaggccgtcaccctggacgtcctcctcgtcctccccctcctcttccaccgcatcttctcccccgcccgcggcggccccatcctcgtctggtccagcaacgccattttcatcttcagcctcatctgcttcgtttacagtgttgcttcttgcgtcttgggacgcacgccgcacttgccttttgtcgccgacgctgcttctaggcaaatttgattttcccttttctttgtgctttcttccttgtatgcatacaggttgcaatatgaattctaaagtaattattattgtaaaatgtatgtatttcaattaaatacaatctatcggtttatttttat

SEQ ID NO: 49275 - DNA, 152 bp, Glycine max
  Clone ID: PAT_MRT3847_15502C.1
atttcaagcatcatatgacaagaagaatcacttttcttagtggtaatttaatgtaggttgatctgcaatttgttgacaatttgtaattgtatttagacttttggttttggttagtatgaaaaaatttaaaaattgaagaatgttctaattac

SEQ ID NO: 49276 - DNA, 200 bp, Glycine max
  Clone ID: PAT_MRT3847_15503C.1
gagaactcagctactgattgctttactcactacgcttcagtgcaggcatgggaggcaggtgcatgtccaatcggcagtgcccagtccagtcacgcatctggtacacttctgcccttgacgacggtgcattgaccttaactcgctcaacccggatttgcctcggtccgtcatcaacggcattattacctcggagtccatct

SEQ ID NO: 49277 - DNA, 450 bp, Glycine max
  Clone ID: PAT_MRT3847_15504C.1
tgaagtttgtggaaaaggtgctccagatgcaagtatgcttagaagcctgaaaacgttgaccatggtgattcaagagactttgaggctttattcgccagcagcctttgttgttagaacagctctccaagatgttaatttaaaaggcatcctaattccaaaaggaatgaatattcagattccaatctcagtgctgcaacaagaccctcaactctgggggcctgatgctcacaagtttaatccagaaagattttcaaatggggtgtttggagcttgcaaggttttacaagcctatattccattccgaataggggctcgtgtctgtgttgggacaacacttagccctgacagaactgaagggtgaattttgtctctcattcccgttttaaaattttcacttctctctctcattaagtttactgccattcaccctgccttccgtttgggttttta

SEQ ID NO: 49278 - DNA, 592 bp, Glycine max
  Clone ID: PAT_MRT3847_15505C.1
ggcattttggttcagttaattagtttctccctttgcactttctcttgtttccacaaagccatgaaatcacgtcctttgcacatagcaatgtatccatggctggccatgggtcaccaaatcgcattcctccatctatgcaacaagttagccattaggggtcacaaaatctccttcatcaccccaccaaaagcacaagccaagttagaaccattcaacttgcacccaaattcaatcacctttgtcaccatcaatgttccacacgttgaaggccttcctccagatgcacaaacaacagcagatgtcacttaccctttgcagccacagatcatgacagccatggatctcaccaaagatgacatagaaacccttctcactggcctcaaacctgacctcgtcttctatgacttcacacattggatgccagccttagcaaagcgtttaggcatcaaggctgtgcactattgtactgctagctctgtcatggttggttacactctcacaccgtctagatttcaccaaggaacagacctaatggaaagtgatctcatggaacccccagaaggtaccctgactcatcaatcaagcttcaact

SEQ ID NO: 49279 - DNA, 261 bp, Glycine max
  unsure (1)..(261): unsure at all n locations
  Clone ID: PAT_MRT3847_15506C.1
cagtcacccgcagcgttcagctcggcgatgttgtgcggcctgtcgtatactggagcagattcgcatcgccctctcggcctgctgctggaaacgccgtctgcaaagcggggcctcatcacgacctcaaacacaacaacaggaagtggaagnggttggataccgggctgatagaagctctgcctgtatctccatgaaagcagacggcggatgcgtctgcacgtctgattggaccatgggaccggtgagctgcacagcagcctg

SEQ ID NO: 49280 - DNA, 602 bp, Glycine max
  unsure (1)..(602): unsure at all n locations
  Clone ID: PAT_MRT3847_15507C.1
ccacgcgtccgtttactaagtatttcttctgtgcttcgcttaatgaccaccttgcatcctgcgtgttgcagttttccataatcctttcgacatgggttcgctgctctgactaagggagaaacatattttagattttgaaattctttcctttgatcggtttgtacaaggttaccgttggaatcgggtgcaatgagtgggtggttaaaaaattagaggcaaattcgttgttggttaagatgaatttgttctgggttgtttgttgggtggtgtcgtgtttgggagtatcatcagtaactccttttgtggcggctgcaaatttgtcatcctcaagacccgcctttgtgcacattggagcaatcttcagcatggattctgttcttgggaaagtcgctaaaattacattggaggaagccgtcaaagatgtaaacgccgacaaaaccattctacatggaactcaacttgttctctctatgcaaaattccaatcacagtaggtttcgtagggcatgttcaagctntgcggttcatggagactgatgtgattgctataataaggccacaatcttctgtgactgccacataatatcccatggtgcaaatgaa

SEQ ID NO: 49281 - DNA, 200 bp, Glycine max
  Clone ID: PAT_MRT3847_15508C.1
atcattccttccatcatatctattcactcctttaacaatggccagcgaggcggtgaagaagggggcttttgtcaacgtgccagggactaacaagactcatgccaaacctgaggagcaaattgtaatgaaagagaaccagctggcaactatcgatcttccctacttgggctcatactacaaccacaagcggctgttttaca

SEQ ID NO: 49282 - DNA, 293 bp, Glycine max
  unsure (1)..(293): unsure at all n locations
  Clone ID: PAT_MRT3847_15509C.1
gaattcggcacgaggtgagatgatgcaccacgaggcaaagtaattaatagtgagggagaatgaattatccttcgaaaattgattcatagttaagttttagttgccccttattaccttaaatgaacaaagcttgtggtaagtataaattcacaaaggtagcacaattaaagaaattcaaatacttcaaagattggatcttcttgtagatttggtccatcatgattagcccatcctcacatgtattcgaatcaaaggcaacctnnnnnagaaggctcccttatatatatannnng

SEQ ID NO: 49283 - DNA, 664 bp, Glycine max
  Clone ID: PAT_MRT3847_1550C.1
ttagctttgagaaattgcaccccccaagtgcttgttagacataaagttcaagatggttcctgttttgagctggtttctatgcttaggttgcataccatgctctatgtgtgtcaaagctcgtttgcaaattcctcagttgaaagtgctccaaacaacagaatgtgtcctaaggaaccttattgccttggagcagtgtcactattcagaccaacctttcatatgcaactatgtttctctaattgactctttgattcacactcaagaggatgtggagttgttggttgacaaagaaatcattgtgcatgaacttggctgccacaatgaattggcaactatgataaatggtctttgcaagcatgttgtggtgaattgcaattattatggcaaaacatcaaggaaactcaatgatcactacaattgttgttggaaacattatatgggtatgttgaggtcagtgtacttccgtgacccttggagactcagctcaactgttgtaggagttgttatcttcttgtttgctattgtcaactttcttcgagttaccaatttatatcatccaaaagactgaattgtttgagtagttttattcgactccaatagaattatctcatatgtaaaagatatatgtatttgatataaaaataactgaactgtttggaggtgt

SEQ ID NO: 49284 - DNA, 422 bp, Glycine max
  Clone ID: PAT_MRT3847_15510C.1
ggataaaagagcatattctttttttttcagaagattaaaaggacacattagacagaggtggttctgaaggcaaagaaggggggcatcaccttgcacaatcttatgtaccacatatttactggaaatctgtcaaattattacaatgcaaaaattgacagcaaattgtactattctattttaacaagcgatttacttaacacaatgttagagagtgacttaaagtaactttgaatgaaaagtcctataatggcacacgttttttttaatctccctatcgagacaattgctcatatacattattgcctgtatttaaacaaccctttaccgcatacgattactctatttgtgtcgtgggagatagcacaattttttttcgaaagattctgagatttatttattaccctttttccaactcttttaat

SEQ ID NO: 49285 - DNA, 1188 bp, Glycine max
  Clone ID: PAT_MRT3847_15511C.1
cgtaacttcgttactctgtatatagtggctggtcacagaaagggcaaaagcacaatggataaaatacaaatccatggttgaatctgctagatctaagacagagaacactcctgagggcgattcttctgtctatcaaaatgccacagtaccagattgtgctttggaagatcgcgtaatggacactgttggggttatttgtatagataatgaggggcatgtagcatcaggagcctccagtggtggtattgctttaaaggttagtggacgcattgggttggcagcaatgtatggttcaggttgttgggcatcatcaaaaggtccctttggggctccattcatggctggttgttgcgtatcgggggcaggagaacacctaatgaaaggatttgcggctagggagtgctgcgtttcattgtcactctcgcagtctggtgctgcctctgcttgcacgaaaattctacgctctgttgttgaggatggcaggcaatgtggtactgatagcagtgcagggatcttggttgtgcagtcagatgcatctttgacagatcaaggaaaatcatcaaggctgaaagctgtagagattgctgctgcatacacttccttgtcttttggagtagggtattttggaagctctatggaacggcccaaggtttcaattcttaggagtacaaaacaacaaagcaagacagcaatagatcaatttggagcacgaatagatctttcaaatggatagttgggtatgcccatggatcaaatttcatcagtgctgaagtgttgaaattcatattcagactaattgattttcccttgcattgtgatctttcaatattgtgcggtacattggtggactgagaatatgtaatttcacccgtgcaaagcaagtctatattcaatttacaattagcatactttaggctgagacattttggtttgatagatataagtctatattcgatttacaattagcatactttaggctgagacattttggttggatagatataaggttcattttggattgttaagaaattctatggactgtagaatgtaattagtgggtacgtgggtgaagaaaagttgcaggaaacagtatgtgttggaatggttgtttgtgttattgaattttagccaatatttgtactaagatgtgaacagcatggcgtgaaatgagtagtaacatgttatggt

SEQ ID NO: 49286 - DNA, 245 bp, Glycine max
  Clone ID: PAT_MRT3847_15512C.1
acggctgcgagagacgacagaggggggatgattggcaaaagtggataagtattcgaggtggtattggtgttccttcaaacaagagttgggagtcatggtggaatgaggaacaggagcatctgcagcacactggatttctggggcggatatgtgagattatacttgacctgcgtttctttgtctatcagtatggtattgtgtatcatctcaatgtagccagaggtgacaagagcatcttggtttat

SEQ ID NO: 49287 - DNA, 590 bp, Glycine max
  Clone ID: PAT_MRT3847_15513C.1
ttccgatacccagtcctctctctgatctctccctacgcagtgtaagggctctctttctttgcttttccttccccctttcaggtgcttcgacgctgcgactattggtgcatttgcgctgtttcagaccggaggcgtatccactgacccctgcactacaacgtctctgctgtgacatggctccccaaatgactgcctctatctgcatcactcctgctcacagcttcccaccatctccaacacccgcttccgcgtaatcctcctttgctaaggaagatgagtatgctgcactcttactgcagaaacatgtgatccccataactcctgctactgtgccctccctaccggctatctttgctgagccaggcgccactgatcctgctctacccaaccgatgggctatgccagatgtcttccccattatgtgccataactaatcgaatcatgcattattactaatgcttgtgcttgctgcctcccccgatcgagtggtgtggtcgctgggctctattatagtgcatctgaccgatatggctttaagattgcctccgtcccctggcctggacaaattccggggaagaccctctgaacgc

SEQ ID NO: 49288 - DNA, 160 bp, Glycine max
  Clone ID: PAT_MRT3847_15514C.1
tgatgaaccaatcattacccctgcatctagccccactatctgtcttgcaccctatggcaaagctcccgatcaaaaattcggtatcatcaagggcaccctgaccaccactcactcctacaccggcgaccaacggctactcaacacgagccaccgcgacctc

SEQ ID NO: 49289 - DNA, 345 bp, Glycine max
  Clone ID: PAT_MRT3847_15515C.1
atgtgtttttcaaatattataacataaacaacatctttaacataccaaacaacccagatcatcctcatacatgcatataaaatgtattcccaacatcaaaatcatcccaacaatagagaatcatgtcaagctttcatttttcatcatactcactcagtttaaaaacccaaagttccatgcattttgagatatcaatatttatctatcacatttttctacacattccaagtaatatatatatatatatatatacatatatatatatatatatatatattctaacaactaaacatagacggtaagattcccttgtttggggtggttttcttgcaataaaagcttcaa

SEQ ID NO: 49290 - DNA, 453 bp, Glycine max
  Clone ID: PAT_MRT3847_15516C.1
gaacaagcagctgttgaagcctatgaccggacgttgatgttgtgtttggtaaataaagagcgtgttcagcgtggtctcaagccactcggtccagatagtcggcttgacaatgcagcacaacgtcaaagtaacggacaagctaatatgggtcaaatgactcatacgggtgatgatggcagtagccccagccaacgtattgaacaagctggttatgaatggcaatccgtggcagagaatgttgcatttggctacgagaatgaggagatttgtatggagaaatggatgaattctccaggtcatcgtgccaatattctcaataacaaagtcacgcactttggttcagctgtcgcctacaaaggtagtacaccttattatacacaagactttggtggtgatggcaaagaacacaactttccggtctgtccatctggtggtgctggtaacggaggagct

SEQ ID NO: 49291 - DNA, 358 bp, Glycine max
  Clone ID: PAT_MRT3847_15517C.1
tgcacgtaccggtccgtaattccaggctcgacctacgcataacaccacacatccgcacaatcgttcgtcaattaaccgaacacgacagacttggggtaacatggttcaatgtgtataacactgtatttactatttatatgacatctagctactctataatcttactctcgaactagacattgtgattatcatcctaaactatttgcatcgaataatcactcaatatcataccatatactttgttctaattctccatcactcttcatatatttcacaccatcaattcttatctaaacctttggcttaacatccataatccaacatattctttatctcaatttcgaaatctctcttacta

SEQ ID NO: 49292 - DNA, 278 bp, Glycine max
  Clone ID: PAT_MRT3847_15518C.1
atctggggttgggtttttttttttttgtttttttttaaattaaaacacccttatttcacattttaatgccctttttttaaaggaataaaattttaccttctttttcacaaatgcaaaagggcacttttcaaccaaattttttagactcctacacttctaaaaaattcccgtcaacataagattatgggggttaaaactcaaaattttatttttaaccccaaaaaaaacaccccgttaatcttctggaaaaggatccacttttgttaaaaaaacaattt

SEQ ID NO: 49293 - DNA, 459 bp, Glycine max
  Clone ID: PAT_MRT3847_15519C.1
ggctcgagaatcacttacacgaatgccgcttctctgtttcgaagcagcaattcttccttctgaacgctcaagtgggcatcgtcacagtcaagacgagaggcagcttctactccaactgaatcatgactacatgcgatcaccacacccacaaggcaccatattactgcgactacattatgtggagtgcggtctccatctgaatctcccttaccctctccctgcacctgattccctctatatgcagaaagatgttggtgctacttaaggtcaacacgatcgcggctgcattgtgccatcgtgctgctgtaggagctaataggctgtacttataacacatctaggccactgtgactacagatatttttcagggatcatgatcacggagagtgctgacgcggactctccattttcatgggtacctagcaatcctgcatcactgtaggaggatatggctgaaat

SEQ ID NO: 49294 - DNA, 609 bp, Glycine max
  Clone ID: PAT_MRT3847_1551C.1
cgaagatgctgtttctttctctctctctcttacttactaataagtcttaacgcgctcaaacaaaccttgtccctcacagtgccagagcgtgttttgaccttaacgtgcacaataaaacggcctcaaggtgttgaaggaagcttagctcagtgatgaattgaaggaccaacttcaacaaagaatcgctcttcaatcattgcacagatcttcaacgatccataaaactactgttcaagcttcaagtattccttgaggcttttggttgaatttcgagcgagaattgtccctaaaagaatcttctttagtgatgtgatagttctggaaactaatggaggaaagcatcaatagaggggaatatcaacctaatttggctaaacagtcttctttgagattaggtggcagttttaaatcaacattgtctggaagatcaaatcctcgaaattccccttcattccggcggcttaattctgtgcgaacgccaagaaaagaccttcatatcggcgacttaattgcactcgaatttcagagcaatcatgaaggagcagcgttgcttctaatcaccctctacgctgatctcggatacttttgtggttgcttctaatcaccctc

SEQ ID NO: 49295 - DNA, 572 bp, Glycine max
  Clone ID: PAT_MRT3847_15520C.1
cggcaagaactcctccggcgcggcgaacgacttcagcgcctacggcacaggctcaaacgtcgcctcttcggatttcacgaactatggaaaaggaggtgcgggccccaagaacacgttcatgaattacggcgttaacatgaacaaccctacggtgacgtttaagagctacgctgttagaactcacgctagcactgagagttttgctaattacagagaccaggctaacatagctgatgactcgtttcaatcttatgctaagaacaccaaagaaaggaccaaactggatttcaaaaactacgggaattcttttaaccctggttcggatactttcaaaggctatgctaaaggcgcagaaggggatcacaaggttggcttcacaacctacaacgttaacactaatgctacgtttaaggattacgccaaacagggcgtatcctttgctagttacaacgtatctttctcttcctcttcagaatctaaaactattagacgcagtttttctccttttctgatagagataaattggttctttcgggagagcctgctttaaggagggactcttatgcccattg

SEQ ID NO: 49296 - DNA, 1993 bp, Glycine max
  Clone ID: PAT_MRT3847_15521C.1
ggctcgagctttctctcgtttccccttcgcaattttcccctcggaagagacatcgaagaaaatcacgtgacggcaatggaggaaaagcacgcagcagccaatgaatctgcacacgccgaatccaacggcgtctgtcacggcgccgaccacggttggcagaaggtgacctacgctaagaagcagaagaagaagaccgttaacgccgacaacagcgccgattcccgcgcgaattccaacaagctcgttccgaacggcacgctgtgcggcaacgatggcgttttccggtcgctcgagctgcagtcggaggaccggcgccggataattgtggaggcgaagaagctggccgatgccgcgtacgacgacgaagacgcgccgttcagatcggtgccctccatgcatgactgacaaacatcagaaaatgaatggtgaggatgaggagtaactcccaaagagttactcttggtgttgcaatgttcgttgttttagcaatggtattgcgtcggaagcctgatgctcttatatctgtattgcccacattgagggagagtacaaagtatcaagggctagataagcttccagtcattgtatggatgatagctcaggctgctgtaggagatctctcagtaggtttgtatgcttgggcacggaatctcctacccatagttattggcaaaagtggtaacccccaatccagggatttggttttgcagctagtggaaaaaattttgtctacccccaaagcccgacctgttttagtaaacagtgctgtgagaaaaggggaacgattaattccttcttccgcgtttgaaattttggtccgggttactttccctccatcttcaactagagtaaaggctactgaaagatttgaggccatatatcccactctgaaagaggtggctcttggaggttctgctggaagtaaagcaatgaaacaagttgcactgcagatattcagttttgctatcaaagcagctggagaaaataatcccgagttatcaaaagaagcagctggtatttttatttggtgtttgagtcaaaacactgaatgctacaagcaatgggaaaaagtttatcaggacaacattgaagcaagtgtttcagttctggagaagctttctgatgattggaaggagttatcaacaaaattgtctcctcatgatccactgagggataccataaagaacttgaagcaaaagaatgagaaagtattggactctgagactgatgctgctcgtcatgcacacttcaaggacgccgataaatattgcaagataatcttaagaagagtttcgcgaagccatgggtgcatgacttggttaacctttacacttgctttggctgtggaaccaatttcattattttgcacatggcttgcagattggacctacttttgctgggccacaacctatcatatataatcctcaggtagcacaaattctgtaataatcaggtattcaaaataatgcacccaagatattttcatccgaatgcaccccagtatggacagcttcttggtcatcctaggcaatctttatacatgccgagttacttgcctgaaatgcaatacaagggacgagattattgacgacttggctattcgtattcttgttggcaagtcaaatccttgcttgaaaagaataaactaagtggttgtcctgaaaagttttaaacgaggatatctgcagctgatggaaaaatctctaaaggcttatattatatattactgccaggttcgctaattctgggatataattttatgaccttgtgttaacccatacatcttttggggtttctcaggctttggccgtgcgatagattaactcagattgaccttttccatccctctctttttaactctttaatgccatgaaaaatttactttttataactttgctcattcatccgacactctccaaccattgggttgttgccatgttatattttttactggtaaaattcttatatccttttaatgattttatcatttcac

SEQ ID NO: 49297 - DNA, 2187 bp, Glycine max
  unsure (1)..(2187): unsure at all n locations
  Clone ID: PAT_MRT3847_15522C.1
ggagtggcacattgtttgtctcggaaaagcaaagaaacatggtattctgggatgaaggaaaaatttgtacaaatgatgaagagcatctatgaaacagaagttacagattggccagtaccactgaaaatcatttctggaaccattcttgcaacaattttgggaacaaccttctggaaactcttttcctttcttagagatgctggtaatgggggagtttttgttgtnnntgtttnttntttttttacatctttntgtgttnttaaatttctgattcttaatttttatttattaattgttactgtgttactttacaggcgtgagcgggggcggacgcgtgggtggtgccaccatagttggtgtagctagcgagggagggatatagggggaagcgtttattcattcattaagatggcatcggagcttcaattgcccccaggcttcagattccatccaacggaccaggagctggtgttgcactatctctgccgtaaatgcgcgtcgcagcctatcgccgttcccatcatcgccgaaatcgacctctacaaatacgacccctgggacttacccggattggcttcctacggagagaaagagtggtacttcttttcaccacgggaccggaaatacccgaacggttccagcgccgaaccgggcggcgggaaccgggacttatggaaggcaaccggggcggataagcccattggtcaccccaaaccggttgggataaaaaaagctttggtgttttacgcagggaaagctccgaaaggggacaagagcaattggatcatgcacgagtatcgtcttcgcagatgtagatcgctccgttcgcaaaaagaacaccctaaggggttggatgattggggttgctttgccgtatttacaacaagaagggcacgatcgagaaacatggctccaaccgtcgaagcacgttgtatagccgaaatatgagatcgagcgcgagcgagccaaatggaagggtgggagaaaagcctcgagtttcgtttaattcctgcatgccacccaacaccagaacagcttcacgacgcagttccagggcaataatcagatgatgacgccgctgaaggacacgtcatgtactggcccaacaagcccttctgagcaaaccgatccacgccgcccattcgcataggcacggaagcccgagattctgaaaagcggtggaggttgtctttgcagccacacacaatcaattatttaccaagttagcttacctagggctggcccaattccagggcaataatctgatgttgcggctgctgcgcggcatgcgcatgtgccggtgcaaccggtttacatgtacttcgacccgtcggattcaatcccgaagctgcacacggactcgagctgttcggagcacgtggtatcgccggaattcgcgagcgaggtgcagagcgagccaaagtggaaggagtgggagaaaagcctcgagtttccgtttaattacgtggatgccactctgaacaacagcaacagcttcacgacgcaattccagggcaataatcagatgatgtcgccgctgcaggacatgttcatgtactggcccaacaagcccttctgaacaaaccgatccacgccgcccattcgcatttgcacggtagcacgagactcaaggtctatgagtgtgcctgtgcgaccacacacagacgattatttatcaagttagcttagctagggcaaagaaagataaaaacattgaagctggaaacgcatgtgtttgttgggtccaccgtctgcaccggttctttttggtgttttgctatgtgacgacgacgacgacgatgacgatccaacggtgcatgtttgttgacctgtccctagtagtagtagcatgtgtacagctattgtatgtagaatgtagataggtacactactacacgttgttgtcatgtgatcatagaagctctcttaccgggaaaaataaaaattgatagaaggatggaaggtgtatttggaccttccctaattaatatttgttgaattattatcattagtatgtgttacatctaatttagtaggtgctcctttctcttgttttttaggtcctttttaatcgagtatcgtgatatcctactgtgtgtttacttttttattttctatctttagtttaatttattatgtaataatgtaattaatagtctaaaacaagtttagcttttttttttcttt

SEQ ID NO: 49298 - DNA, 565 bp, Glycine max
  Clone ID: PAT_MRT3847_15523C.1
acgagctggtgccgctggtgccgttcgccttggttttgaggtaataagatcaaccaagagacccaattgttttttaacacattctttattattaggaaaaattcatcgagagacacgaaatgtcacgagtcacactttttatttaataaatcttgcttataattttgtgaatcctaataatttaattgaaatgtgtttatgatataaaattataatattattcaatcacacatgatatatataataagtctcttaaagcttataataccaatttttaaagtcatttaaagatgatttttgattgatggaaaatataagactttatacactaacagtgcatcaaaaataaaatcctattatactatacactaacagtgcatcaaaaataaaatcctattatacttttgttactgataaagaatgtgcaagaaataatgtattattagaaagtgtataaaattatattatcatttattcataaatcagtcgtttgttaatctttataataacaatttttaaagtgatcattttgaggatgatttctaattgataaagaatgtaaaac

SEQ ID NO: 49299 - DNA, 2367 bp, Glycine max
  unsure (1)..(2367): unsure at all n locations
  Clone ID: PAT_MRT3847_15524C.1
tcgtccacgcgttcgcccacgcgtncggattcttaatttttatttattaattgttactgtgttgactttacaggattggctacttatggagagaaagagtggtacttcttttcaccacgggaccggaaatacccaaacggttcgaggccgaaccgggcggctggcaccggttactggaaggcaaccggggcggatatgcccattggtcagcccaaaccgcttgggattaaaaaagctttggtgttttacgcagggaaagctcctaaaggggacaaacccacgctggctcctcggcacgtgtggcggtatcggctataaataaaggggtctctcttatgttctaagtttgaagcggctcgagcatagttggtgtagctagcgagggagggatatagggggaagcgtttattcattcattaagatggcatcggagcttcaattgcccccaggcttcagattccatccaacggaccaggagctggtgttgcactatctctgccgtaaatgcgcgtcgcagcctatcgccgttcccatcatcgccgaaatcgacctctacaaatacgacccctgggacctacccggtaacattatcttcaacttctgatatattcttattcttaattcttaattcattcattttttgaattgttattgtacaggattggcttcctacggagagaaagagtggtacttcttttcaccacgggaccggaaatacccgaacggttccaggccgaaccgggcggcgggaaccggttactggaaggcaaccggggcggataagcccattggccaccccaaaccggttgggataaaaaaagctttggtgttttacgcagggaaagctccgaaaggggacaagagcaattggatcatgcacgagtatcgtctcgccgatgtagatcgctccgttcgcaaaaagaacagcctaagggtacatacatacatgaatgatgatgcatgccctttctagttcaagattattaggataggataattgcatgaaattacgactttgccctcaagttgaagctgaggatgataatcatttcccatgcaaattgcaaaatctatggccgtaatatcttaaatgttatctcaccgcgcagaaccttcaccagttgaagacttagccatcgcattaaaaacaataattgatgtggaaagagaaaaaattaaaaatataaaatcttctgccaaatcgcaattatcactttctatttttagaaattattccttcttatcactctcacctgccaccgcctgcgagattaaattaatcttacgttggtttccgattatgcagttagatgattgggtgctttgccgtatttacaacaagaagggcacgatcgagaagttccaaccaagcagcgatgttgttgttagccgaaaaatggaatcatcggagatcgaagacaggaagccggagattctgaaaagcggaggaggttgtcttctgccgccggttccgccgccgcaagcgaaggcggcggtgaagacggattacatgtacttcgacccgtcggattcaatcccgaagctgcacacggactcgagctgttcggagcacgtggtatcgccggaattcgcgagcgaggtgcagagcgagccaaagtggaaggagtgggagaaaagcctcgagtttccgtttaattacgtggatgccactctgaacaacagcaacagcttcacgacgcaattccagggcaataatcagatgatgtcgccgctgcaggacatgttcatgtactggcccaacaagcccttctgaacaaaccgatccacgccgcccattcgcatttgcacggtagcacgagactcaaggtctatgagtgtgcctgtgcgaccacacacagacgattatttatcaagttagcttagctagggcaaagaaagataaaaacattgaagctggaaacgcatgtgtttgttgggtccaccgtctgcaccggttctttttggtgttttgctatgtgacgacgacgacgacgatgacgatccaacggtgcatgtttgttgacctgtccctagtagtagtagcatgtgtacagctattgtatgtagaatgtagataggtacactactacacgttgttgtcatgtgatcatagaaagctctctcaccgtacaaaaaaaaaaaaaaaagtgatagaaggtctatttgatgaccttctaattaatatatgttgaattattattagcatgtgttacatctaatttattaggcgtgcctttgtcttttctcatttttttaggtctttttaaattgagtatcgtgatatcctactgtgtttactttttcatttcaatatcttttgttttttatgtactactataatataattaatataaaacaattttagtt

SEQ ID NO: 49300 - DNA, 285 bp, Glycine max
  unsure (1)..(285): unsure at all n locations
  Clone ID: PAT_MRT3847_15525C.1
gttcacgcacncggacgtaagcnctgaagncggcncgagctccttcgntcgttgatgcnnatctagagtcgtgtgttcantcgncnngtcgcngtgncntgncgtnngcgttcctganactagnttnngnaagtnctatttcaggctgtaagaantaaagatgtntgggaggngcatcgnagaagangnataagacnnggtgctactaaatcctntgcgtctngaagaaggctgncgnagggtgnactgaagaagttttacanggtnnccgncngcangaatcat

SEQ ID NO: 49301 - DNA, 1822 bp, Glycine max
  unsure (1)..(1822): unsure at all n locations
  Clone ID: PAT_MRT3847_15526C.1
cgatttctgattcttaatttttatttattaattgttactgtgttactttacaggattggctacttatggagagaaagagtggtacttcttttcaccacgggaccggaaatacccaaacggttcgaggccgaaccgggcggctggcaccggttactggaaggcaaccggggcggataagcccattggtcagcccaaaccggttgggattaaaaaagctttggtgttttacgcagggaaagctcctaaaggggacaaaagcaattggatcatgcacgagtatcgtctcgcagacgtagatcgctccgttcgcaaaaagaacaccctaagggtatatacactccgtacttctttctagttcaagattattgctcgaaattacgactttgtccctacgctctcatcggctgaggataagtccaggattttggtggaaaccatgcaaaatgtatggtcgtaatatgttatcatgtgaaaactaccgcgcggaaccttcactagttgaagacttgccagcatgtggtctgggcttgggcccaagaaacttagccatcacattagatccaataaaaaaacaataattgatgcggaaagaaataaatcttctgccaatcgcaattatcactttccatttttagaaaactattccttctttatctctctcacctgcctccgattgcaatacttataataataaatgaaaatgaagaaataatcttacggtggttgtgattttttttttttttttgtcgcagttggatgattgggtgctttgccgtatttacaacaagaagggcacgatcgagaaactgcaaccaagcagcgatgttgctcatagccgaaatatcgaatcctcggagatcgaagacaggaagccggagattctgaaaagcggaggaggttgtcttccgccgcctgtgccggtgcctgcgccgccgcaagcgacggcgaattcggctcgagcttcgacccgtcggattcaatcccgaagctgcacacggactcgagctgttcggagcaggtggtatcgccggaattcgcgagcgaggtgcaaagcgagcccaagtggaacgagtgggagaaaagcctcgaatttccatttaattacgtggatgccactctcaacaacagcttcatggcccaattccagggcaataatcagatgttgtcgccgctgcaggacatgttcatgtactggcccaacaagtccttttgagcacatcatgatggttttaaattacgatccgcaattgctcttaagattttctgactcaccatgcgaccacaatcgtaatttaaaaccatgtcacataaaatccacgcgcgccgcccattcgcatttgcacggtagcacgagactcaaggtccatgagtgtgcctgtgcgaccacacacatacgattattgatcaagttagcttagctaggccaaagtaagaaagaaagaaacattgaagctggaaacgcatgtgttggctccaccgtttgctttggtattttgctatgtgatgatgacgacgacgatccaacggtgcatgtgtgttgacctgttcctagtagtagtagtagcatgtgtacagctattgtagaatgtagataggtacactactacacgttgttgtcatgtgatcatagaaaggtctctcaccgtacaaaaaaaaaaaaaagtgatagaaggtctatttgatagaccttctaattaatatatgttgaattattattagcaaaaaaaaaaaacaacgccntaggcgtgccctttgcttttctaattttctaggtctttttaaattgagtatcgtgaaagtccactgtgttactttttcattc

SEQ ID NO: 49302 - DNA, 953 bp, Glycine max
  Clone ID: PAT_MRT3847_15527C.1
ggtcgaccacgcgtgcgccactcgttcgccacgcgttcggattctttatttttatttattaattgttactgtgttactgtacaggattggctacttatggagagaaagagtggtacttcttttcaccacgggaccggttttacccaaacggttcgaggccgaaccgggcggctggcaccggttacttggttgcaaccggcgcggattagcccattgtgtatcccaaaccggttgggattaaaaaagctttggtgttctcgagccagttggtgttagtcttggtgtagtgtagctagggagggatatatatctgagtaagatggcatcagagcttgaattgcccccaggcttcagattccatccaacggacgaggagctggtgttgcactatctctgccgcaaatgcgcgtcgcagccaatcgccgttcccatcatcgccgaaatcgacctctacaaatacgacccctgggacttacccggattggctacttatggagagaaagagtggtacttcttttcaccacgggaccggaaatacccaaacggttcgaggccgaaccgggcggctggcaccggttactggaaggcaaccggggcggataagcccattggtcagcccaaaccggttgggattaaaaaagctttggtgttttacgcagggaaagctcctaaaggggacaaaaaagcaattggatcatgcacgagtatcgtctcgcagacgtagatcgctccgttcgcaaaaagaacaccctaaggttggatgattgggtgctttgccgtatttacaacaagaagggcacgatcgagaaactgcaaccaagcaagcgatgttgctcatagccgaaatatcgaatcctcgggagatcgaagacagggaagccggagattctgaaaagcgaaggaaggttgtctttccgccgcctgtgccccggtgcctggcgccgccgcaaggc

SEQ ID NO: 49303 - DNA, 230 bp, Glycine max
  Clone ID: PAT_MRT3847_15528C.1
gtgggttttttttttttagacacacaagggcagagagtttttaaatcatagaaattatacatggaatacaacaacttagttgggggcctttattccgtaaattaataaaatagaagagagacatgtgtatcttagctggggcttatacatcgacatacgggagcgtgagttattagccaccattacaggaaaagaaattgaaagcacaccacacaagcgcgaaggaatgg

SEQ ID NO: 49304 - DNA, 1246 bp, Glycine max
  Clone ID: PAT_MRT3847_15529C.1
ggcaccacgggtaatgaaacatatagcctgttcactgtttggcgccgagttgctcagtgagtgagtgagtctgcacaaaattacatatccatcgactcacagacacgacacagcagaaaaccctctcgaattgaaaaaaaaaatggtgtatggaggagcaatgtgcgctcacgcgcacaaattcctactctcgccccgtgccctcaacctttgccgtcaaaacaccactcgccttcaacaatttcaaactctcactccgctccactctcaatcccttcctttcaacttcaaaaactccgccacccccttcaaacccaccctcatccgcctctccgccctctccaacgatggctccggcggaaacggcccacatggcggcgccggcggaggcggaggctctgacggtcccaattctggcggcgccggcgatggaggaggcaagtggtccttcttgtcatggtacttggctcttcttggaaaataccctgttgccgtgaaagctctaacatcttcaattttgaatctaattggagatttgatttgtcagcttgtgatagaccaagtgccgtcactggatttcaagaggacatttgtctttacttttcttggttttgctttagtgggtccaacactgcatttctggtatttgtatctgagtaaattggttacacttcctggagcatcaggtgcacttttacggcttgtacttgatcagttcttattttcacccatattcatcggagttttcttatctacattggtgacactggagggaaacccatcacgagctgtacccaagcttaaacaggagtggttttctgcagttctagcaaactggaaactatggataccttttcaatttctcaacttcagatttgttccacaacaatttcaggtccttgctgccaatgttattgctttggtgtggaatgttattctctcatttatggcacataaagaggttcttccaaaatagagttcagataaagagcttgcaaagaggctgcatgagctgtattcaaatcttttaaatgtttttgtaatttacatgaacatgaagactagcagttgtataaacacgcatgtggattttttgtatgcactttcatcaatgcaagcttcctccacgtgtttcctaggattctatatcatcgagaccatacaggagggtttcttttttgtttaattgtattttttattggctaaattattcagttggtcccttatcttcaaaaaaaaaaacacc

SEQ ID NO: 49305 - DNA, 239 bp, Glycine max
  Clone ID: PAT_MRT3847_1552C.1
acccactcggccgtaatttttttttttttttttttttttttttttttttttttttttttttttttttttttttggtcggctctttataagatccagcttacttactgttgatgcaacgtaaattttttttattgtggcacctaaatcaacgaaatggaaagcgcttacatcttacccaccaaaataccttcgagccacaaaattaaaaacggaagggcggaatgacaaataaaagaccc

SEQ ID NO: 49306 - DNA, 282 bp, Glycine max
  Clone ID: PAT_MRT3847_15530C.1
ggggattatcaattcttccggactaagaatacaaaagtgaccaggggaaacccgctctgtcaggtgcctactgtaggaaagcacacatcatattactatgtgtggatatacatgcatcgtaatgagtggatatttcaagggaatgggacccttcattcgtacttaatccttatgccggaaatggcaccatgcctcggaaaatgtaactgcttatttcgaaatgggacgatccaaaggtggttgcactatctattaggcaaactataaatgtaaagacccttc

SEQ ID NO: 49307 - DNA, 466 bp, Glycine max
  Clone ID: PAT_MRT3847_15531C.1
ttttttttttttttttttttttttttttttttttttttttttttttttttttttttttttttttttttttttttagggaaagggggagctggaaaaaacaggccagccactggggcaaaaacaaattgggaaaacaaaaaaaaaaaaaaaaaggggggcccaaaattcttaaaacttaaacaaaatttatggaagcccccaaaaaaagggggcccctgggggaggggaaaaaaaaaacaccctaatgggattttgaaacaaaaaacaaacaaggggaaggttaaaaaaccttatgaaggaaggcatatcttacacattctcgggggaagaatgaacaaaaaggctgacaaggggccccctgaattgaacttcttgccctggagggacccccaattgggaggattttttaccccgaaacaaaacaaaagggggaaaaaagaaaataatgtgcaaaaataccgatccc

SEQ ID NO: 49308 - DNA, 827 bp, Glycine max
  unsure (1)..(827): unsure at all n locations
  Clone ID: PAT_MRT3847_15532C.1
gagacagagaggaagaagacgatggcggaggatccgatttctagcttctgcaacgcattggcagctttctgcggccacctccactcctcttccgatgccctcaaacaatccatcgatcgccgacctattcctctcgattccgcctcgtcgaccttcttgcaatgcctcaatcgccgcgtatcgaccgcgagcgccgacctcgacatgctcgattccatgtccttcggtacagtctctttcgaagagctcctaggtcactgcaacgaattgtacaagaagaaccactccgatctccttcaacttcaagatcgcctccagagctacggttatagtgctgttcctgatattgaggaggcggatgaagatgaggatatacaacgtcaagatccggaagacaaattggatagtccgtcttctttctatggatcactctccgtcgccgattctagcttcaaaagtttcgaagaagatgctttgtatccttaatacgattttcagcttctgaacaaattttatatggaatggaaaaacagaaaaaagaaaaaagatttggtcagaatcagatgaaatactgcaattagattgatttgaagtgctggatgatagcgagtacaatttgcatacgatagccttttcaatttttcattcattntatttgctttggcactttactttccagattttttttgtttaaagctctgaaaaagattgactattaatattataatggttgaatcattgatcagttntgttgattgttatacaataagtttttagatcccttaatttctttagactgatgatctttgagttgaaaagtttgggct

SEQ ID NO: 49309 - DNA, 755 bp, Glycine max
  Clone ID: PAT_MRT3847_15533C.1
cagataatcaagcagaagcagatggatgccactagaattttggcacaaggagtatttgtgttccttgttattacgtgtgtgggagccgagagcgagcccagaaccattttggttggagactctcaaggttggcaagccggcactaactacacccaatgggccatccaaaatagccccttccacatcaatgacacacttctgttcaagtatccagggaattccacgacgctggctcagagtgtgtacttactaccaaaccagtggagctacataacgtgcgaattcagaggggcaaagctgttgggtaacgcaactgagggtgatggcgagggctttaaggttgaacttaatcagttgaaaccttattactttgcctctgcggaaggcaacttttatgactgcattgctggcctttcaaagttcattgctgtgccatcaacaagctctggctgaatccttaatttctcatcctttgcaccaacaaattaagtaatttgcatctgacactattgaattccaaaattaaataaatggatccgggatcctcatcagccaaacattgtacgggtgttatgctatgttaatgcacccttggtcctagtatgttttcctttcatgtatgatgtattatttttgtctcgtgttcaataaaactgcatttggtttggtattcttcgtttttcggtttaggctcaattagtcaattgtcttcagggctgctttgaaatatcgagaagtccccgtttgggagtgtt

SEQ ID NO: 49310 - DNA, 350 bp, Glycine max
  Clone ID: PAT_MRT3847_15534C.1
aacacacgtctactgccgcgggagatttacctgaactctaaggccggatcagagtcgaaggctgaggacgccgcgtggaatgaagtggcgttgcctgagatactcagatgactggctggcaagactacttggacaacccaggcctgatacacgcacaaaggcattcagtgccaatcaggccacccaaagtatcacgatcggggcacacagaggagataccgtcttgctcgagggactcttgatgaacagactgatccaatgtatccacgtggactcgttgacccattgtggctcgctgacgacccagatgctgctgctcatcctgatgccaaagagctcaagaatggcca

SEQ ID NO: 49311 - DNA, 238 bp, Glycine max
  unsure (1)..(238): unsure at all n locations
  Clone ID: PAT_MRT3847_15535C.1
cttcgtnccttncncaacccaatcttcgccttcgcccacaacaactcctccttcaggatcgctgccaacgttactttccatttttacccttcatcctcgagnaaannatggcgaacgcagcatctggnatggccgnccatgntgagtgcnataangtttctggagctcaaggcgaanaggacgtaccggtatntcgntnttaagattnaggagaaatngaancangtnatngtggaga

SEQ ID NO: 49312 - DNA, 236 bp, Glycine max
  Clone ID: PAT_MRT3847_15536C.1
tctttgtagagataaaatagttagattgcattgagaatatgaatgtataacagactaaacaaaatcaatctatccctagtgatgactttatttagatactatttcctagttctattagaaaataacgtttcccaatgctacccctaaaacttaccatgcaaatggatgatgaagccgtaaacgacaacattaagcaccaggaagggtaacgaaggtaataatattgaatagttagg

SEQ ID NO: 49313 - DNA, 312 bp, Glycine max
  Clone ID: PAT_MRT3847_15537C.1
aattcgaatacaggctatttatataacaatgcaatgtgcacttgaaataaatacatattaatggatactaagtatcagaatgcgtgtgtgagataataccgttattcagtgattcatgaagcatcactaacctgtacctgtagttaaaagagttccatctgttcttgattagcttacttctaatggacttatgcttactcagtgattgactagcaagaagatacgataatatatgatcagaggaatagtcaggtttaagtaagcgcgtaactcgacacgacactcccttagctgtccagttactaatgactc

SEQ ID NO: 49314 - DNA, 276 bp, Glycine max
  Clone ID: PAT_MRT3847_15538C.1
gatttgtagtaatagggaggatgagaagtgggagatggtggaggaggactttgatcgtagtaaggtggtagaattattctcaaagataatctaccctattctttggatatagggctgtataatgatacttaaatgttaatacaattattcatcctcatccccctaaggtacaacctattacatctgtcatgaaaatacgctttataggcactcattctttatagaatgcactgtttttttttactgattcattattactgaagctacttgataaca

SEQ ID NO: 49315 - DNA, 346 bp, Glycine max
  Clone ID: PAT_MRT3847_15539C.1
atgccatcaagttgcaactgtatgcaatgtatcatcaacactctactgtagtgcacggggtttgcatgcctggtcttcaactaacaaacaggcacaactcaactctattaaatactccttgggcatagtgtgcatataggacatgtttccttgcccaatggacatgaaaaatgggcgcgcgttttgctcacatacacgtcagtcgtttatctactcccatgatgatgtgcacccactattcagtgaactgcagcctgtgcactcagtaacagatgggtgtgcatggctcccatggccatgtatgatatactgaacatatgcttatgcacatctaacctgagcatct

SEQ ID NO: 49316 - DNA, 430 bp, Glycine max
  Clone ID: PAT_MRT3847_1553C.1
ggacaaaaaccccgggggggttggcacttttatttaagggaaaacaatgggtaaacatcaaaaaaaaaacaatttggggggaaaaatggaagggggggggggaaaaccaaaaggattaaaattccacccctacataggggaaaaccaccataaggaacaaccccctattccaatcttccttaagggggctaaaaaggggaaaaaaaaaaaaggccgggcattaaaaggttttgggcccaaagccatttgggggggggccccttacagccactttaagggagttcaagttttcaagaatatatattaaattttccaaacccagggggggcaaaactccatgaaaaaagggggggtttcaacaaagccttggtacagggttaaacgacaaaaaagctatcaggggaattaatgggggggccatttcttccca

SEQ ID NO: 49317 - DNA, 1197 bp, Glycine max
  Clone ID: PAT_MRT3847_15540C.1
ggaaagtatgagcacgtaaaaattaaaagtgataaataattgtgataatgaaacagttagaagcaacgagcagcggctaacaccggaatctgcaaactcaaaagttccatctcttcttccacacatccatcgttaatcattttcccgcaaaatattttctttctctgttctgtgccttcttctccaccgttggttcaaaaatctcagccgttgatcagattgagcctccgtgttgatcttcatcgccatcatggaggtccgttccaatcccgcctccgacaactcctccgaccaccttcgaccgcccgccgtttcgtccaagcagccgctgccttctcctaccgccgtcgacacctccgccgtttctcagagactccagaaggaattaatggctctcatgatgagtggaggagatctcggggtgtcggcttttcctgatggagagagtatttttacatggattggcacaattgaaggtggaaaagggactcagtatgagggtttatcttataaactctccttacgttttcccctagactatccttttaagcccccccaagtgaagtttgagacaatgtgctttcatccaaatgttgaccagtttggcaacatttgtctggacattcttcaggacaagtggtcttcagcttatgattgcagaactattcttctgtctattcaaagtttattggaagagcctaacctggagagtcctctaaacagctatgctgcagcactttggaatgataaggaagattataggagaatggttcacaaacagtatttttctggagaggctcttgaaagctgattggacacaaattccaaagcaattagtttccacgtcatatttgcctgaagaaaaagtctgcaccctataaatgtctttttttttttgtgtgcgatttgatattgtaacctgaaactacgagaactcggaagtcctctaaaagtcttttaattactttgtgtatagaagtaaaagttttcattgcaaaaatgccaaatgacgcaatgacatctttgtgatattttttgcttcggatgcacgatgcttacaactgtatattcatgttacgtaatatctgtccctttgaagccgatgcttggattctttactacatggtcatcctaatttctaagtgcctcaaaattcattaaaaaaaaaaaaaaaaaaactggccgagactagttctc

SEQ ID NO: 49318 - DNA, 539 bp, Glycine max
  Clone ID: PAT_MRT3847_15541C.1
aacttataacacttgaagttcaagatgcttaggaattttgttgggaggatacaaaagggcccgtcactgtttgtagcaagaaggcctgctgcattcagctacttcagtgaagatcgtgccacaaccgcggcaccggatgatgttaaggaaggcctattttgctgttcatgcaattaagggtgaggacaaccaagaggtttattgttgggttagattacttgaatgatcctgcattcttgggcacttctggaccaagctcaagaagagtttggtttcaggcaaaagggagctcttgtactcccttgttgccctcaagagttacagaagattctaaatggtcccaaagcatagagcaaggaaccaaagatgaagaaagggatggtagtcatcttaatttccattgtaaagaacaaatattagagagcagaatctaattacttattactttttatatctccaataatgttcttgttctttcaataaaaacaacaacacatcaatgaacataattaacacttatggtaaaaaaaaaaaaaaaa

SEQ ID NO: 49319 - DNA, 261 bp, Glycine max
  Clone ID: PAT_MRT3847_15542C.1
gctgctggcactggatttggcaaaagcatgcagtttccaaccttctttcttgatcctccatctgaaacattgccggagatctgaaaatgttgtgcgagtgattaagtgcactagcgtggaagtgtttgaaagaagagaaccccaagctcttaacatatgttcagtggtgcggaaagcttggaagacatttcattctaacatgaaaaacttgattgtgaagggtccttcaactaagagacaagcgcattcttcctggactga

SEQ ID NO: 49320 - DNA, 380 bp, Glycine max
  Clone ID: PAT_MRT3847_15543C.1
gggcacaatgacaacagttaagtttgaacttagaatattgtgcaaattatccaaaattttcactactaggccaactgcagtgggttggattaataaggtcaagggatatcaacagagatgattatttcagtgggttggatacttttctgttttttgttagcacaaaaatattttatccctggatgtacgtgaatttctagattggtcgaaggctccactaacacaaaggaaaattctttcaatctttcaatcttttgcttttcctcaccttaactggatttgtgcttttgcatgccttgaaaccataaacccgtattcaaaccaaagcaaatcacaaccatccttttttgactaacatatctataagagccaccaaaagc

SEQ ID NO: 49321 - DNA, 320 bp, Glycine max
  unsure (1)..(320): unsure at all n locations
  Clone ID: PAT_MRT3847_15544C.1
ggagttggttagctccaccaacaagantgatcacgacgataatcttgtgttggctaacacacatgaattctctgatggaaatttcccagcggattcttggctaccaatatatgtgaattgcctttatcctgtaagtcaatcaccttcagaagctgtcgtcgtaaatgttacatgtggtagtggacgtggtggtccacccaccacagctcggattattcccgaagctaacaatctcaccttcagatatcaacaaaaaacatctctaccacacttggcaaaggccaaaaatcagctcttcctactatagctgatccttctcc

SEQ ID NO: 49322 - DNA, 301 bp, Glycine max
  Clone ID: PAT_MRT3847_15545C.1
taccacacatagatccattcatcaattctaatggccgatcatctcaccggctaacgtatctccgaaatcaaggaagccttcagcctctttgacaaggacttgtatcgttgtattaccaccaatgaacttttgaccgtgattccgtcactttaccataacccatctgaggcatagcttcatgacattatgaatgacgctttattcttataggaatgttaccatttatttcccataattccttaatctcatgtctttcacgattaaatacactgattcagattataatcttaatgaggctttc

SEQ ID NO: 49323 - DNA, 403 bp, Glycine max
  Clone ID: PAT_MRT3847_15546C.1
ggcagatgaaaggggaagcattgggtccagagccatgcaggggactgggctaccccttaccactcccctgggccagccaacttaacatcctggtgaccctcggtccctactgcttgcaatagcggggcggtggggagccgacctaacaaagaaggcaacgtcgggggaaaactgaaatgtggtcaaagggaaagggatagagggaaccctacggagagggtactaaacccacatttggtcctttcccaggccctaaagcaggcattacctggcttggagcaccccctgtcttgacactgggatccccaattgctcctctggctgcccttggtggccccccattcggacccaactgggcggatgactcctgaaccatagaaagaatgattgctggcctgccccc

SEQ ID NO: 49324 - DNA, 338 bp, Glycine max
  Clone ID: PAT_MRT3847_15547C.1
gggaaccaaaccaagggaaagtcccaaattaaataattttttctgggtaacaaaatttggatcccatactacatgaaaaaaaaacagggggtttttaaacaagtcctgaacgggaccaaacgaaaactccatttaaaactggtttcattttccacactaatattttttccactataaccctaaaaaggtaagccgttttggacccacaaatttcaaattgaaggaaagggataccttggagtatttgaccttcataccggttttgaacttgaattaacactcgaacttttttagtagcgtttcttacatttgccacccctattaaagcttcttgaatg

SEQ ID NO: 49325 - DNA, 274 bp, Glycine max
  Clone ID: PAT_MRT3847_15548C.1
aacaaaacaacaagactgcctctggcaatatattattcgaagtttcaaaaatgggggtttttaaccttataaaaaaaaaggccacaaaccaccccatgggaaaaaaaaaaaatttggggcaaaagtgggttaaaaaaaagcccataagtaacggaccaaaaccaccccagtttttaaaaattgagggtccccaaaaaaccgaagaactcaaaacccccaactacggggaaaaacaaacctaacatgttttaagccagagacccccgcttaattt

SEQ ID NO: 49326 - DNA, 373 bp, Glycine max
  unsure (1)..(373): unsure at all n locations
  Clone ID: PAT_MRT3847_15549C.1
aacaaantggggcaacaaccgaaggaaacaaancnaaataaaggggccaacacgacagttttcggacttctgcatcactacatcaactgaaaatattaaaaggagaatcggaagttgaatcaacttcttgatacactggactttaatcaacttttcatcttcacgaaaagccttaggagagcacctaatctctacaaactacttatggagtgcaactttccatctatatgcattcactctaacatgtcccattaacaaacgttaaagcactataaacatttcaaggaagggcatacaacgattcttattgcaacacattaacttagaagatggatttatattcaacatatcaacattcgtataaactatgaca

SEQ ID NO: 49327 - DNA, 387 bp, Glycine max
  Clone ID: PAT_MRT3847_1554C.1
tgctgatggggggacggatgtgggcgtatacggtgattgcataaatgggagtctctgcagagctgaacacgcgctcaaacgatgatactgctaatactcatgatgagctattgcggtcgaccctgtcagcatatgaccatgttgttacctgatctgaagccggagaatgagtgttgccacttataacgacgacgaggacaacgctcaatggccattgaattgtgatgcagtctgactatgtaaagccacctgagacgttgagtgatattgcagggcgtggttaatacgtggcttgagaccttttgcatgtatcttatgggacacaggcaagaatagcagagcattgctgtaagtgcttatattaccagatgcggaaaacagcccttt

SEQ ID NO: 49328 - DNA, 473 bp, Glycine max
  Clone ID: PAT_MRT3847_15550C.1
gatcgacgtgctcggtggccgcccttttttttttttttttttttttttaagacaataattatataaaattcatcttgtgtaaaaagaaagtgggtcattctaccctgtcactacaaagaaacatgttctttacacaatataaacacttaagagtttagaccgttggcttaatgtgctccaagtccaagcacaaacattaaaataaaagaaaaaaagattgtatataacaagacattacaaagcaaccatccttagccattatgtgcacaaagtattggaaaggaagtagcataacaacgactctttaagagctatccctcaggaagaagaactctcctaaaaataaaaattaatgaataccatcaatcaacaaatttctagctctgtgcttgttccacgtctacagaacttggactgcaaggactcaactttttggccctgctcaaaagcctcttgaatgacctcaatgtggc

SEQ ID NO: 49329 - DNA, 599 bp, Glycine max
  unsure (1)..(599): unsure at all n locations
  Clone ID: PAT_MRT3847_15551C.1
gaagaaaccacgacacaagtccaaagtttgattccaaaatgcgatcctcaagcattcgcagcttcaccatcttcaccctctttctcattgcgatcctcccccacggacacgcaacaactccaacctccaaacttcgcctcaaacctctctcttctcccttttcaacctctggacttaattttcctttcttcttcccttcattccaatctgttacccatagtgttttctagaaccacaaaatgcttcaacaccaaattgttcagtcccctgctatgctaggccttgcaaatcctaactccccatcaattccgaaccctacccctccaaagctccctccaacacagacccatcacccccaagaccgcaactcttcaaccccttcttcagctctcttgtctctcctcccacctcacctcagagcccaagcacttcttgcccaaatggcttccttagcctccaagctctttgaagtttcccccaatcggtccctttgggtcactgcctttcgtggatcccttccaactttcctctcttnccattcgtctaccccacttgacacttctcccttctgatggcaaaaaaatcatctcccttttact

SEQ ID NO: 49330 - DNA, 473 bp, Glycine max
  Clone ID: PAT_MRT3847_15552C.1
caggagaattgctttaatgttagcttcacatgtagagaccaattgtataatgatactttaaagtcctgtacctttactctagcccacatcctcgacctaagcttaaccatatcaaagacatgatctgtactttttggcgtatcaccgaaaatgacatcattccgatgtatcccaatataccacaaaaaccaacgccatattgataagatttactgtgaagtttagtgaaataagcaggaatgaaggagatgacgggagagtcacaaaactgcgtgtatttgtatccactgcatatgattgttgtgattaggattaaggtttggatcttaaatcaaaagtttgctgaaattgtattgtatccaaatgagtcacacgttgaatttgtgtggaggttagagaggtcattgcacaagggggatactgtgccttaagttgcgtggctgtatgtttgaaggctattttggtgaaaaata

SEQ ID NO: 49331 - DNA, 813 bp, Glycine max
  Clone ID: PAT_MRT3847_15553C.1
ggctcgagctggaacttgggattattctgatacagcacctccaccgttactactatgggccgtcactcttccagcaaccactctccctcctcctcacgccgccaccggagccaccgcagcagcgtctctccgcctctacgagacaagcacgagcattccggctgcagtacggccaaaccggttcggtacggttcgccggattctccacttcgctcgccctctccgtctctgcggacgaagcggctgaagaaaggtcaatccgaacgcgagcgggagcctcgagagaacgagaggaaccatggcgatggtagcagagggagaggctccgagagggaagccggtgagcggagggagaagaagagaacggagaacgatgagagtaacggaaggagtaacaaatcggagaagagaacagagtacgaagacggtggcggaaggagtagcaaatcggataagaaaatggagtacgaagacggtgggggaaggagtagcaaatcggagaagagaatggagaacgatgacggtggcggaaggagtaacaagtcgttgcggtcgaggcacgagaggtcgccggagcgtgaccgcaatgggaggagccggggtaggtctcagtctccgccacgtcaccatgcttccgccgcggatgcaaaaccacgtgatgagatgacaaacgcaagagaagctgaacaaatggatgatgaggatgattctattaggaagatgaaggctgctgaggaggctttggaagaaaaacagaagcaaaagccttcatttgagctatctggaaagcttgcgggtgaaacaaatggagtt

SEQ ID NO: 49332 - DNA, 995 bp, Glycine max
  Clone ID: PAT_MRT3847_15554C.1
ggaattcggcacgaggcatctctgtccttaaacaacaacaacaacaccaactcttcttttctacggctgcgagaagacgacagaaggggggaggccggtggcagtggcactgtcaccaccgccaccacttccgaccacggtgacaaggagaatgtccctcctccgcaaaagggtagtaagaacaaaattccccccgtcgttcctacgtctttcaagaagaagaagcgcagcaagagaaagcccaagagggtgcctcttgctgacatcacaagcctcttcgataattccgctaccactactactactactactactactacggtacggccgcgtcaagaatcccaacaacaacaacaacaacaacaacaacaacaacaacaacaacaaagtggagtttctcctcttcctaggaggtcacctcgtacctccaaaacattaaggatggggttcagatagaaattttcagtttttgcatttctttttgtttccttgcacagtttgtttcaatagaggaaaggcacaaatacattggtcattctgacatctgtgctacttttgtttcattgctgttgctgctcctatttcaatctgcaattttcttctctcattcaccatgagttgcagagtattgtattcatcagctttgttgataactaatttctgtcggagaacttagttcgttggttttagtgaagtctcctctttcaatcacactttcttttgaacccgagaccttattagtttcgctcggatcaatcacatgttggttgcagttttgtccctcgagagataaatactgaggagatttttacccacaggcctgtttgagggaattatattattaattgggaaggaagaaatgcagagaattgtattgtgtgaccatctaaattatacatctcaatatgatgtaatgcatcgtatctattttacatgaatacatatagacactgacctaagcaacatagtattgaaatacttggtttagtgtttgg

SEQ ID NO: 49333 - DNA, 515 bp, Glycine max
  Clone ID: PAT_MRT3847_15555C.1
gcgtccggccatgtattcttcattgtacttggtacataagagtggctattctgttatggactctgttttataccaattcacatgcatttgacttgatatttcatcttgttgaattggtgtactataacacggcattgaccttggtttgtatattttgcagaagtctcagataaagcttctcacaaagcattttctttggaagacaagcagaaacttgataggcagttgcatgatatggctttagccattgagaggttggaaagcagtacgcagaaacttctaatggagattgactcacaatctactgaaatagagaggctttttgaggaaaattctaatctctcaaattcgtaccaagaggcagttggggcagcagcaagatgggaaaaccaggtaacaatcagcatcaggggtttggccataaatataatttatgggtactgggttaaaccgttaacgtctcatctgtacgaccaaaatttactggatttcgctcttaaaaatcttactattac

SEQ ID NO: 49334 - DNA, 221 bp, Glycine max
  Clone ID: PAT_MRT3847_15556C.1
tgaaaaaaaaaggcaaaaagggctgcgggcaaaaaaacggtgtaaaaacgttttcaacctttccgcaactaaaagtcgcgttcttcctttaaacactttcccggggttacaattctctaagaagattttttccatcgtgagcccctataaccccctccccattcttttggccttttgcgtccgccccaatcgaatttaccttaaccctccaaagtgaaaga

SEQ ID NO: 49335 - DNA, 438 bp, Glycine max
  unsure (1)..(438): unsure at all n locations
  Clone ID: PAT_MRT3847_15557C.1
nnntttttngnttntttttttctttttttttatatgctttttttttttttcgggggnatatttttcttatttttatcttgggcccaaaatgataataatttaactttaaagagaactttatgatcctcaaccctccaaccatttaagacgaaaggaacaagttccaccctctaaagtggtattggaagaaaacacacgggagggaaacccttccccgaagaagattcccgagaaattccataatccccaatttttttttttattttcattttcccccctttaataaacagcggggggaaacttctcctgggtgtggcttataaaaacaaccttgtaaacaaggccagtgatttctccaccgatgaaaggccccgcccattaaatccaggggttggtccaagtccagcttacgacagcaggcccaaatttcaccggggg

SEQ ID NO: 49336 - DNA, 240 bp, Glycine max
  Clone ID: PAT_MRT3847_15558C.1
ggctgcttcagttggcttcaagatcgctggatctctaataacaacgggtggttctaaggcgcttattgagacgtctcgcttattaggtttgtatggctatgtttgtaacctgagcaatgacttccctctatgcttgcgaggccgcagcatgtttggtgctggagaaactgcatgatgatgattgtgggctatggggatgtgactgaatgattgcagttgtgtcctctatgatgtcatgta

SEQ ID NO: 49337 - DNA, 325 bp, Glycine max
  Clone ID: PAT_MRT3847_15559C.1
aaagaaaccgccaaggacttggaagggtctccgtgtcaccgtcaatctcaccgttcataatcgttaggcgaaggtcacggtggtccgttacgccgccgccctcgttatcaaggccctctaggagtccgagcgctaccgctggaagactaatattatcatgcacaacggctacatcacgcttgatgacatcatcgagatcgctatggttatgaggtcgatgtccatggacaatgacctcatatgctccattaaggagattctcgtaatcatgcgttctgttgcgtgctccgatgatggaaaggatccagttgacgtgcatcgagaa

SEQ ID NO: 49338 - DNA, 132 bp, Glycine max
  Clone ID: PAT_MRT3847_1555C.1
gtctttatgttcatttggagagtcagggcgaaagacaggtgatgtagcacttctgtttttaataattattgcttaaaatacctattaatagttttgggccattaaaagggacttgaggaagctccccaggat

SEQ ID NO: 49339 - DNA, 673 bp, Glycine max
  Clone ID: PAT_MRT3847_15560C.1
gatgtactgtgatatgaaaatttgattaaacatgaatcatgcatgttaatccaaacacacataaatctaagggtgatagaaatgatttgacaaacacgactttaaaagcattctgaattctgatttacaatttagtttttgacaaaaagaaaataggtaaaacgtagctactgctttagtttaagagggggaaaaaagggacaacagatcctcaagatcggtgaagatcttacttttgcaattgtctcctttcaaagtctagcagaccgaagcggataaatgaatctagctcacgcacgtgcgcttcgtcgaccccctctctctctctttgctgtccatttgtatccggcaggtagaactaggctgaaaattgttggactcaaaaacacaaaggcgttgagctgcaaaattggaaatcaacaagatggaccaacactcctacgctcctcgttatcagaatgttgctggtgaaggggcagttgcgactcatgatgggtttgttgcttctgctgcggagggagaagtagctgcgcctcaagaggaatgtgatgaggatgatgatgatgatggtgaggctcttcttgctgcggttgctgcatgtggtaagcgttatcgaatgatcccaaagccaacgaaggagacaactgatcagcagaagcagcagctggggaca

SEQ ID NO: 49340 - DNA, 392 bp, Glycine max
  Clone ID: PAT_MRT3847_15561C.1
aaaggcccaacgagaagcccaaagttttttccgggggaggcataattcaaaataaaggggggggggcaactgggtaattgccccccgggccctgggttatttaaattaggccccaaaaaagggttttttttggtgggataccaaagccccttaaccccgggggaattaaaaaaacccttcccaggggtgggttattttttacttggccaaacagcaattttgcggggggggaattgcccccttttaaaaaaaaaagccttttttcttttttgggggcctgggaagaacaatcaaaacttaaaagggttaccccaaggtggggtttttgttattggctgaaggggggaaaaaaacccatgcctggaacttttttataggcccctggaacgggg

SEQ ID NO: 49341 - DNA, 372 bp, Glycine max
  Clone ID: PAT_MRT3847_15562C.1
aaaggcccaacgagaagcccaaagttttttacgggggaggcaaaattaaaaataaaggggggggggcaactgggtaattggcccccgggccctgggttttataaattgggccccaaaaaggggttttttttggtgggataccaaagctccttaagcccgggggtattaaaaaaacccttcccaggggggggttattttttacttggccaaacagcaattttgcggggggggaattgcccctttttaaaaaaaaaggccttttttctttttggggggcctggggagaacaatcaaaacttaaaggggttaccccaaggtgggttttttgttattggctgaaggggtgaaaaaaacacatgcctggaacttttt

SEQ ID NO: 49342 - DNA, 487 bp, Glycine max
  unsure (1)..(487): unsure at all n locations
  Clone ID: PAT_MRT3847_15563C.1
ggagagagagagaactagtctcgagtttttttttttacgttgaaaagccgtcataatcaactaacctgatcgaatcttcagctaaaaattggtgataatacaattattaatcaattgctttctcctttctgatatgttactgtcttctatttttcttgaccagctcctcttggtgaatttgctttttgtgctgaaaagtcaaactacaaaatagtaatgcagctattgcattactatgtctagatgcataatgtgtatgaacaccacctagatgattgcatactctaaatagcctaccctgaatgattccacatgttcatttatagtacattttattctattatgatgctaaaagttatgcttttaaaggggtgtttggaagagtttatacataatctatttgaacttataaaaataacttatgactcataagttcttcttagcttattntattaagcttcttgttataccgcgttaagaaagctct

SEQ ID NO: 49343 - DNA, 431 bp, Glycine max
  Clone ID: PAT_MRT3847_15564C.1
aagaaacacacgtaaaaaagcaaaggcaaaaaaaaaaaagggaaaaccaagaatcaaacccccaaaaaccgggggggggggcccggcccaaaaaaaaacgagcaaaaaacgagagaaaaaaggcaaaaagggggggggggaattttgccaacgtttcctcccccccaaaaaaaaccaaaaaacaaggggagcccaatccaaaaccggaaggggggattttacattgaaaagtttggggataaaagaaaagacacaacaaaagggccaaacttgaaacccggggggggggggtttgaaaggaaaattacgaaaaccggaagagagggcccaccagggaattccgaccgcgaacctgggggggggcccggtttgcataaaaaaggagcaaaaaaggggggggaaaacaggggaaacaccggccccccggggaa

SEQ ID NO: 49344 - DNA, 259 bp, Glycine max
  Clone ID: PAT_MRT3847_15565C.1
cacactcatactctaatgtatttccaggctcaaatcctaatgctaccattgcctcgccgggcatgctggttcggtcggcaacaccttctccattctagtcaccactcatttcttgtacacgacccaacggctcttaattctacttagcatcattcgtagtcacatactcaccatctagactcttgacctaaatctcactttggtataccattcacagaccactctgaattagacctataggctcatcatatctgatatt

SEQ ID NO: 49345 - DNA, 475 bp, Glycine max
  unsure (1)..(475): unsure at all n locations
  Clone ID: PAT_MRT3847_15566C.1
tacggctgcgagaagacgacagaaggggatatcaataagattcgtgacattctgccgcacaggtttccatttcttctagtggatagagtgattgagcacaatcctggagtttctgcagtggccataaagaatgtgacaataaatgacaacttttttcctgggcattttccagaaagaccaatcatgcctggtgttctcatggtttaggcaatcgcacaagttggtggcttggttatgttgcagcctgaagttggaggttctcgtgagaatttcttctttgctggaatagacaaagtgcgatttangaagccagtgattgcaggagacactttagttatgagaatgacacttatcaaactgcaaaagcgatatggaatagcaaaaatggaaggaaaggcatatgttggaggtgaagttgtgtgtgacgatacaaggtgaatgcatacaagataagagcataaaatttgaaacttct

SEQ ID NO: 49346 - DNA, 394 bp, Glycine max
  Clone ID: PAT_MRT3847_15567C.1
atgataccgaattacactaattcattcatgtatcataaagaacaaagtcattgacgatgcatttgattttaaaaaggggaaggactccgatccgtatcgtatcggaagagtctactaatgacccgtataattctaataactacgctgtcctgcgtgttcaactttttgcgaggaaataaacggggacacgatatttaatctgggtggacagctgaaacccctacagaattcgactgagctgctccttgtggcctcctgatgctcaaaatgcataccggtagatggcatctgctgcaccatctcgattattgctcataccaggaacattagcggcagacttgggcttctctgatccatcactacctgcgatgcctagagaagccaattcttgcat

SEQ ID NO: 49347 - DNA, 403 bp, Glycine max
  unsure (1)..(403): unsure at all n locations
  Clone ID: PAT_MRT3847_15568C.1
gttgagggccaaacaagacaacctggatgccggtttcaagccttggggggctttttttacaaacccaattgcctttttttcatggatattccccattaggacttatggagaaacggacactttaattttccaaaaacccatttcactggtttttaattccaaaaggggtgtacaatgaaatgggttgatgggcaatggcgaaaatacggaaaggctttcttggaaaaatgggtattcggaagctacaatgggaggaactatgtctatctggataaagtatctctgttgttgggttttggtttgtggggtctgggcttcctctttagcttatggacaagccatgggcatggntatggagatcatgaatctaaagaagttccagcttgtgtatcaaattggaatg

SEQ ID NO: 49348 - DNA, 750 bp, Glycine max
  Clone ID: PAT_MRT3847_15569C.1
ccacgcgtccggtgggaatggtccattgacggaaaagattggtgctggttcgaacagttcatatcttattcatcccttttcaggtgattatgaacagtcatcaatttctggaacggattatatccctgttgttcatggggataaatttagaggaaatgatactgcttatattgatggtcagaaaacacatgacgtggcaacatggagcactgtcttgcaaagcactgccaaattgcataatgatccttctcttgcatcatctccttccattccatctagttcaatgggagatgtccttgaacaagaacataccatttttagtgaccttttaatgagcaaaagtggtctcactgaggtagcagagagctctcagtctctccaatcaaattggcagattccttttgaagacaattcaggaggcatgccaatgttaacccaaacccagacatttggtctgcaatttagatctgattatggcaccggtttactagggaatgaaactcgtaatgcatgttctgaaagtgctgcgatcctgtacagttttaatggtgaaccaaaagagcagcctatgcagcaaaactatctacaagagcttgaagatggacaatctcaacatgcactaaaatccaattctgcaaataaagttcctgatgaagaaactatcaactatggcttaacagtgaagcgcacattattggacaaagacgagagcctgaagaaggttgatagcttctcttcggtggattacta

SEQ ID NO: 49349 - DNA, 153 bp, Glycine max
  unsure (1)..(153): unsure at all n locations
  Clone ID: PAT_MRT3847_1556C.1
ganganctgcatcnatttntggagtnccagcttcnaangcaatngggacctgtatntggtgnncttgcccttggtcctganaggaangncacaanatgcttgcttctttnacagtttagtntcatgggtcccaagctctatgtatacacaaca

SEQ ID NO: 49350 - DNA, 711 bp, Glycine max
  Clone ID: PAT_MRT3847_15570C.1
ggaaggaacgggggggaccaccccagtatcttttatgaaattgatctgaacttcttttccattcttaatttatcttcaatcagcatgaagaagatcacttcctctcaatttcttctcttcctttcactccttgctttatggttcacatcgattgcttttggagctgataccactcacccagaagaagtgcaagctctgaaagatatgggcaagacgcttggtaagaaggaatgggacactgacatagatccatgctcaggacaacctccctggttcacatctaaggagaacaacaatgtcacttgcaattgcactatccccggtgaaaacttctgccatgttgtaataatattgctgaaatcacaaaatcttcgaggcatgctcccacgcgaactgataaggttaccttaccttgaagaaattgacctcacaaaaaactaccttaacggtactatacctacccaatggggctcctccaatcttcgcagcatttctctttatggaaatcgactaactggtccaatcccaaaagagatagcaaacatcaccaacctccaaaatttggttttggaattcaatcaattttctgggaatctacctccagaacttgggaaccttccaagcattccagaaattgcatcttacctctaacaactttaccggagagcttcctgaactttggctaacttacaacattgacagaactccgac

SEQ ID NO: 49351 - DNA, 593 bp, Glycine max
  Clone ID: PAT_MRT3847_15571C.1
ttgaggttgaacccagcgccctaaattgcacaaggtacaggaaagtcagcagcttgagactccaaaggattcagagacacttggacaacattaacaagccccctgtcctcaccatagagagtccagatggtgatctcatagattgtgtccataaaagaaaacaaccagctttagatcacccccttttaaagtatctcaagatccagaaagtaccaacgaagatgccaaggggtatgaagaaggtgaagaggacggaaattaggagtgcacggcaaatgtggcataaaaatggaacgcggtgtccaaagggaacgattccggtacggcggagcacggtgcatgacgtgttgagagcaaagtctttgtttgactttggaaagaaacaacgacggtttcctcttactcgtcgccggagtgacgcccccgatgtagtcagcggcaatggccacgagcatgcgatcgcatacactggatcatcgcaggaggtgtacggtgcaaaggcaacaataaatgtgtgggaaccttcgatccaagtagtcaacgagttcagtctctctcaaatttggattctttctgggtcctttgatggcaca

SEQ ID NO: 49352 - DNA, 282 bp, Glycine max
  Clone ID: PAT_MRT3847_15572C.1
tttatttaaagctgaaaacttcttatactaatgtcgtggtgagtctctgtcatatgatggttagcaaagggttaatgattactctggtatagacactgatgctgctgcagttgctcaacacatacaatgatccatatattcaatcatattataatcataaccactaatgtgtctgtgtctggaggacactcaagttatgaagagcatactggtcatactagctactaatatgtgtgaacggactaggatcagagtcacatggtaaggtgtgtacgaatagct

SEQ ID NO: 49353 - DNA, 1823 bp, Glycine max
  Clone ID: PAT_MRT3847_15573C.1
aatgcacacaaacgcaagttggatgatggtggaacaacatatgacaggcccatctaaacatgcaacaggcagacagtgctgaaagaactgtaactgactttgataataatgaagtcatgggtagtcaacagtattcagctcacccttttaagcgtgcccgtgatactaatgtattggaaacatcccagtttccattaagaaattcttctgatgtacctagccattcactggatattcaaatagagccagatgcaaacaccactaaccagttaaacccaggaagggatcatgctatcggcatcctgtctacaagagattctgcccatgcgtcttctattattgcagtgaatacggtttatcaaggttcagatgatgaatcaatggaaagtgttgaaaattttcctgttgatgttaataataatgtagtcaatttcccttctgttgatttgaatgaaacatctgagttaaatcaagcacaacagagtgtttgtttccaaccacttttagaaagggcaggaggggagacaggtgttagcagttcaaatgcttgtggggaagttttgaacaccgagatattgactgcacatgctagagatggacctagttttggtattagtggggggaagtgtgggcatgggtgcaagtcatgaggctgaaatcatggaactgatgcctcagttcatagaggtgatagtttaggtgatgttgaaccaattgctgaagtgattgaaaatcagggccaagctggtgaatttgagccttctcatggacttactggggattttgtgcctgcggaaattagtcgggaagatcctcaaggggatagtcaagctgtggtgtctcaatctacagcaagggctgctgatagtggctcaaaagttatagcttcaatgaaggttgaatctgttgaaagtggtgagaagaccagtagtagcatgcaagtgctaggcggccttgaaaatggtgcccatccttccctttcttgtaatgctgttgtctgttctgcttatgaagtatccaaggaagaagttaatcaggctaggaaggcatctcacattgatgatggtgcatctcacgaatcaagccgtttaattactgatgctatggggactccttacagagacaacagtaatggaggtgttgaatttgatccaatcaaattacataatgactactgtccttgggtgaatggggatgttgctgctgctggttgtgataatccctgctccagctctggtgtgggtagtgtagctctttgtggctggcagctgactttagatgcccttgattctttccagtctcttggacatcttcctgtgcaaactcttgaatctgaatcagcagcatccatgtgcaagggtgatcggttcacttccagccagaaattgttagcacgcaactcctatgtaagaaaccatggaagaaactgagacctgcaggaattgtcaaatgttttgttgagctgtttctctgagaatgagtattattcttacatcctaaatcaagttatgtttttaacaatcggatgtctgtccattcttgtttttttttttttttctaaagtcagttttgatgctataatttttgctgttattattttggattgtattgttagtttaataaaaatatcatttggctcattgcctgaaaagcctctttgaactgtagaaaactgatattggataatagagaaatgttagctagtgatgaagtaaccttattgctgcaacttccaatgtaatattgcagatttgcaatcttgccttaaatggcccgtaggatattgtgttctattttggagcctgatgcctttcacgtttttc

SEQ ID NO: 49354 - DNA, 399 bp, Glycine max
  Clone ID: PAT_MRT3847_15574C.1
cggacgcgtgggcggacgcttgggccaagtgctacagacaccaacaacgctgtagctctctcggctctgtgtcaccggcaccggggatctacatctgaacccgatccagccaatagatctcagaaatccaaatggagaacctaatctctttggtcaacaaaatccagagagcttgcaccgccttatgcgaccacggagaaaacagtgcactccccacactatgggactctcttcccgccatcgccgtcgtcggaggccaggtctcacctccgatccctctctcttactctcttctcttttcatctcataacgattcatatcgaaatctgtatgtctcactgtcagagctcaagaaagtccttcgtcttggaaagcgttgtctgcaaagatttcttaacc

SEQ ID NO: 49355 - DNA, 571 bp, Glycine max
  Clone ID: PAT_MRT3847_15575C.1
tattaaaaagagataattgattaatttgattgagtgatatattatgaaatgaagagagatatagaaaaaaaaaagaattgttgatgtaatgtttaaattttttttattgtcaacataccattactcttttatctatattgtgattgtggataactttttaattttgtttttgttgtgtttcactgttttctagtcccaaatatgagtcgaggttatcatactctgtcgtactggtggtagtagtaggtaatgatagcgaccaaacttttaggtggacccaccttcgccaaaagtcgcatgtggtttacttgattattttggtttagatttgaaagtttgagaagaaaaagatgcggggcttttatgttttcaaatagggtcggtacttgtttggagatggggaaaacataaggcatggtatgattaagatggtatcatggaaatccaaacctttgttttatttattgtaaaactacattttttacagagtttcacaaataattattatcgttctaataactttctatagatacctgatcaatcatatataacaatccttgattaatgattt

SEQ ID NO: 49356 - DNA, 207 bp, Glycine max
  unsure (1)..(207): unsure at all n locations
  Clone ID: PAT_MRT3847_15576C.1
ttnnnttttaatataaaaaaacacccgcaaaatttgcgcccgcgatttttatggaacttttactatcctatgggcaaccttatacaatacctacacaagaatattaaaatcttttaaaaaataacaataaaactttcaccaccctaacagttgcaactataaattccccccccaaaaaaactgttatctgtacagaaccattttaac

SEQ ID NO: 49357 - DNA, 255 bp, Glycine max
  Clone ID: PAT_MRT3847_15577C.1
cctttcttcctcttcctcagtagtgcgattttcgattctcttctctacgactatgcctaaccctacggtcttcttcgacatgaccatcggcggtcaacctgccggccgcatcgtgctggagctctacgccgacgtactccgagcaccgccgacaacttccgcgcgctctgcaccggcgcccagggcgccgggcggagcggcaagcccccccactacaaacgctcgtccttcccaccgcgtgatcccgaacttcat

SEQ ID NO: 49358 - DNA, 272 bp, Glycine max
  Clone ID: PAT_MRT3847_15578C.1
ctagggttttgtaaaagagggtttgacgatggtgggtggttgctggtttgagtttgatagtggtgggtggctactttttcgagtttggcggttgtgtgtgggtgctgattcaagttcgatggtggcgtgtgggtcgccccttcaccgtcggcgctgacgtggaccactacaagaccaccctgaccaccgccctcgccgtgttgcctgtcgcctcctcgctaaacaacgaggaagagaaggtgtggtgcatcgcgacgggaacgaggtgatgt

SEQ ID NO: 49359 - DNA, 1542 bp, Glycine max
  Clone ID: PAT_MRT3847_15579C.1
cgtgaatgtcctgctccttcccctttgtgcgcacacttccgccctaccgccacttctgccgccctccataagctccatcgcgcctcttttcctttccgtctccgacctccgatcctccctcgccgagacatcctccgacggtggcagaatcgtaattttccgcggcaccgtcgacacacctcgaaaaccttgagacccggtgtcttggtttctcgcaagtccagcgataacagcgtcgttcttcaaagaactcaaacgctgcacggtgtttgtccactgttttctgcttcctatttggcagagtttttatctgatctctggagaaatatggctgccaatttctggacatcatctcattacaagcatcttctggatcaggaagatgtggatgtggtgaatacactcgacaaggaaaagggtattacactggaggattttaagcttattaagatgcacatggctaattatattttgaaattggctcaacaagtaaaagtgaggcagagggttgtggccacagcagttacatacatgaggcgtgtttacaccaggaagagtatggctgaatatgatccacgcttggtagctccaacatgcttgtacctggcatcaaaagcagaagaaagcacagtgcaggctcggcttcttgtattttacattaaaaaattatacagtgatgacaagtatagatatgaaatcaaggacatacttgaaatggaaatgaagattttagaagctcttaattattacctggttgtataccatccataccgttcactatctccgttgcttcaggatgcaggtctgaatgatctaaacatgactcaactaacttgggggcttgtaaatgacacatacaagatggacctaattcttgtacatcctccgcatttgattgctttagcttgcatatacattgctagtgtgctcagggagaaagacaccactgcttggtttgaagaacttcgtgttgatatgaatgtggttaaaaacatatcaatggagatacttgatttttatgaaagcaatagaatgttcactgatgagagaatcaatgctgctcttcagaagttgagcctgagaccctagaacttactgtagatgactcaacgctgaatatgtggaatgaagttaatgctatggtgatttgtctgaatgatttttctgggtcaatgacatgttttacggtagaacactatctaaatgtatccaaaagtaagggcacgtaatattgggggtcaattcaaagtgtcctattaaagagcaaaaggaggatgaaaaaaggtgattctcggtgaggaccagatagactcccacctgattcatagaatcttttgtttttatctatttattgtcataaatcaaagtgtctacaatttttttaaaactttttaccattatttagtgtgatgaacaatttataattgttttatcggtcttaattcctctgtaagggatcgatttacgctacttaacgtggcgttattagatattttcacattttgtttaaaaaaaaaaaaaaaaaaaaaaaaaaaaaaaaaa

SEQ ID NO: 49360 - DNA, 1099 bp, Glycine max
  unsure (1)..(1099): unsure at all n locations
  Clone ID: PAT_MRT3847_1557C.1
cggctcgagcggctgcgagaagacgacagaagggggccgaatcgtccgctccgcagcagccacacttcttcgccgtttcagctgaagagccatccgcaggtggttttcatcgctttagagttttgttttcttctaattcgttgcgtttttggtttctactcgtaaatcatagttgtgtttgggattcacttaaagatgttcaaattatcgccgtttgtggcttttgtgtttcttttttggttttgaaagatgtgactgagacacgttattgttttgtgtatacctagttttttttttttttttatcggcggcatctttcgttagactatgaactacgtctcgttttctatagtgatgttgtagtgttgaaatatgatttttgaacccttttacttccttaagacttgaagcctttcaattcagatgaagagttaaaaaaatctgatcatgaagcgttcaaatcagtttttcctagagggtttgcttgggaagtgatcaaagtttatcgtggaccacctgaaattgctttcaagtttaggcactggggcttctttgaaggtccttttaagggacatgcccctaccgggaagatggcccaattctatggcttgggaactgtcaaggtggatgactctttgaaggttgaagaggtggagatttactatgacccggcagagcttcttggaggccttctttcagggaaccacataaatcacccaattgaagaggatggcaccaaaacttcagcaccttcccaaggatgtcccttctccaaataattacaatgatgtttttaagtgaatggtgtcttgggatccagctatatttcttgaattaattaatgtggcagctgagatttgaaggcaaatatagtatttgtgtgaaattgggtccattgaataaaattggaaacatgtcaaaatgaattatttttccccccgctttatatggaaaattatggcaaataaatgtgatgtgttggaaagcaatgtgcatgatacaatngtcggtttggctttgctgntgcatagtttaagagttataagntattctattttattttatctttgggagggagagctttctagcaatctgatga

SEQ ID NO: 49361 - DNA, 185 bp, Glycine max
  Clone ID: PAT_MRT3847_15580C.1
aaaaatccccgctgttgtggaatatgtccctgggggcccccgctttaaaaagggaattcccaaaaaaactcgcgggattgccttttcattttctggggtcagaagtccccggcgcgatgagccctattttgacgaagccctcgcgctctttaggcggcaaataatgcccaaagatgttgtgattg

SEQ ID NO: 49362 - DNA, 745 bp, Glycine max
  Clone ID: PAT_MRT3847_15581C.1
attgcccatttctcactcagtagaagtttggaaaatgattgacatacttctgaatctccagctgttagctcctttcttcctcttcttaatacttccagtgtttttcttcttctgtttcacctcctcaggtcctacaaaaggaaccatccctattccaaaaccataccctattattggtcactacttcgccctcaaaagcgtcggcaaccgccgtatccagtggctatccgatattgtcaaaatctcaccggccggcacgttcaccctccaccgccccttgggccgccgtggagtcatcaccggcaaccccgccaccgtagagtacattctcaagacacgtttctccaattaccaaaagggcagaaccactactagcattctctccgatttcctcggcacaggaatcttcaacgcagacggcaacacgtggaagtttcagaggcaagtagccagccacgaattcaacaccaagtctctacgcaaattcgttgagcacgttgtcgatgcagagctctccaaccgtctcgttcctatcctcacttcagcagcagcagcacaagacaaaacacttgatttccaagacattcttcaacgtttcgcgtttgacaacatctgcaaaatcgcgtttggcttcgaccccgatacctgacgctgtcagctgaacggagcaagttcgcacaagccttcgaagaacaacggagatcagcagcaaacggttccgcgagccgttgccgttagtctggaa

SEQ ID NO: 49363 - DNA, 373 bp, Glycine max
  unsure (1)..(373): unsure at all n locations
  Clone ID: PAT_MRT3847_15582C.1
gagttacaaggcttttggaccctgccccaatgattggagcgtggcacagaaactcattttaaaagggtgtgagcctttaccaagaagaaggtgctttgctaaaacaatttctaaggtgggtcttcttcacccttttcccacctcgctttggaaagctccagtcaacaacactgttaactggagtggtttaggttgcaagaattttgagtgtttgaagggtaagaagttgagtagagattgcattggttgctttgatttggttaatgggtatgagaatcaaaggtttgtgaagtctaggagtaagaatgattntctaattgatgatgttttggcatcgggaagtggtggaattcggattggacttgatgttgga

SEQ ID NO: 49364 - DNA, 788 bp, Glycine max
  Clone ID: PAT_MRT3847_15583C.1
tttttttttttcatgaaaggcatctaaatctttatttgaattgtatttaagtggccatacaaaaagaaaaaacactccctgtccaaaattgagatattataacaaggtggtgtatgccccccaccctcagggtgcatggtatattcctgcccctccagtatagcatggtgatccctttcgctatagatgttcagcttgtgaaatacaaaatatatcacgcagttttatgtgctaagatatgcaattatgcgctaacattttaaacaaaacccaaaccctgtgcaataaattaagtttagaatcggtgcatagacacaaaatcaatcaagctcttgcaattttggtagcgagacatgcgtctacagcttctccgacagtaaggaaaacccattcttttccaattttgtctacaaagtgtgcaagtttaagcttgtgaattactagccaccttgggttgaccatagctaattctaccccacgggaaagcaatctcttgtgcagttcctcaagtgctagaattccggaagtatcaacattcatcaagtttgtcatgtccagaatcactgcttggaccctacccttggtggtttctttaaggtcatcttcatcttgtgagacccacttgagaattctttctctgacaaaattagcatttgcaaagcagagtgagccagagcttatgcgaatcactatgatgcctggagtgcttatggccatgggatattgagtcacatcacagaaggcttctgttcttggaactctacctagaacttctaaacacgcgtccg

SEQ ID NO: 49365 - DNA, 1974 bp, Glycine max
  unsure (1)..(1974): unsure at all n locations
  Clone ID: PAT_MRT3847_15584C.1
tatttacccccccacccacngcggaccattaggaggattattcattattattattcataccctcctagttatgtttttttcacagtctttctacgatttgtttgagaaccctgcaatattgggtttgtgctcagttattggaatgttttttagtcctctgtgggtaacatttttcttcggtgtcatcgttggatggttgtggaaaccgaaatgggcgaggttggggaaagaaaaattgacgactttccacgccaagtccttagattttgcctcaccctcctcggcttcttcaccattaaagtctgctctagtttctcctatgaagagttgttcttcgtctccttgccttaattccattaaaatgctacctccaaacctagaatctttgctcctcaaaaaaggggtggataaaaaggcttcctcatcatcctctcccgtgaaatttgcaagttccgtcagttcacccaaatcctgcgaggaaacttctgatgctgtgacaatagcggatttacatcatctatggcagcttgtggaggagaaagatggaggtctcccttggattcagatgatggatcgttctacccctaccatgagttacaaagcatggcgtagagaaccaaaggatggtcctccccaatatagaagcagcactatttttgaagatgctacccctgagatggtgagggacttgttttgggatgacgagttccgaccgagatgggatgacatgcttgcaagctcttcaatcattgaagagtgtcccactactggtactatgaaagtgcagtggatacggaagtttccctttttctgtaaagatagagaatacataattggtcggagaatatgggaatctggaaggcattactattgtgtgaccaagggagtaaattgtccttcaatgcctagaaaagataaacctagacgcgttgatgtgtactactctagttggtgcattagagcagtggaatcaaatagaggtaatggccagttaactgcctgtgaagtcttgctcttccatcatgaagaaatgggcattccatgggagattgcaaagcttggagtaaggaaaggaatgtggggaactgttcagaagattgaacccggtttgcgagcttatcaagaagcaagagcttctggtgctgcactctctcattcagcctttatggcccaagtcaacacaaaaataggccctgagtacttgcaatcgatcgggggcgatgacaattcagcagagaatgaaagtgtggttgcttcagagaaaccacagggcgtgaacatacccaagatgctagtcattggtggtgctgttgctcttgcttgtagtcttgataggggactggtgacaaagtatcttctatttggtgttgctagaagatttgccaatataggtaaaagatagttaaaaatagaggtggaagcagcattttcttgaatgccattcttttggacgatccacattaccctttgttgtagtcgcgttattattacctgatgaaaatttagaggctctattgtggacgaaataagttatcaattcaacaataaaccaatggaaatgagaaaatcccgggttggtggagggagtaggtgacgattttttttttcttggaccattgtagttgttggtcagagactatagaatttcaagctgtgtatggttgtataaactcagtagcaattaaaaaaggaatacaacaaaaaagtattttagttacgcgtttttttcttggaccatagtagttgttggtcaagactatggaatttcaagctgtgcatggttgtataaactaagtagcaattaaaaaggaaatacaacaaatagtattttagttacttattcttccttttttctacatttttcagctactcctcttatgtaattgctttatgggtttatgaattatcaataccccacttattgtaacggcaatagtctattaatttttaaaccggtttcgatttttgaattct

SEQ ID NO: 49366 - DNA, 462 bp, Glycine max
  Clone ID: PAT_MRT3847_15585C.1
cattaagcatatgcaggttggatttcccttgctttttctttggtatgcttctggttattgtataatcttgaagtcatgtttaccccttctttttttccctcttctcccttggcaaacaggaaaatgagttcttacatgaagtctttggtttctcaccgaagagaaagtatcttaataccaacgaacacagaatgtctggtggtgaaaaggtaagctgtccgtgattgtgcccaattatcttgactttgtgaaaatggctttccttttttgttgcccccccatttgttatcatgcgctgacctgctccattccctccatctgcagagaatgtttaagtctccaaattcggttttgaacaaggctaggacacaatcacttaataagcagcggatattatctgaggttggcattcttaccatataaaagaacgtttacttcccccgttgaattacttaacttgat

SEQ ID NO: 49367 - DNA, 395 bp, Glycine max
  Clone ID: PAT_MRT3847_15586C.1
gacatgcgtatctggtttgacaaccaaacgcacctctgaatagcaggtattcaactagggatggattaagatccccgaatcccaaatacgaggggggtcaagacaacacagagattaaagggatctaacacgcgtcggacaaactcgatccaaactcatacaataggtctgacaaaacacaatgatcggtcatgccccaccgtgcatgcgcgagcgacaggcggacaactattggaatgcatagcagtcaagcctgaatgagaccatgagctatactgacctgaaacctgaacacatactacaaactccacacagggtgtgtgaaagattctgacatacaagacggtatctagaacaccaagatcctattacaggagagttacacatcacctgct

SEQ ID NO: 49368 - DNA, 460 bp, Glycine max
  Clone ID: PAT_MRT3847_15587C.1
ggctcgagcggctcgaggcacttcttctgccattgaagaagaacccgttaaaccatcagtgcaagtggaacacacccaactcttaattgatggaaaatttgtagatgctgcttctggaacggcaaaggatcttgttgcgcgcagctgatctgcttgagaagcataatgatgagcttgcagcacttgagacttgggataatggaaagccttatgaacaagctgctaagattgaagttccaatgcttgttcgcctgattcgatactatgctggttgggcagataagatccatggtctaacagttccagctgatggaccatatcatgtgcaaacattacatgaaccaattggtgttgccggtcagatcattccttggaacttcccttttctcatgtttgcctggaaagttggaccggcattggcctgtggcaacaccattgttctaaaacagctgagcagaca

SEQ ID NO: 49369 - DNA, 598 bp, Glycine max
  Clone ID: PAT_MRT3847_15588C.1
gagtgaagagagagagaagacgaacactatcatggcttcttcactcagaatctcaagacttatctctcgctccttttcttctacttctttcttttcacgaggtgggaatggtttccttggttcaagacaaagtaaattcagcacttctgctgccattgaagaagaacccattaaaccatcaatacaagtagaacacacccaactcttaattgatggaaaatttgtagatgctgcttctggtaaaacttttccaactttagatcctaggacaggtgaagtgattgctcatgttgctgagggtcactctgaagatgttgatcgagcagtttcagctgcacgaaaagcatttgatcatggaccatggcctaagatgacagcttatgaacggcaaaggatcttgttgcgtgcggccgatctgatcgagaagcataatgatgagcttgcagcacttgagacttgggataatggaaagccttatgaacaagctgctaagattgaagttccaatgcttgttcgcctgattcgatactatgctggttgggcagataagattcatggtctaacagttccagctgatggaccttatcatgtgcaaaca

SEQ ID NO: 49370 - DNA, 145 bp, Glycine max
  Clone ID: PAT_MRT3847_15589C.1
gggtttcacattctgttaacattggccactggtcacacacacattctgtgcacagctggaagtacatatagattgactggcatcctaataagaacaggggctaaatgtcctcatgactatatgatacacacgtatatgttcaata

SEQ ID NO: 49371 - DNA, 204 bp, Glycine max
  Clone ID: PAT_MRT3847_1558C.1
gaggaactacctgggaaaccgactatcttttgggtgtctactgaagaaatgtgaaagccggttttattgccatgactgctgcgttttcaatgtcatccactagtaatagcactgttgaatgtacatatgtgtaaggctatggatctcaatggatattgggacttctctacgtattgaatttggaataaaatagaacaaacaata

SEQ ID NO: 49372 - DNA, 638 bp, Glycine max
  Clone ID: PAT_MRT3847_15590C.1
ccctccccccccccccccccccccccccccccccccccccctcccccccttttttttttttttttttttttttttttaaaaaaaaattttggttttttctccttgggggaaaaaaacccccttctaaaaaacttttttttgaccaacatccccccctttccctttgctaaatggcaaattttttttttcttgttttcaccccatccccccccagaaaatggcaaattttttttttcttgttttaaacacatccctccctggggggccttttccccaaaaaacattttccctggaaaaccccccaaaactaaaccccaaatccttacccgaaagtttttttttttcccttgggaaggccaaaattgtttttccctgaaaaaaaaaaccccaagggtttttttcccaagggaaaaaaatgctggcccccccggccaaaggggaccctccctgggggccataaaaggggaacctgaaaggccctgaccttgggtttttcccacccaaaatggggtgaaatcccccccctgccccacgttaatcctgggcagtggagggggcaacccctggccccccaaaaatcccccccctttggggaaaaccctttttttccttttatttcggggcaccccccctggaaa

SEQ ID NO: 49373 - DNA, 340 bp, Glycine max
  Clone ID: PAT_MRT3847_15591C.1
cccacgcgtgcgggcgataacgtcgtcttgattccaaggaactagcaaatgcttagaaaaagagaagaaagcgacattatactgttgagcaagagctcgaacgtatatgggaaaagatgagacgtcatgagatagctaaaggggacagagcataactagtgactgaagctttgcaaacgatgaaggggacgattccagagattgcgggctctcacatctcatctcggatccttgagacatgtgccatgcattgatcacaagctgagagagatgccgtatatgaagagcttcagctgcatataataactctatgatatagggcatatgctgttcacttact

SEQ ID NO: 49374 - DNA, 414 bp, Glycine max
  Clone ID: PAT_MRT3847_15592C.1
cccacgcgtccgtactgctgcataagacctcagaagggggatcttagaccgctcatggaggcatcttgagaaaggacatgctttctattatgaagtctaagtcattaataaaatgaaaaaataattaatatgaaaattaaaagttattacaatcaaaagcagcaatatacttactaacatgaacgcatctaggaaaagtgatcctgtaaagtagtatcttcggatttcatctgagatcttctagagatgacagtctttcattacttgaatcgctcgattcatcaccttcagaccctactccggctactattctgccacgcacttatctgagtatgatacactttgcacctatatcatagccactgatgtgtatctagcatcagcattagaaaatcttataagtctagctactat

SEQ ID NO: 49375 - DNA, 194 bp, Glycine max
  unsure (1)..(194): unsure at all n locations
  Clone ID: PAT_MRT3847_15593C.1
ngtgangcagcgtacgtnagtcggnattcggctngagncgtgtatgtgagnntcanttgntcatatatnttctttccttcntancattgangantgcanaannnaantcntcggagagaaaaaaagttagggntttgcattttggatcagtcagantcaganatgggaggaggnaatgnccagaagtcaaagat

SEQ ID NO: 49376 - DNA, 393 bp, Glycine max
  Clone ID: PAT_MRT3847_15594C.1
cgggccggaaaacccggggcgtcccacgcgcccgtaatatgagaaagggggggacacacacgacgcggggccacacagaggaaacgcgggacaaatcaaaaccacaggctagggcctgccaccaggcatggacccccagccaaccaccggcaatagaggccaagccaagcactaagcaccacccggcaccacctgcagcagacggcggcgtctgcaaacaaagcacaaaacagaaacaaaaaccgtagcgcgcaaagaggggaaaccaaaaaggccatagaaggcccgcggcggctccaaggccccaaccccaaccaggaacctcaacaggcccaacaagaaggaaacagcgcaccctcaaccggggcgatacgagaaagggaagcacccccg

SEQ ID NO: 49377 - DNA, 404 bp, Glycine max
  Clone ID: PAT_MRT3847_15595C.1
ggggggggaaaaaccccctcataatggccccgaaaaaataaaaaagttttttttttttttttaaaaaaaaaaacggtcccccctagcaattggccctttttgttctttcccaaaggtacaaaaacccttttctcgcaacatttttttttttccagggagccctttgcttgcccaaccaaaaccaaagactttttttttttcccttttaaaagttttacccccaaaaattgggaaagatccccgtttaaccccccccggggggggcgggctaatttacacccccccggttttctctttccacttcccaaagaccccctgcggccttataaaaggtgggaagggcggggcccccctttgaaaaaacccggccccaaaacttttgaaacttcttttttaaacaaaaa

SEQ ID NO: 49378 - DNA, 370 bp, Glycine max
  Clone ID: PAT_MRT3847_15596C.1
gggtatgcgcgctcactagagggcggaacgtcctttcgagctcttgatgcagatggggatcttttaggtcgctttaagcatccatccttaattacttcataatgcctcatgtttatttctctaagacgccgtacatataacacatacgacagtaatacgagagcgcggctgagaacggctcatgatggtatgatgaagccggaggatccgtacagacatatgtgacagtacagcgcctcttcgacgcagaatactggcgagcctttggaccttgaggaccgactggggttcttatatgcggatgacagtatgtgcgacagtatctgggggcgtgtgagaggaaactccactgacgactacactgtttccg

SEQ ID NO: 49379 - DNA, 346 bp, Glycine max
  unsure (1)..(346): unsure at all n locations
  Clone ID: PAT_MRT3847_15597C.1
agtatttactttttatttcctcagcacagcaacacctcagtcccatgttgtttcatgtttgttcccccatggcgccaattccctaaccaaccacgacatcaataccaccaccaagcacgttcagagcttttgggttcgagtccgatatatgcagctgtcttaaatacttggactagaattaaactagattacctcggacgacttgaaccactaaaatgaagtccgcgcgagtcaaagaagcgattctgttagtgtttatgtttactatcttaaccattgcagngtcggatctagcttcggacagagccgggttattgttactccgaagcgcggtggggggacgcac

SEQ ID NO: 49380 - DNA, 745 bp, Glycine max
  Clone ID: PAT_MRT3847_15598C.1
ggagaagacagagagaagagaaacaaaggggtagaggaaacgaaccctaagagagagagagagagagagagacagagagtctttgctttgatttcaagctcctttaccattgcatttcgggatctcgaatcttcaatctgcaaagggtattgttgattctgcttctatggcaaattcaaagggctcatcaggtttcagaaattttatgtatcctggaaagcatcctctacttcctcctaaaagtccgtttcctagtgtttcccaagcatatgctgattatgtcccaaatcctgctgttggtttaaaggctggtaacagacctagagatggaaacacacaccaccaacgtacttcatctgagagcctcgttatagaggagcagccttcatggcttgatgatctccttaacgagccagagacacctgtccgaagaggtggccatcggcgttcatcaagtgattcttttgcgtacatagacactgttaatgcatctaacattaattatgctaatcaggacgagtataaatataagaatatgatgtctattccgtcttggtcatctcaagactttgaccgcagcaaagatgctcgtcatgtacctgtttatgcagaaatgaactccgtaaaacagaaaaataggtcatgggactctttttcaatgccatgacaaatccagttgggtgttcccttcagcaaagacagtgctgcttttcagattcagggattgcatgtacaccacatgagc

SEQ ID NO: 49381 - DNA, 238 bp, Glycine max
  Clone ID: PAT_MRT3847_15599C.1
ggcgtcggcttttttaaggaaacaaccctactgacatatcccctttctttgaaccaaaaataaaatggttccataccaacctgcaatttttgcctcctctaactatgatgccgatgcgcctaccatattttacactgagcatcaaggttgagataacttcaactgatgaacataacgatgccttgattcattccacaaagcaacaatgggaacttggttaaacacatcctaatatcca

SEQ ID NO: 49382 - DNA, 411 bp, Glycine max
  unsure (1)..(411): unsure at all n locations
  Clone ID: PAT_MRT3847_1559C.1
agacaaaaaacacatttttggtccatacatactcggtggagcttaaacacacagctagcacaaacatgaaaatagttgcagcattaacatgctgtttctatgcccacatataagaatacaatttaaggtagctatcagcaatgatagagccatagaaacctttcaatactaattcatttacaagacaaaataaaaagaagcaaaaaaaaagggggggggggggggggggtnnnannnanctnggnntngggntngaagggnnaatnggggaagaaaaggggcacatttnttncaaagatnacatttganatataacaatatttatgacttgntggaagagagagatgatgatggtttttggtgtgttggtgggggaagttgttgattgtgctgttgtgtttgtacctgggg

SEQ ID NO: 49383 - DNA, 1203 bp, Glycine max
  Clone ID: PAT_MRT3847_155C.1
ggtgttttctatttaggagtagtaatcatttggttagtgcagatcaacaagggtatgttcttgcagcagctactgggttcagaagatacacttactctgaactgaaacaagccacaaagggtttcagcgaagagattggaaggggtgctggagggacagtgtacaagggcgtgttatcagataaacgcattgcagcaattaaaaaattgcacgaatttgcagaccaaggagagagtgagtttcttactgaagtgagcatcattggaaggctcaaccacatgaacttaattggcatgtgggggtattgtgtagaaggaaagcataggatgttggtttatgagttcatggaaaatggctctttggcacataatcttccatcaaatgcacttgattggagcaagaggtacaacattgctgtgggaatggcaaagggtttggcctatttacatgaagagtgcttggagtggatcttgcattgtgatataaagcctcaaaacatacttcttgactctgattaccaacccaaggtggctgattttggcttgtccaagccattgaatagaaacaatgtcaacaactcaagcttctctaggataagagggacaaggggttacatggcaccggaatgggttttcaacttgcaaatcacttccaaggtggatgtttatagctatggaattgttgtgttggagatgataactgggaggagtccaatgattggtgtccaagtcactgaattaggagctgatcaatctcataatgagaggttggcaacatgggtgagggagagaaggagaaaggcaagagaaggggaatgttgggtggaacaaattgttgaccctactttgggatcagattatgatgtggagcagatggagatattgacaacagtggctttggaatgtgtggaggaagagaaagatgtgagacctagcatgagtcaagtcgttgagaggctccaaagtcatgattcttaatctcttgtgcatgtcactttcttgtttatcattgtctattgctagcctctagatattttcatcagtttagataattaaggagtgtttatatttctcatgttgagcagtagagttaaattaataagtgtttgtttagattcacatgtacttaatgtaaatccatcttgaagttaattactccccaagccccaagcccaaatacaacacggtttttttctttccactt

SEQ ID NO: 49384 - DNA, 197 bp, Glycine max
  unsure (1)..(197): unsure at all n locations
  Clone ID: PAT_MRT3847_15600C.1
tcgcaggnangcgtacgtaagctngggaattcgggntcgagnggggnngcaaaatgggaantcgaananatttctanaagaanccatnaatngnctanaaanaacgnttaagnatganntgcgtgatnaagaancnanatggcgtanannacnnaanggggaatgnnnctcnngncgatcaanngnaagngaantcc

SEQ ID NO: 49385 - DNA, 472 bp, Glycine max
  Clone ID: PAT_MRT3847_15601C.1
aacccaaaataataaaattttttttttttttaacaaactcctacttcccaaaaaattaaaattaccgtttttccaaaaaataccttttttttttacataaaaaacatttaaacccttttatccattttttaaaataaaaaaaaaacctttaacctttttttagaaacctgcaacccttgaatggaaaattttgttccttaaaaaccttagtctttttaagtcccaaaacatggtttatttttggaaaaacacccccctaagcaatggtgacaccacaaaaaaatttccccaaatcctaatatttccttacagacaaaaaaaaaatttctcggaaaaatccccttttttttgttagccacgttcattattcccagccaacttaagcaccttataaatttgtgtcttctaaaacttgggccacaataacagaaacaccgggaccaacatcttgggcgccctttttttttaaaaa

SEQ ID NO: 49386 - DNA, 254 bp, Glycine max
  Clone ID: PAT_MRT3847_15602C.1
aaaaaaaaaaaaaaaaaaattatatttaaaaaaaaaaaaaaaaaaaaaaggagaggataattaaaaaaaaaaaaaaaacgccccccactctttaatttccaaccttccttacccatccatgcaacataaataactcttctattgagccacctaatttcgttccccttcccataagattcacaacttctttcctgtgaaaaccctccctttccctctcttaatcgccttccaaaacattctcctttcccctgttt

SEQ ID NO: 49387 - DNA, 444 bp, Glycine max
  Clone ID: PAT_MRT3847_15603C.1
ctagataccgtaccaactttacattataccaccaaccctcctctacattacctaaaacaataagaaaatcttttctacattgtggactctgatgtgtctgcaagtacacaacacaaccacacatcattttatagcaccccattgctgttttccccctcaaatatagctgcattttgttacaaattcaaataataaggcgagcaaccacaccatgatgtgcgccatgaaaagaacagtctcatctctaacatgtgctgctgtatcaaacagaaaactttcccttgcaaggcctcgactcttgacattaccacccatcaacaatcgctaacaaaacacgtgtccctctgaaatatgttgacacaaacctctctaccttttatatacacagaaatcaacatttcgggaggagaaagagagagacagggggccccacttatataaaat

SEQ ID NO: 49388 - DNA, 491 bp, Glycine max
  Clone ID: PAT_MRT3847_15604C.1
tgcgagaagacgacagaagggagctcttggcaggttgaaacaaatatcacacattcatgatctttatgaaaagatgaaacaagatggccctcaaccagacatatttacatacaatattttgatctccagctttggcagggctggaagagtagacattgctgttaaaaattctgaagaactagagaatagcgactgtaagcctgacattatttcctatataactctttgatcaattgccttggaaagaatggggatgttgatgaaactcacatgagatttaaagagatgcaagagaaaggattaattccggatgtcgtgacttatagtacacttattgagtgttttggcaagacggataaagttgagatggcctgtaggttgtttgatgaaatgcttgctgaagaatgcactcctaacttgatcacatataatattttgcttgactgtcttgaaaagagtggaagaactgctgaggcagtggacctctatgc

SEQ ID NO: 49389 - DNA, 746 bp, Glycine max
  unsure (1)..(746): unsure at all n locations
  Clone ID: PAT_MRT3847_15605C.1
tttactcttttaatgttagttattcagcatgtaattttgtaaattgtggactctttataaaaggtcctttacttggatcttgaactcagttatgtctttgagttaagttgtcagtttcttttctttctttttttcccctctccttgtccttgttctctcttttctgcctttccattaccctatctgaatgactagttcaattcatcaactggctacaatttagtttgggagatttttgaaatttttaccatagatacttgatctgtcaattttctgtaaagtgattatgaatcatgtacataaactcagttgacttaaaccagagtttttgtagaatacaacagtgtttcttgtttgattgaatagatggaaagtacttatgtattagactttattttgtccaaatagacttcctagtagtcatattctgtatctactcaaacaagcagataagtgaccaggcaatcatagtaaaattagttttcccacctatttaaggactagtaggtggcattggtaagatttttgttgatggtgtaacggaagggatgtaccttagaatatttagcttttctaggactagtgtatcatttattaagaataatgtttttctataattgccttaatatgaatctcttcatatacagatgcaactacaaaatattgtatgttactccctccggacctanatataagcaacaaaaaaaataattnntggacctaaatataagcaaatactaactaac

SEQ ID NO: 49390 - DNA, 562 bp, Glycine max
  unsure (1)..(562): unsure at all n locations
  Clone ID: PAT_MRT3847_15606C.1
gcatgatttcaaaagttgaaattgatagcttagcagagttcactttgtgaatagtgagacagtaattagactttttataaagtcgttgacgtaagacagatatcaagatatcaaaaaagttgagtttacaggtttaggatgctttaatggcagcataatagaaagcccgccgaaaatttcttaactcattgatgaggtggtttgtaggaatagctttataactagttgcttcaactccaaaaaagttgaattcttatgtttgaattttaacttgtgagactcttgttatgttctccaagataatgatttgaatcttaccattagtaacatagcattgtagcttttttcttttaaattttttttaagaacttttactcttttaaaaaaaattttaggaactttttacttcaatatagtttaatggtgaagatttgttatacattatctcatcacatagatgattntatgaataagacactaaaattgtcatcccaatattaaaaaccttgtttttaaaacacttatttgggaactggcacatttctctgtagtggtgttacat

SEQ ID NO: 49391 - DNA, 570 bp, Glycine max
  Clone ID: PAT_MRT3847_15607C.1
gcttgcttgctccttatttcttcactgaatcctagagtgtcatcgtcagggttcattggtggcagtggtgtgtcagacttttcgtcgggacaggtggtttcaacaatatatcaattctggcggctaccataacattactgcttccgtgaccaccaacctccaccctctctaccatacccaacaacaacaaaatgctatgcaaattatagaaatgaagcaattttcaacgtcaagaaccaaaaaggggaaaaacctacggcatctgttttcaagtgagtacttggggaactccgaaaatagtaaatagggtaggagtgggggagagggtgtgatcattgtagttgtggtagtcatggttggtgaaggtggcgacaaatcacccatggaagagggaccatctcggagattggggattttgtttttcatgttgaagagaaagagataaggaaaaagaaagacgtgtctaatttttagtggtgagacatgatacatataggttcggatataatcgaacccaactctaggccacaaatttacacattttatttttacgaggaccaaaaacatttt

SEQ ID NO: 49392 - DNA, 1721 bp, Glycine max
  Clone ID: PAT_MRT3847_15608C.1
ctgtacgtgattctgtgggggagggggcagagactgatatatggtatggtcgtctctgagtctgaagatctgtgagttaattgcatttgcagagagagagagagagagagagggaagacggttgtggggattcgatgggggccaccgttcactcgccgctagtcacttatgcttccgtcatatctctgcttacactctgtcctccgtttgtcatacttctatggtacaccatgactcttgctgacggatctgtttccgagacattccattatttaaggcagaatgggttgcagggtttgctacatatatggcccacccccactcccaccgcctgcaaaatcattgcagtctatgctgcatttgaggcagcacttcagcttcttcttcccgggaaaaccgtttacggccctatttctccaaccggccaccgacctgtctacaaggcaaatggtctgcaagcctattttgtcaccttgattacttattttgctctctggtggtttgggatattcaaccctacgattgtttatcatcatttgggagaaatttattcagctctcatcttcggcagctttctcttctgtgttttcttgtacatcaagggtcatttggcaccgtcttctacagattctggctcatctggaaacttaatcattgatttttactgggggatggaactttatccacgcattggaaaacattttgacataaaagtcttcacaaactgcagatttggaatgatgtcatgggctgttcttgcactgacctactgcataaagcagtatgaagaaaatggaaaagtagcggactcaatgcttgtaaatactgcattaatgctggtatatgttaccaagtttttctggtgggaagctggatattggagcacaatggatattgcacatgatcgagctggattttatatttgctggggttgcttggtgtgggttccatctgtttatacgtctcctggaatgtaccttgtcaaccatcctgtaaatcttggcatcaagctagcgctctcaattttagtagctggcattctttgcatatacatcaactatgattgtgacaggcaaaggcaagaatttcgtaggacaaatggaaaaggcacagtctggggaaaagctccttcaaagatagaggccacatatactactacttctggggaaactaaaagaagccttcttttaacctctggatggtggggattatctcgtcactttcattatgtccctgaaatactggcagctttcttctggacagtcccagctcttttcgaacattttttgccttacttctacgtgatatttcttaccatccttctctttgatcgagcaaaacgagatgatgatcgttgcagatccaagtatggcaagtactggaaactatattgcgacaaggtaccttacagaatcattccaggaatatactgaagaatgattatcgaaaacggcttatctggagtcccccaacttaaaattaaaaaccaaggacgccatctgtagctttatattgtttggtgcctccttaagacacgtggtagattagactttcgctgagagctaattattgaattattgaaccggattttttaagctaatgtcgagacttgatttcggctccagctgtgttaatctctttatctatgacttgtgagaaaggtgcatggtttacgggctggtgttacaatttgaagttttattctgttcctgttttcttcc

SEQ ID NO: 49393 - DNA, 1178 bp, Glycine max
  Clone ID: PAT_MRT3847_15609C.1
aagccataaattgccaacaccaccagagatgacattagcattgtcccaattccccgctcttgaagtatatgcaaaactcggtgggaacgcaagacatggcgtagtgctgagttcataaagacaacaacaaacacttcaccaaataatattcagctcccactttcctagttcctttccccttgtactcaatcaatcacacccctttcctctttctttgtccttattatttaaggccaatcacttatccctctaccgcaaaaactattctctaattactatgaccttcataagggaggatgatgatgatcaagttgatgatgatcatgatcatgatcatgtggatggtggtggatcacaaaacagtgccagcaacatcactgaaattgtgaccaccccagaaggggaaaacttaggagaatggctgagtctaggcctcaaaggagacatcaacatgccagcagaagaacaaaactcatcatcaaggcctctccacagcaacaacaacaaggtattctcatgcaacttctgcatgagaaagttttacagttcacaagccttagggggtcaccagaatgcacacaagagggagagagaagctgctagaagctaccaccaatctcatcatcacagaattgggttttcttacactacttctctggcaactaggtcactgggaattaagcctcactctcttgtgcacaggcctaacagagaaaggtctgctatggtggctagattcagtagtagtgatgccattaatgttggggttggatcagtggcatcatcatggacaccctttatgcttgaacaagctgtggatttctattggccaggtagctttcgtggggacttattgccaaagcaagaatcatcagatgttaagaagattgacttagatcttcggctctgatacattaatttggtccaacttctatgctcagagtcctggtttaaaccactactgctgctgctttttcttaatggtttccccctatgctatatatgatgccacttgtgctaataaaatgtcaaggatattgttgtaattcagtagttgtacttgtactaattggtttgagaatggaaacaattccatgtcaatgtgtattaattgcaagtttgctacattaagagtgtgtgtatcatttccatgtttaaaaaataactttgtggttttg

SEQ ID NO: 49394 - DNA, 601 bp, Glycine max
  Clone ID: PAT_MRT3847_1560C.1
tcttttttttttttttttttttttttttttttttttttttttttttttttttttttttttttttttttttttttttggaaagcacaacatgaagtagtaatatatataaccactctaaaagacttttctgggtttttcaatcatccagaaagaaaaggacaaaatattttttatcttaaccccttacttatttaaaaaacgctgccatagggtaaatttcataaaaaaaaaaagggggtagctaggggtagggggtaaaaaaccaagaatcttgatctggcccttcctaacaaggggagcatgaatgaggaagggaaaaacgtttttgcgctgatcaccctggagttggaaaattttgccaagctccttgttatgcacaaaattgccattggagaaaaacttttttttgagggctttgaggatcttttcgaaactgaacttttttttaaacccttgcactgggggaaaaatttttttcccattcctttgggggatgcggatatgcacaaacttttttgccccgggagcatttgttttttttgcctccgcaaaagggtcaaaagtgctcgtagggatctgataaaaacccacttcaaccata

SEQ ID NO: 49395 - DNA, 667 bp, Glycine max
  Clone ID: PAT_MRT3847_15610C.1
tagagtctaaacacagttttcatggcatcaacactatggtgaccaagcctagaatgccaaataggaaaagaaacagaattacaagatgttgtattaacaacaagatcaacaacaacagtattatttgcagacacaaaaagaaacttagtactacaattagttgtctttacaatagaagtttttacaacaatattgtttgaaagagatgaacgaaaagattttaagtaagacttagattgaggcatggaagcaaagagttgaggggattgatagaggccatcacttcccacaaatccttccagcaaaaccaacttagtatcctatgatttaaaaagacaaacatatgagtggaactcaaaataaacattgttgtctttacaaaattgactgaccctaatgagattttttgtaatagtgggaacaaacaaaagattactcagaacaagggaaaactgagggttaatgggagaggaaaaggttgataaacccgaggaattgatattgaggccctgaccatttccaataattatttgaataggttcttcaaaaggtgctacttgctgaatgttttgtgacatattggtcacatggtgagaagcaccagaatcaggataccaactttgagaaggtgttgcagcagaactagtcaaaaaaatttgaagagagt

SEQ ID NO: 49396 - DNA, 724 bp, Glycine max
  Clone ID: PAT_MRT3847_15611C.1
cgctgacctttcttcaatatcgtttattatttttctctctctctctctctcttttcatagtgttctaactcctcttgtgctatataaagaagtagaaaagtcaccacagtgtttatcactgtttccacttgctccaaaaatgggaagatcaccatgctgtgacaaggtgggtttaaagaagggaccgtggacgccagaggaagatcagaagctcttggcttatattgaagaacatggccatggaagctggcgtgctttgccagcaaaagctggacttcagaggtgtggcaaaagttgcaggttgagatggactaattatctaaggcctgatattaagaggggaaagttcagcatgcaagaggagcaaaccatcattcaactccatgcactattagggaacaggtggtcttcaatagctacacatttgccaaagagaacagataatgagatcaagaactactggaacactcatcttaagaaaaggttagacaaaatgggcattgaccctgtgacccacaagcccaagaacgatgcccttctctccaccgagggcccttccaagattgctgccaacatcagccacatggctcagtgggagagtgccaggctcgaagcaaaagcgagattacgcagagaatcaaacctacgtagttcttgacactcatcatcatcatcataaaaccacacccctattggcacttctgcatcatcatcatcatcactt

SEQ ID NO: 49397 - DNA, 1139 bp, Glycine max
  Clone ID: PAT_MRT3847_15612C.1
ggctcgaggaagctaaattactaggaaaatctgctcctcttgactttgttcatgacaaattcaagaggagcagattgaagctaaattactaggaaaatcttcttttgagattgagatacaccaaagtctttgtggcgatggtgaacgtgtctattgtgaccattgtgctacttcaattattgaccttcatagaagctgccccaactgttcctatgaactctgccttagttgttgccaagaaatacgtgatggaagcattacaccccgggctgagctgaagttcccatatgtaaataggggctatgattatatgcatggtggggaccctctacctgtgccttgtgatttagagacatcagaaggtcatattgagccgtctactgtgtggaatgctaagagtgatggaagcattagttgtgcgccaaaggagttggggggttgcggtagtgctgtattggagctgagacgcatcctcccagatgggtggatatctgacttggaagccaaagctcgcaatatgctgaaaatttgggaaattgagcacacaactcttcagcaaaaagaagcagtatcaagcttcacctttttgagaaaggaagctattagagaaggcataaatgacaataacatatactatccagagtcaagtaacactcaaaaagaagggctgctgcttttccaaaagcattgggctaatggtgaaccaattatagtccgtgatgtccttaaacagggaacaggtctgagctgggagccaatggtaatgtggcgagcattatgtgaaaatatggtttcagaaatcagttcaaaaatgtcagaagtgaaagccatcgattgcctagctaattgtgaggtttggtctcgctgtccctttggtgctgagtttgaacatttggtctaattagagtattatgtctctaaatttgtagtgttttcccttttccaaatccctcatctgttgtggattggctgtgatctctaatttttttaaggatgcaaaaagaatgctttagtaactacttttctgcccagtatcattataagaaagataactaacttttggtataaggcatgtcatcttgactacactactgtaatataccacatccatcgccaacatgccttattgtgctttagat

SEQ ID NO: 49398 - DNA, 721 bp, Glycine max
  unsure (1)..(721): unsure at all n locations
  Clone ID: PAT_MRT3847_15613C.1
ccacgcgtccgaaaacaattaacctattattctttgcatctttccaaaagcagcaaagaaaaactaggatttccaatcatcaattagatgatgaagctaatcatcttctctttcctactacttctctttgttcccatattttctaccacaacttcagcccagtcacctgctgcagcccctaaaccccaagcaaaacctgcccctgccacaccagctcctgctccagcaaaaccattggtcccctcattaccccaatcacccttgtctgattcttcttctaatcaagacatcatcagaattctaaggaaggccaaatcattcaacacgctaattcgcttgctcaaaaccacccaaattatcaaccaagtcaatgcacaacttgtgaccacaaaatctggaggaggtttaaccattctagcacctgatgatggtgccttctcacaactcaaagcaggttacttcaactctctcggcgatcgccaacagaaagcattgatacagttccacgttcttccagtttatgtctcaagctctaactttgactctcttagcaatccagtgatgacactggccagtgatagccccaatgggtatcaaataaatgtgacagcttatgggaacagtgtgaatatttcaactggggtggtaaatgccactctcacaggcattgtgtacactgantagacacttgccatatatcacgtggacaaggtgcttattc

SEQ ID NO: 49399 - DNA, 260 bp, Glycine max
  Clone ID: PAT_MRT3847_15614C.1
gtgctaccagatgtacgtatacggggcgagccagttgtgatatgtgcacactctgctctcaggactggaccttatggagctctgcttgatcaagagcggtgactatatgatgaaactcatactcgtattctgatgcacggagtatagggatatcagaggcctactggataacgttgtgatatgacttgtcgacactggatgtacagccaccctaatgctggatgctacagatccaactgtatgtgatatacactctcagg

SEQ ID NO: 49400 - DNA, 322 bp, Glycine max
  Clone ID: PAT_MRT3847_15615C.1
cccacgcgtccgacaagcatttcatccctttttacttctatcatgtcttaagctttataggaaagttttcacaaatcaacagggcttctacgatcatattctatcccttccaacaatgcctaactaccttgctgctatgatcttgacactctttgccatttccatacttcaaacagacataatgcctgctaatcaacacacatgccacttgcatcacaacaaaacccaatattcaagctcaagtctcaatacttaccaatgcccatcacaatgctcaatgaaatatttccagacccaataccacaagccctgcatgcttttc

SEQ ID NO: 49401 - DNA, 424 bp, Glycine max
  Clone ID: PAT_MRT3847_15616C.1
tttcggagtgtaaactctatcttacacatcctggagggggattttagagctatttgccgattcatgcaactgtagacgcttattcatgatacccaatcgtaccacggtaaaaacgcccctcaagctgatttcactgctcttagcacctgtactccaggagtgacacccactttctaactttctacccaataacatttgggtagtggtctccagagagtattctggcaccaagacagttggttggactcacatgtccaccaccttgatatatctctatgatctgcaggaactgaaaaagcatcaacccaatcaacaagaatcatactttaaccacgatggataattcaccttcactcgcccataaagcaagttaaccacttgtgccatgctaaaactcaaacttggctactcttgtgtgctccac

SEQ ID NO: 49402 - DNA, 485 bp, Glycine max
  Clone ID: PAT_MRT3847_15617C.1
ggggaagcacgaaggcgtacttacttttgtgttcacaagaatcttttttgcttattgattccccttgatttcaatgttcagattttttgtgacttaatttataaaagtttaaagagtagatactaatagctttaactatgataatctaaggttgatgtggttggtgctttgactaattactgatatgtatagggacctttttagggaaaaacttggatacaataaattagatgttgtttgtattgttttccaatcagaatatcattttagaaattagactttcaacacactatgatgcctcttattcttaaaactgttgaaagcttttattgcaattgaaaatccttagttactaaatacaaatgatatgacacttctttgtttactgatagtgtgaaatgctttacattgagaattatgtcacatttgaacttttatcaagttggtgaaattgaaacagaatgtaatgagactgtgacatcata

SEQ ID NO: 49403 - DNA, 395 bp, Glycine max
  Clone ID: PAT_MRT3847_15618C.1
gaggcaggttcttccttcattttatactcttgtgcaaaaccctcgtcgacggtgaccagggcggtgtttcaaacatgggcgagagcatgctagcggatttggattcgctccctgaggctgataagcaaagaatgactgtcatgatcgatcagctccaaatccgtgacagcttcattgagcccaaaaacattgatgttgcagctgaaattgcggctctggattatattttaaaatcaacaaaaggttgatccaggttgtaagaatcaggcttatactcccacaaggatgggagtttgagtcctgccgcgaatgtgaggatcttgttggtgagtcatttgtaaattcctttttgtaagctctcattaagtccacagacttgccttggccctaatgag

SEQ ID NO: 49404 - DNA, 167 bp, Glycine max
  Clone ID: PAT_MRT3847_15619C.1
gcattttatgagtgctttaacaaatacactaaaggggaaacttggggtgtatttgaagaaattatttcccatattaaacaaatttaatttaacacacactaattatttattttgctatctcattcatcgctaacttgctgcactcacttacctacaaattagaccca

SEQ ID NO: 49405 - DNA, 532 bp, Glycine max
  Clone ID: PAT_MRT3847_1561C.1
atctagagttaagtataagttgacacacaaaataaggttttaaaacaaaagcaagttatagacaaaatagtcttaaaaacatctccttcaaccttacctttgcagttgaagtttcatacctatagtgtctcatgctagccgatagtcatcttatcttcatatattcaaacaaaataaaaatttctattttaacttttttcctattatttgatatcagaacaattatctaagcaaaattgagcataagttgtttgaaattagaatatagtaactttagagcatcatttgacaatgcatattaaaaagtatttttttatacataattttgaaatttaaattttggaaattactttttcttagtttcagaatttaaactctgcaacaatgaaactacactcatcaatatttagggtattatcggaaattaaaaaattgaagtgaggtgtgaaataacaaaaaacaatggccttatgtaaatcaaacaaaactccatcatttgagacccaattaacgggtagaatatccaactgag

SEQ ID NO: 49406 - DNA, 2438 bp, Glycine max
  Clone ID: PAT_MRT3847_15620C.1
ctgataataaacatattttaatgatcagagttgaatggacattaatgattcaggtaaaacttccctactctgtcaaatagatcaatctacaaaccagacacttcaagaattgtaagaagagcagcaaaatatctccaattacagactatctttaattaatacaaaatgattttcaataaccaatatatctcacttacagaatgaaaataaagcataaacggcacatcatgcttttcaaaaaacttttcactgcaatgaacataaaacataaacggctgtgctacaggaaactaccaagcaagaagcaaccccctaactttataatcaagaaggcagtgtaaggttcatattccttcattgtttttttccagatgatgaacatcaaaaacatatattgactttgtctgggttacctcaatgtctgagagttttcctttcacactaaagaataatttggcaaactgaaatgtgaatacattcaacctctgaactactgagctggggtagaactagaaccaacattacccaagcccatcttctgccccaacaatgttagctgctctacaaagtcaactccagttagcatttctgttgttccatatataatatgtttggcaggttgctgatgttgtgcaagctcttgcagactacaatattcaacgtaattcccaccaccaatcatgaacacaattgcttccttaaatggtcctttcatatggctgctacttgctcccgaaccagactttggagcacggggatcaaacgagaggtatgaatctgtttcagggtttggcctcccttcaatcaaggcctcaactgtcctcgccaacgctagctgccggtcattagatagaagattttttacaccagccgtcactgcactaattgactgtccatagagcttctcagcccaatcaacaatattacttctgctggcagaatttgccgatgccaacgaaacattcaacgacttgatcttcttcacatactgaaaagcagcagtatcaacctcagactctctcagcgccgcttccacagcttccacttccgactgattaatggtttccgacgaaatgagatatatgatggcaaacctaagcttatccatcttcgttcccttccctttgagcacgccaagcaggtcagcccgttcaatgccccctctaaccatcatgtcattctccttcttagcataagaatcaagagacctctccttgatctcgcccaacaacacggtcgcaatgttggtgtgcttatcgatcacctgcttcctctcagtcaactcaggcagagaattcacagcgttcatcaaatgcttcgtgttcccgatcaaatccgtcccatcaaactccgcgccatgagtcccaccagtcctcttgttcacctcatccacatccttcttatacttattcaactgcgtctcaatctccaccgcaacctccgggaactccaacgacccattcgcaacccaaaaagaatcagcactatccaactcataagatctcatcccacccttctccccctgcacactcagcctattcagcttcaaccccagcacatcatggctcgagccgattcggctcgagtcatgctgaatcgccaccggcaactcgaaattccggtcaaaaatacacaacacaggacgctgaaacgagctcacaaagttcccaccctcagtaaacaagttattcttggacaacaaatgatccctaatccgctgatccaatgcagaagccaccatctccgcaggaccgccacgcgggcaccgaatcaccggcacaaccgcaagagtggccaacacacaaaacaacccaccaacgatcttctcaacaagctcctcaatttccttgtccccagcggaaggatcgttgagttgaacataacaaggcttgtgggccagtgaaaaaaggttatcctctagggttacaaattccagatattgatcgtgaaccttcgagactcgctgaatcgaatccgaatttagggttccggcggcgaggtcttcgaggagggggcgcgggatggaggtggagaagttgaggtggaggctctggtagagcgatttggaggcgtcggaaacgatgcgttgcacgttgggttggttgggctggacgaaataaactgcgggaacgtcgtgaacgggcttgcgatccttgtcgatgaggaagtagagggtgacgccgtgcttgcggaggtccttgacgtggatcagaggggagaggatgttctggcagaacttgtcgtagatgaggatcttgtagacctcttcgttcgcggttccggcggcgtttaagggctggttcaggttcagcatgcgcgcgatgcattctgtttgcttctgacggagattcagagacatgatggctgttgtattgttggaggagcgatgaattgggattgtgatgacgcggacgcgtgggtcgacccgggaatccgga

SEQ ID NO: 49407 - DNA, 2044 bp, Glycine max
  Clone ID: PAT_MRT3847_15621C.1
cgattctgccattgttggtgttgttttacgtagcttatctattctatcagagcaccgctcgtgaagtgaaacgcttagactcaattagcagatctcctgtttacgcacagtttggagaagcactgaatggcttatcaacgattcgtgcttacaaagcgtatgatcgaatggcagatataaatgggaaatccatggacaacaacatccgattcacgctggtgaacatgagtggaaaccgatggctcgcaatccgattggaaacattgggaggccttatgatatggttgactgcaacttttgctgtcatgcagaacgggagagcggagaaccagcaagaattcgcatccaccatggggttactacttagctatgctctgaacattactagtttgcttactggtgtgctgaggcttgcaagtttggctgagaatagtttaaatgcagttgaacggattggcacttacatagatttgccctcggaggctccctctgtcatcgataataatcgccctcctcctggctggccttctttaggctcaattagatttgaagatgttgttcttcgctacagacctgagcttcctcctgtgttgcatggcttgtctttcaccattttcccgagtgataaggttggcattgttggaaggactggtgcaggaaaatccagcatgcttaatgctttgtttcgaattgtagaattggaacagggaagaatattaattgatgattatgatgttgcaaagtttgggcttgctgatttgcgtaaagttcttggcattataccacaatctcctgttctcttttcaggaactgtgagatttaatcttgatccatttaatgaacacaatgatgctgacctctgggaggctctggagagggcacatttgaaggatgtgatacggaggaattctctggggctggacgctgaggtatctgaggcaggcgagaacttcagtgttggacaaagacaactgttgagtctttctcgggctttattgcgtagatcaaagatattagtacttgacgaagcaaccgcagcagttgatgttagaacagatgcactcatacagaaaacaattcgagaggaattcaaatcttgtacaatgctcattatagctcatcgccttaacaccattattgattgtgatcggattcttttgcttgatggtggtaaggttcttgaatatgatacccctgaggagctgttgtcaaatgaaggtagtgctttctctaagatggtccaaagtacaggagcggcaaatgcccaatatttacgcagcttagcccttggaggggataagtcagaaagagaagagaacgagcatctagatggcaagagaaaatggcttgcttcttctcggtgggctgctgcagcgcaatttgctctcgctgttagtctcacctcatcccataatgacctacaacgtttggaagtggaagatgagaacagtattctgaagaagacaaaggatgctctgataactttgcagggggttttggaaaggaagtatgataaagaaatcgaggaatctttgaaccagcgccaagtatccccagagggatggtggtcatcgctttataaaatgattgaaggtcttgctatgatgagcagattggccaagaacaggctccatcaatcagacttcggttttgaggacagatcaattaactttgatcaagttgatatgtagggaaaactgcactacttcagataactgccctgcctacacatgattgataacttcataagtttatagacccaaggttttgctaactatattttggcacatagctctacggctgcgctagcgccatgatattctaggagatgcaataattgtattttgtatattcttgtttaagaaaatcaaccaagaactttttatttttttggtgaatagaacgttttatcatttgttttggtgagtagaacttcttgtcatgtagtgttgtaatttttgattgccaaaaggatttctttaaatgcttctttcatgtcctagactagatacttttgatggttattcctttactgttcatctac

SEQ ID NO: 49408 - DNA, 3694 bp, Glycine max
  Clone ID: PAT_MRT3847_15622C.1
cagatcaatgatgctagttttcctcttccccttgctcatctcaaattttgtgggtcaaacccagattgccttgttctgattttaatcctttggagactaaagtgaaagttataccccttgattagaaaatcaaaggttgagacttgagagatttaaatagctacatattttattaaacatttgtatgcatttggctggtgatggtgacaacaaaatggggttaaaagggaatggtgatgctaattgaatgccagtgagcccgaatcctgatattaatagtcatggagtttttacggttgctcctctgccaaaaaaaaagaatgaagaggaagggatagctgaagatgtgaaggggaatctttttccagagggggaggaacctgttggtagagggtggcagggagcatctggattgaagtacgagatcacaaaaaatccgggtcttgcttagtttgagtttaattttatgtttctcacgtctaagttagagtgctaattttggataattctgaaatagtctgattggtttaacttgaatttggttactaaaattcaatgtcttaacagttatgccttagcctgatggtaatatagtatattctaatcaatttcattaatcatatgatctttgaatggcatagtattattttttctgcattctaactttctggtatgagggcgagccctggtgcagcggtaaagttgtgccttggtgacttgttggtcatgggttcgaatccggaaacagcctctttgcatatgcaagggtaaggctgcgtacaacatccctccctcataccttcgcatagcgaagagcctccgggcaatggggtttttgataaatgcatcaagggagatttgagagggaagacccgagttcttgtcacaaatcagctgcattttctttcgcaggttaatagaatcattttggtccatgaaggtatggtgaaggaggagggaacttttgaggaactctctaaccatggaccgctgtttcaaaagcttatggaaaatgcgggaaagatggaggagtatgaagaagaagaaaaggtagatactgaaaccacagatcagaagccctcttcgaaaccagtggccaatggagcaattaatgatcatgcaaagagtggaagtaaaccaaaagaaggaaaatctgtccttattaaacaagaagaacgagcaacaggggttgtcagcttgaatgttctaacgaggtacaaaagtgcattaggagggttttgggtggttttcgtactctttgcatgctatgtctcaacggaaacattacgaatatcaagtagcacatggttaagccattggactgatcagagtgctacaaagggttataaccctgccttctacaatatgatatatgcagctctatcatttggtcaggtcttggtgactttaacaaattcttattggttaatcatatcaagtctttatgctgccagaaggttgcacgaagccatgcttagctccatattacgagctcccatggtgtttttccaaacaaatccacttggaagagttatcaacaggtttgcgaaggatctaggtgacattgatcgtaatgttgctccatttgtgaatatgtttctaggtcaagtgtcccagcttctttcaaccttcatcctcataggcattgtcagcacaatgtccttgtgggcaatactgccattgttggtgttgttttatgtagcatatttatactatcagagcaccgctcgtgaagtaaagcgcttagactcaattagcagatctcccgtttacgcacagtttggagaagcactgaatggcttatcaacgattcgtgcttacaaagcgtatgatcgaatggcagatataaatgggaaatccatggacaacaacatccgattcactctggtgaacataagtggaaaccgatggcttgcaatccgattggaaactttgggaggcctcatgatatggttgactgcaacctttgccgtcatgcagaatggcagggcggagaaccagcaagaattcgcatccaccatggggttactacttagctatgctctgaacattactagtttgcttaccggtgtgctgaggctggcaagtttggctgagaatagtttaaacgcagttgaacggattggcacttacattgatttgccctcggaggctccctctatcatcgatgataatcgccctcctcctggctggccttcctcaggctcaatcagattcgaagatgttgttcttcgctacagagctgaacttcctcctgtgttgcatggcttgtctttcaccattttcccaagcgataaggttggcattgttgggaggacaggtgcaggaaaatccagcatgcttaatgctttgtttcgaattgtagaattggaacaaggaagaatattaattgatgattatgatgttgcaaagtttgggcttgctgatttgcgtaaagttcttggcattataccacaatctcctgttctcttttcaggaactgtgagatttaatctcgatccattcaatgaacacaatgatgctgacctctgggaggctctggagagggcacatttgaaggatgtgatacggaggaattctttggggctggatgctgaggtatctgaggcaggcgagaacttcagtgttgggcaaaggcaactgttgagtctttcccgggctttattgcgtagatcgaaaatattagtacttgacgaagcaaccgcagcagtagatgttagaacagatgcactcatacaaaaaacaattcgagaagaattcaaatcctgtacaatgctcattattgctcatcgcctaaacaccattattgattgtgatcgaattcttttgcttgatggtggtaaggttcttgaatacgatacccctgaggagctgctgtcaaatgaaggtaatgctttctctaagatggtccaaagcacaggagctgcaaattcccagtatttacgcagcttagcacttggtggggataagtcagaaagagaagagaacaaacatctagatgcccggagaaaatggctggcttcttctcgatgggctgctgcagcccaatttgctctcgctgttagtctcacctcatcccataatgaccttcaacgattggaagtggaagacgagaatagtattctgaagaagacaaaggatgctctgataactttgcagggggttctggaaaggaagcacgataaagaaattgaggaatctttagagcagcgccaaatatccccagacggatggtggtcatcgctttataaaatgattgaaggtcttgctatcatgagcagattgaccgtgaacaggttccatcaatcagacttcggttttgaggacagatcaattaactttgatcaggttgatatgtagggaaaactgcacttctttatataacagctcctgcctactgatgactgatgacttcgatcaagtcgatagacctaaggttttgctaactttattttggcgcgtagctctacaacggagctatgaaaatcaaccaagaactttttattgtttactttggtgagtagaaattcttttcatgtagtattgtaattttgattaccaaaagaattttcatcgatgctcatcttcattgagattgttcttttgtctatttagtttttaaaatattattatagatagggatggtttttagcaattattatattacacgaagacttaaatatttttttttgtc

SEQ ID NO: 49409 - DNA, 580 bp, Glycine max
  Clone ID: PAT_MRT3847_15623C.1
cgcggaaacgagtccaatccatcatttaaaaacataaaaaacagcagcccttaacccagagatgcaaagcccaagttcaggggagaccctgaccaaccagataagacatatgaaaccccttcataaaggggatcccccttaccaccccccccgaaggcgaaggacaagaggcaaaggggatcccttcggaatatggaaatcggccagggaacaaccattttccaatggcttcccagaaaaaaggaccctcggctgaccgggagggaacccttccttgcccggaatcttagctttcacatgggcaatagaatcaaagcttcccacccccaagggaagggccttccctggcaaagccttcacaaatattggcatacctccacgaagcctcaacaccaaaggcagaggggaccccttcgggattttataaccagcaggagtccgacctttttccagctgtttcccagaaaaaataagcctcggcggggcggggggaaccccctctttgcccggaatctttgccttcacgttatcgaggggatcaaaactttcaacttctaaagttattgtttttccggccaaa

SEQ ID NO: 49410 - DNA, 434 bp, Glycine max
  Clone ID: PAT_MRT3847_15624C.1
gcacgagaaaaaaagcttgggttttgattctccatgccatggcttctcttgtacttcttctctctctatttgtgcgtcccaagattagaagccaagtttccactgttgctgcttcctcctcagatattaaagaagatacttcaacttggcatgtgaaatgggaaaagcaaagagaaaacaatgatcgagataatgggttggaggatatcatgggagagaagattctgcaagagccaagagtttgtattcatttgatttagtcaaagagatatctattggtcatgaatcatcgttttgtgataaattatgattgtcatccttgcaaaatgaacgagtacaatgttcaatttatcacttttagtcatttttctttaaaactatcaactctgcttgtgccctgtttctatttgtaagctgagatataatgcataaag

SEQ ID NO: 49411 - DNA, 280 bp, Glycine max
  Clone ID: PAT_MRT3847_15625C.1
tttacgacataaggttttattaatgccagatcagcatagggcctcagtgtgactgctaatcatgggctcctaccatcgtcagccgcaactcttcaaagatctagagtatattactacggcgtatcaattaaagcaatttagggatagatgaccatgcgatctatgacgcgagaagacaactgtgagtaggtcattgccactcggatattataagcctcatatttcctctgagagtcttgcatatgaaccagaatgctggacgggctgaagcactttacct

SEQ ID NO: 49412 - DNA, 833 bp, Glycine max
  unsure (1)..(833): unsure at all n locations
  Clone ID: PAT_MRT3847_15626C.1
ctacacaccacattttctttcatttcttctctctntagttgctctcttcgaacaacttaaactctttttttcacctaggagtctagctcagttgtgatttcctagttcttgagttcgattccttcgaatcaaaacataaacagtgccattgatctctatcattgttccattccttgatggctcccgtggactctgacactttggggcgccattctctgattccgagctacctctattcctctccctcgccgcagaagaagaagatggaggcttcgagtttcgccattcattctgagagagagaatcgaaatatagagatgttttcgccgtcgttctatgctgcttgcaccgttggtggaagcctcagctgtggccccactcacaccggcatcacacctcttgacgttgtcaaatgtaacatacagattgaccctgtcaagtacaagaacaccagcactggatttggagttatgttttttgagcagggactaaggggctttttccgcgggtggggacctacccttgttggttacagtgctcagggtgccttcaaatatggattctatgagttcttcaagaagtactattctgacatagctggtccagagtatgcaaccaagtacaagacattgatctacctagctggatccgcatctgccgagttgattgcaggtgttgctctttgcccatttgaggcagtgaaggtcagagttcaaactcagcctggtttcgctagaggcctggctgatgggctaccaaagttggtcagaactgaaggagtctcagggttgtacaagggaattgttcctctatggggaagacaagttccatat

SEQ ID NO: 49413 - DNA, 244 bp, Glycine max
  unsure (1)..(244): unsure at all n locations
  Clone ID: PAT_MRT3847_15627C.1
atttcatcaaccggaccaaattatgataagcccagtcatggccaccgcaacagcagcaggcacgctcgaacttcatggagacgcgcctcctgtaggcccactccggcgcggtgcgggcgcatgcccggcttgtaattggcataaagatgcccgacgcccccaacaaagatagaagggtggcggactgtagctccgactggcccctgtgctcacggcttctattgggngacagatctgggtgatg

SEQ ID NO: 49414 - DNA, 297 bp, Glycine max
  unsure (1)..(297): unsure at all n locations
  Clone ID: PAT_MRT3847_15628C.1
caactccaccacatccctatttcgcaatttatacacctggtggcatctatgctcagtcatttttacctccgctggggaattcattcataacttttcccatcccttcctctaattccattactaacactttaataaacacttctgccatcatataagctgattccaaagccttcccaagttaaaaaaaaactacctatcaaaatatcataaggatctcttttgnagtaccaatattatcacaggcaaaaataataaacaacgtaaaacaccgtacacatctgttaatagaatccattc

SEQ ID NO: 49415 - DNA, 531 bp, Glycine max
  Clone ID: PAT_MRT3847_15629C.1
ttttctgttgggggtattatactttttggggcggaagctttaaccgacactattccattgccatgaccaggttgtctaaaacagcgccacaaaatggcgtctgtcagagtcatgagttgtgtactaaatacaacatactgtccccgattgtggaaagaaaaaaaccacttgtggcgagagaggaccccctaattttttagaactccagcgggggtgttaccacttgacaaactcttttcttggagaactacgtattgatggttaaccaacaactaatgaactaaccgggcataaacagggggggctgaacaaattataaggaatccggggtgcggaataagccatgccatgtttgtaagaatctatcagggacttagccgcctaaggtggaagaattccatcccaggtgacataccgagccccttaatcacaaacctgattacctggttagaccccatgtgacccttacatcaaaatagagagggggccctccatatccgcaacataccatcaagagatttgagaaaccat

SEQ ID NO: 49416 - DNA, 1988 bp, Glycine max
  Clone ID: PAT_MRT3847_1562C.1
gtgacagagtgagagaatgcttttcccggaaaaggagagagacataaaaaaagttccaagaaagaatcacagaattttcgcagaagcaggccaagaatacacgcatcccaaaccgttattaacgtgtcagcctctaaatttgcatggcatattgtctttaactgagtcaattccttaataaaccctctgctttaccaaccctgttctcactcattcacatactataatactacgatagcgtagactcttcccagttctgttgtgtgagtctgtgagtctttcttagctgatatggcggttgatcgctcccttacgaggtgctgtagcctcgtactgtggtcgtggatgttgctgaggatgatgatggcgcagggtgcagccgcgagggccaaccggaaggagtgggactcggtcataaagttaccggctgaaccggtcgatgctgactcggatcatgaagtgggaacacgatgggcggttcttgtggctggttcaaacggctatggaaactacaggcatcaagcagatgtgtgccatgcgtaccagttgctgataaaaggtgggctaaaagaagagaacatagtggtgtttatgtacgatgacatagctacagacgagttaaatcccagacctggagtcatcatcaaccaccctgagggacaagatgtgtatgctggtgttcctaaggattacaccggtgagaatgtgacggcccagaacctctttgccgttattcttggagacaagaataaagtgaagggaggaagtggcaaagtgatcaatagcaaacctgaggacagaatatttatatactactctgatcatggaggtccgggagttcttgggatgccaaacatgccatacctttatgctatggactttattgaagtcttgaagaagaaacatgcatctggaggttacaagaagatggtcatatacgtggaagcttgtgaaagtgggaaccatgttttgaagggtataatgcctaaggatctgcagatttatgtcacaactgcatcaaatgcacaagagaatagttggggaacttattgtcctggaatggatccttctccacctccagagtacatcacttgcctaggggatttgtacagtgttgcttggatggaagatagtgagactcataatctaaaaagggagtccgtgaaacaacaatacaaatcggtaaagcaacggacttcaaatttcaacaactatgcgatgggttctcatgtgatgcaatacggtgacacaaacatcacagctgaaaagctttatttataccaaggttttgatcctgccgctgtgaacttccctccacagaacggaaggctagaaactaaaatggaagttgttaaccaaagagatgcagaacttttcttcatgtggcaaatgtatcagagatcaaaccatcagccagaaaagaagacagacatcctcaaacagatagcggagacagtgaagcataggaaacacatagatggtagcgtggaattgattggagttttattgtatggaccaggaaaaggttcttctgttctacaatccatgagggctcctggtcttgcccttgttgatgactggacatgcctaaaatcaatggttcgggtgtttgagactcactgtgggacactgactcagtatggcatgaaacacatgcgagcatttgccaacatttgcaacagcggtgtttctgaggcctccatggaagaggtttgtgtggcagcttgtgaaggctacgattctgggctattacatccatcaaacaaaggctatagtgcttgattttgggttttgtacacagcttaaaaacccggttgatgatgtaatacttctctattgcattctccctactggtttctgctgcatgtgtcaaattttctctaaactagagtagcccaatagcatacgtgttatgagcattggtcatgtatataagtgtaatagtaatatcttttacatattataagatcagttagtttggtttacta

SEQ ID NO: 49417 - DNA, 220 bp, Glycine max
  Clone ID: PAT_MRT3847_15630C.1
gaaaacaaaacaagtactctcaaaactaaattttgcagggcccctacctaactatgtgataatactactgatcttctttcataaaaattcaccttcaacatacattcttgattacccttcttaccaatacctcaaaattttggtaaattttaatgacatgagccctcaaaccaataacacaaagtttcttcatctgttttctacattagaaatgaacata

SEQ ID NO: 49418 - DNA, 274 bp, Glycine max
  unsure (1)..(274): unsure at all n locations
  Clone ID: PAT_MRT3847_15631C.1
aggcgtcggccggtggcggangtggtagggtcgcctttcacgacgggagcatcgaccgactattcttctggtcgaccgtgccgtctgatattctgcacccgccttgctcctagcactatttggcacttgtgttagtgccggggttgcatcagaagctttggcccctccactacgaacacttggcaagggcacctttcgcggtagtttgtcaccgccgatttggcttgcctccgaatgggcactttgagcttaccatcttatcgaggatgggggc

SEQ ID NO: 49419 - DNA, 587 bp, Glycine max
  unsure (1)..(587): unsure at all n locations
  Clone ID: PAT_MRT3847_15632C.1
nnnnacatcgagttcaaaacctctgttttctctctccacactctgcctctaacttgaaaaaaaaactcaaacactctgttctcgtcgcatgcacataaacaataacaaatggcttccacaactatgttgttgctggtcgtgttcatgattctatgtatatcacacccctcatttcaaatggttcttgtgcctttaacacacacactttccaaagcccaattcaacagcacccaccaccttctcaaatccacttccacccgttccgcaaaacgcttccgccgccaactctccctcccactctccccgggcagcgactacactctctccttcaacctgggcccgcaggcccaggcccagcccattacgctctacatggacactggcagcgacttagtctggttcccctgcgccccttttaaatgcatactctgcgagggaaagcccaacgagcccaacgcctctcccccaaccaacatcatcaaagcgtcgccgtttcgtgcaagtcccccgcgtgctccgcagcgcacaacttagcccctccctccgatctctgcgccgccgctcgttgtcctctcgaatcaatcgaa

SEQ ID NO: 49420 - DNA, 219 bp, Glycine max
  Clone ID: PAT_MRT3847_15633C.1
gtgcccagggctgcatttgcaaaggggcgtcggacaagtgcagctgctgcgcctgatgctgggacagccccgctcccagatgtaaagaacgcgacttccacaaacctggatgttttatgtacaaccctgaccctgaccgtttgctatattcctttttctatgaaataatgtgaatgataataaaacagctttgacttgaaaaaaaaaaaaagagaaaag

SEQ ID NO: 49421 - DNA, 1203 bp, Glycine max
  Clone ID: PAT_MRT3847_15634C.1
gccacgcggtccgatcacgcgtccggattgatgaatgatgatccccatacaaaaatggtgctaacttcaatttcaatagtctcttcttcatcttcattcctctcagattctccttccacttcttcccctaccaccagaatcagaccattcttcttccattcctccaaccgagcccctctttttgtgttccccagagcacaccttcccagtgctaccctcagagcctcttcttcttccgtttccacgccgcatgaaaatgggtcgccggaacagttcttgaagagcaattccatagccgatttcatgcggttcaagcgcagggtcgatggtggtgccagtgccgagttgcagactgctcttgtcagctacaggaagaggttcccttggtcccttttgcgccctttccttcaggttgacttggtttccacaattcacatcgctgatgaagagtattttctggccctccaaaaggaactcgagagctatgattgtgtcctttacgaaatggtagctagcagggaaagtttagaaaatagaagaaatgctactaatacaaaaaggttaaaaagttcacgcacaaggggttttaacattttgggatgcatccaaagacagatggctcgaattcttacacttgatttccaattagattgtctcaattatgagtcttcgaattggtaccatgcagatcttgattatgagaccttcaaattacttcagcttgaaaaaggtgaaagcttcttttctttcgcaaaagatatgactcttaagtctacaaaggcagtattgcagccagcttcaattccggaagatcttgacccattgagatccaaacttttatgggcttcacgtgtacttcctatgtcacttgttcgccttcttatttggattcggtagttgttagaagtaattaacgatgtaataacttgataagtgaaaggttttaatgactattggtatgtgtgtaagtgtgatgataatttccaatagaggttactcttgaaattctaagaaataatttattggtgcttatttgggaagtctttagaagtcatcactgccactaaaatagaggtttttaagatgagaaagaacaaccccaacttgaagaggacatcatgtacccaagcagaagagatgtgaaagagtttcttgtgagtgggagagtgttcccattcttggtaacctttgagtgaaggactc

SEQ ID NO: 49422 - DNA, 903 bp, Glycine max
  Clone ID: PAT_MRT3847_15635C.1
aaagcatcctgtttttttttgtttttttcttttaatcctttctagttttgaaaattttatagtgtttacagggaaaaaaaattaaattgaataaaaagtagaaaacataacttattcagaataagggtaataatcaattcttgcttcttcaagctggttacttcactgaaaacaaagtcaaatgactaatacatgatattcgatattatgcgtagaatagaaaaatgaatgaaaagggattagaaatttatatttcattgtgacatgcatgggtaaagttgtgctttggtgacttgttggtcatgggttcgaatccggaaacagcctctttgcatatgcaagggtaaggctgcgtacaatatccctcccccataccttcgcatagcgaagagcctctgggcaatggggtacgaagtttttttattgtgacatgcatgaaaacttgctgtaatatcactcttggagtcttggtgaatattctgtatagctgtggtgatacttttacaatcaaattccatgatcttcatccagttctcaaagtctccaatttccttgagagcagtgttgagggcatgagtggcagcgagccattgatcggtttgcttcatgaacctggtgatggtggcagccagagttcgaatttcaagctcaattcgcttctggttgatgaaagaatcttggaccccaccattcactgcttcaaccagcaaatcagaaacacgctcggctttccttattgcgtccttcttggctttgtctgtgtggtgggcaaggacaagagatttgtggtggtgcagatcaatcaaatgttgcaaggaagcttctagaccttttggctctgcgtccattgccatgtaccctttttcattcattcagttctaacttcactttgtaaagtctcgt

SEQ ID NO: 49423 - DNA, 335 bp, Glycine max
  unsure (1)..(335): unsure at all n locations
  Clone ID: PAT_MRT3847_15636C.1
gtcagaacctccagtggcgtggctccgatctgatcgtgcgcgtcgggaagcccgagacgattctcatggagatcgcgatggctgtcggtcatggctgtaccagtgagtaacagatctcgtgagtgtacttttgagagggacggtgaaggtgattgttattgattttctggatctttcatttttgtgatttataaatttgatatgttgcactgccacaagtaacaggggagactatgtttttgaggttnttcttaagaaacatatagcggcagtttttagctgccactantttcattaattattcaaaaacttanattaacgaaatactgcacgtt

SEQ ID NO: 49424 - DNA, 424 bp, Glycine max
  unsure (1)..(424): unsure at all n locations
  Clone ID: PAT_MRT3847_15637C.1
acgcgtcggnnntggtgacctcacctctacaccatgctcgatgttgatggaattgatgctgcgnnacaatctctgagggggaatgcaggtcgatcactcgcttgtggatgcgcatctggaacctgtcccaggtcttggaaccttcaccacaaggggtcttgcgggctgtgatgctcaggatcttggtcggcatgcggactnnncccttcacacgcaggttctgtttcttggcgccattgatgaggtcagcgcacactttctcaagcgagcgcacgttgcgcgaagtcagcgtgatcctgatgcggtggattggctagacctctgcctgaggcttctggatatccttgcctgacacgactnncggctggcatattgctgtagatactacggtcgagataaacanntttcctattannnattggtc

SEQ ID NO: 49425 - DNA, 687 bp, Glycine max
  Clone ID: PAT_MRT3847_15638C.1
tcagaaaaagggtaataatcaattgttgcttctttaaaccagttacttcactgaaaataaagtcaaatgactgatacatgatattcgatattatgcctagaatagaaaaatgaaagaaaaagggattagaaatttagaattacattgagacgtgcatgaaaacttgctgtaatatcactcttggtgaatattctgtatagctgtggtgatacttttacaatcatattccatgatcttcatccagttctcaaagtctccaatttccttgagagcagtgttgagggcatgagtggcagcgagccattgatcagtttgcttcatgaacctcgtgatggtggtagccagagttcgaatttcgagctcaattcgcttctggttgatgaaggaatcttggaccccaccattcaccgcttcaaccaacaaatcagaaacgtgctcggctttccttattgcgtccttcttggctttgtctgtgtggtgggcaaggacaagagatttgtggtggtgaaggtcaatcaaatgttctagggaagcttctagcccttttggctctgtctccattgccacggaccctttttcattcattcaattctaacttcactttttaaagttgaggagccccttcttctggttcgctgaaacaacttaccctttgatccctcaaatttaaaagtggttccccttctg

SEQ ID NO: 49426 - DNA, 338 bp, Glycine max
  Clone ID: PAT_MRT3847_15639C.1
ctgaaaaaacaaacaagagggtttttatttttttaaattcaaaaactaacaggaaaccgggtccatttggggggctaaatgggaccttcaaactggggtttggtgccccaaattttaaccaagttgtcccaaaaacacggtgggttaaaactcaaatccataaaaactaacttcaaatcaagcccgatttggggggcgggaccggaattgaattccccttacttttactcccgaaccacgaattatggtgataaacctaaacggggttgaggatgacaggggcagtcaaaaactgaattccttttttggtgaagggaagcggttttaataggggtttt

SEQ ID NO: 49427 - DNA, 182 bp, Glycine max
  Clone ID: PAT_MRT3847_1563C.1
cccactcatcctatctaattcatcttcattatatataatattcttactcaacattattcaatcaacactaggatttcttatttaaactaacactccatcttttatcatcactattatcaactacaacactcattacacttattaacaaattctactacacaatatatcctttcattctttca

SEQ ID NO: 49428 - DNA, 218 bp, Glycine max
  unsure (1)..(218): unsure at all n locations
  Clone ID: PAT_MRT3847_15640C.1
tcgggtctaggaaaatgcggaatgctttgcatgatctggaattggtgttttcttacgctagttcgtttgttaaattcaatcaaggaagtagcgcatgaccctgatgttgagtatgctctgcctatttgaaaatttccacacctctattaattgtcgtaatgatgtgtgaagtgtgtgttattttaaaaaaaannnnnnnnaaaaatnntnnnnnnaat

SEQ ID NO: 49429 - DNA, 174 bp, Glycine max
  Clone ID: PAT_MRT3847_15641C.1
ctagatttgtcctagttgttggggggaaattactaagagttttcacgttcatatttaacctaatattggttgatgagctgaatttggagaaaccaccaggctgagagtgagaggtgcatgaagatgatggcgttgacggtgggaatgtaaggcaagtttcctaccgtgtcgcat

SEQ ID NO: 49430 - DNA, 506 bp, Glycine max
  Clone ID: PAT_MRT3847_15642C.1
gaattctgcttgcagctgatggcgcaaattctgctccatgggactcttcacgccactgtctatgaagtcgataagctcaaaattggtggaggcaactttttaaccaaggtaagctttcttaaacttctctctatttttatttttatttggttggttggttgtacacggttagattttcttttgtagttagttaaattaactcttaattaatttagcatattagtttattgataatcttgcaatggtatccgcgctgcctctgttactgccttctccaaacagagaataaacctaactaaccttcacacgttaatttcatgaatggcgaattaacttacctgatctatatggtgcttttatatcaccaatattttttggtttcttgatctatatggtgtttttatatcaaagtactgcattatttattattgatcccactgaatgttataaagaacaaattaagataatgagtataaattgtgttaccatatatcttattcatcgtt

SEQ ID NO: 49431 - DNA, 266 bp, Glycine max
  unsure (1)..(266): unsure at all n locations
  Clone ID: PAT_MRT3847_15643C.1
gacanaagtgtggnaatctgantttgaagtatgtaagcatttgcnatagggnattgagactctggcttnanaaaattttctgtgtgcgtatgcctctagntnnnaanncaannnnnncnaananngaanncannnagaaggnatgatgccttctgantccaccttcggtgtagcccacgacgccttcaacaccttcttcagcgaaaccggctctggcaagcacgtcccccgtgctgtctcgtcgncctcgaacccaccgtcatcga

SEQ ID NO: 49432 - DNA, 518 bp, Glycine max
  Clone ID: PAT_MRT3847_15644C.1
gtagtaagtcagtaagtggcaatcatcttctaagttgagtatccagccctatcagtaaggcagctcatgggaagttctttaagtcagaaagatccccagtgtcatcctcttcgtcttctcgaaaggaaaaattcgagcggcgggtcgaaatgataggccttttcttttttttttcgacttccagtgcaagagtacaactcattctctccattcagagaagagcgggaaggaatcttcttttctatgagacctgagcaaagtctcggctaaaatctcaagactagtgaataagtaaagaagtcccagccgcagagggaaagactgaaccgattcttcggagaacattaccccggaaggactagagcaggtacgacagccttaaggaccactccgctgctaatcaccttcggacttgaggacttcgcgtcacatgctatcaaagggtcttccgttccgctctacttaaccatttaagctaccccccaaatagaattgggattgggatccaacaattaaat

SEQ ID NO: 49433 - DNA, 1656 bp, Glycine max
  Clone ID: PAT_MRT3847_15645C.1
cgtttattcatgtcctttttggttgttttctttttctttttcggtacattacatctattattgagtttatgcatcccgcgagtgtgacttggaccatattcttttaatcatgcttctgctttgcatagagactcatcatacttctgccaaattactatgtatatttcgttcataatagctatttatttattgttaaactaccctgtgacagattctacagcttgagagaagattacaagaccaatttcaggtcagatccacgttagaaaaggcacttggattcagatcttcacttctcttttttcttttttgactccagccaacgtccaaattaattaaagaaattgcagtgttagagttagaagttatgtatttggaacaatatctgctctccttgtatcgtaaagcatttgatcaacaattaccctctgtagctccattcaccaaggaggaaaaagtgaagtcgcctccatcaacacctagagcaagattcgttgaagtttctaagcctgaggtgttaaccaaaagaggaagctctgcagtacaatctattgaccatgagcttgatactatgcaaaaggaatataatggatatgaacctgagacactagggaaagaatacaatgtacatccccacgcgtccgagcatttagactcaggtgtatatcgttgccactcctcgttatcccagtgtacaacatttacaacaagagtatctgctccagccgcagaagtattaaccgaatctctgcgcacctgccattcccaaccattgtccatgatggagtatgcccaaaatgttgatgcttcatcaagaataatcagcctggcggaacatcttggtacccgaatatctgatcatattccagatacaccaaataggctttctgaggatatggtcaaatgtatatcagctatatattgcaaactcgcggatccatctatgacaaatccaggcctttcatctcccagttcatccttgtcttcaactagtgccttttctattggagatcaaggagacatgtggagtccaggtttgaggaataattcctcattcgatgtacggttagacaatcctttccatgtggaaggactcaaggagtttagtggaccatacagcaccatggttgaggtatcatggatttacagagaaaatcagaaattgggtgatactgagcagttactcaagaatttcagatcacttatttctcaattagaagaagtagatcctgggaagttgaaacatgaggagaagttagctttctggatcaacatacacaatgctttggtgatgcatgcatttttggcttatggaattccacaaaacaatgtgaaaagggtcttccttctgttaaaggctgcatataacattgggggtcatacaatcagtgcagacacaatacagaacactatacttgggtgccggttgcctcgccctgggcagtggttccgcttgttcttttctccaagacaaaattcaaagctggagatggacgacgagcatacccgatcgagcgtcctgagcctcttctactctttgcactctgttcaggaaaccattctgaccctgcggtacgtgtatatacacccaagagagtgcttcaagaactagaagttgcaaaggaagagtacattcgagctacctttggggtacgc

SEQ ID NO: 49434 - DNA, 621 bp, Glycine max
  Clone ID: PAT_MRT3847_15646C.1
tttttttcttttttcctttccatgagttgatgcttttttttcaagctaattaagcttgaattagctggtggggctttttaaattcgtcgataaaaaaacagtgttctgctttttttctcttgtgttttttggttgcagattcaggaactggtgtgtgaggtaatatatttgctagatcttcattccccctttttttggcttcatgggctgtttttttggggcattggggcttccttgtggttttgtggctcaaaaagtttattcctttgaaggagttgtttgcttgatgaatctgtgtgccgcttccacttcagttctcaatttcttatcgacaatcgagatctggtttgttttaaatttgttaatttgtttaactattcctttcattttttgagatttgaaaaaaggtttttttttgtaccatttgaattaattgtagatactcagaattcattggtggaaggcattgtttcaccgactgcaatttttctgaaagtactgcatgattgcattccctcctccccttttctcgtggctgttaaaattgtgatgttaattattgcctagtcttatcgtgaatcagaaccgactttgatttttaacttttcctgctgaagaaat

SEQ ID NO: 49435 - DNA, 192 bp, Glycine max
  Clone ID: PAT_MRT3847_15647C.1
aagaaccaccgcagaacatagcacagcggggcgggaaaatctgccaaggacccccctcccctactacaccaactttgtgtcacccccagaaggaaaattccaaacagttataagcaaccccgaagactacaagaacacaaccggtaaccatgatcttcactacattactggggacaaccctccaaaacaaca

SEQ ID NO: 49436 - DNA, 441 bp, Glycine max
  unsure (1)..(441): unsure at all n locations
  Clone ID: PAT_MRT3847_15648C.1
cgacccagcgcccgccaggcggcgagaggacaaggcaggcagagcanagaagaagaaagccagaacagaagaggcagaggcacagagagagacaagaaggnagggcggggacaaagangacnngagaagacaaacagaaggangagggngcaganagcgaccaagagcgggacaacacggancgaccaaaaaagagggagagaaagaaagaaccnggacgaggcgggcgggagagggagcaagaaagagccgggaagggacngcagcacccgaggccgggaagggngcaagcagggaaggacggggaagggcgagaagaaagagcacgaaggcaaagacggaagcgagcgacacaggcagagagnncaaaaccggccaaggaacgagccagcaaaggcaaagagcaaggggacgngaagcaggcggagaacacaaagaaga

SEQ ID NO: 49437 - DNA, 3081 bp, Glycine max
  unsure (1)..(3081): unsure at all n locations
  Clone ID: PAT_MRT3847_15649C.1
agaaatgagtacgctgcgctgcaaaaccagcttcagctgcttaagcagaagcaggtggcgctaatcgacactttgcggcaattagagacagaaanagtcgcangcacgcgtacgtaanctcggaattcggcgcgtgcacggaactccagactactcgtgtaatctgaaattcaaggaacaatctataattgaccggaatcctcaccaggttcatggtattgttcaggagtacgctgcgctgctattcccgacttcacccgcttaagcggatgacagctggcgctattcgactcgtggcggcagtgggagacggaaggggttgatatcgatatcactggcgctgccgctagccaagcggagttagcctcccaagttctctacttcatattgcatcatttgtgctgcgtttccactatatgcgactaggcctcgcctaaagaaacatctgtcgcggacttcgccaagccgcatctccccgccgccgccgccgccacctccgtgagatccgattcggctccgcgtcacagccacaagcacagccacagccacagcgggagccagcgggagcagccggtggtggacgtgaagatggttgaccaggtcgggaacggaatctccggaatactgtacaagtgggtaattggagggaacgaaaacaaagaaatatggactcttctcctggaatgggtggcctcatgcatcttggtcagatgcccgtttgctctggaagcgaagcagggctcccaagtttcccactagatataacttcacccgctttgccatcacattaaatgaacttacccctggattgaaggagaagttgccacctacagattcgaggttaagacccgaccaaaggtatttggaaaatggagagtatgacatggccaatgcagaaaagttacggttagagcagcggcagcgccaggctcggaagatgcaggagagtggttggaaaccacggtggtttgcaaaggataaagctagcgggtcataccgctatctaggagggtattgggaggccagacagcgaggaaactgggactcctgccctgacatctttggccaaattccttcggttcacatttctgacgaaggtcatattacattttagttcttctaaaatctgttcctccctagtttttggaactggttggtggtgtctaatgacagcgatctagcggttcattgacaccttgcaatctcatgttacaaaaaaggttgatctggaggatacggaagatgatgagacccaaagacagtggaatgataaagaggcttcctctagattaacacacgaaaaatttagtgcaagaactgcaagtgaatctgaagatgacaatgagagaaatgatgctgccgaggaagaaacagatgatgatgacaacgccttttttgatactcgtgatattcttatcatccagttcttttaaaagtaatgggtctgattatcgagtatcatccttctcttcagatgatgaaggtttctatgcatttgaatcagaggatgacgtagatccttcgattagatatgttggaaccaattaccctcatgttaagcggcgtaagaaattgcctgaccctgtagaaaaagagaaaggtgtcagtctttggtcaatgattaaggataatatagggaaggatctaacaaaagtttgccttcctgtttattttaacgaacctctttcctccctgcaaaaatgttttgaagaaatggagtattcatatcttctggaccaagcatatgaatggggaaaaaggggtaatagcctcatgaggattctctatgttgcggcttttgctatatctggctatgcttcaactgaaggaagagtttgcaaaccatttaatccgttacttggggaaacatatgaagctcactatccagataaaggccttcattttttctcagagaaggtcagtcatcacccaatgattgtcgcatgtcactgtgagggtacaggttggaaattttggggagatagcaacctaaagagcaaattttgggggcgatcaattcagctggatcctgttggtattttgactttggaatttgatgatggggaggtattccagtggagcaaggttactacatcaatatacaatctcatattgggaaagctatattgtgatcattatggtacaatgcgtatacagggaaaccaagagcactcgtgtaaactgaaattcaaggaacaatctataattgatcgaaatcctcaccaggttcatggtatcattcaagatagtaacggaaagactgtatcaactttgtttggaaaatgggatgaaagcatgcattatgttaatggagactacactgggaaagggaaaggtcatgatactttgtcagatgctcgtttgctctggaagcgaagcagggctcccaagtttcccactagatataacttcactcgctttgccatcacattaaatgaacttacccctggattgaaggagaagttgccgcctacagattcaaggttaagaccagaccagaggtatttggaaaatggagagtatgacatggcaaatgtagaaaagtcacggctagagcagcggcagcgccaggctcggaagatgcaagagagtggttggaaaccacggtggtttgcaaaggataaagcgagcgggacataccgctatgtaggagggtattgggaggccagacaacgaggaaactgggactcctgccctgacatctttgaccagattccttcggatcatatttctgacgaaggtcaaattacattttagttcttctaaatttttttcctcccaatttttttactgatgggtgtttcttatgactgcgatctcgctgttatggtacacccatgaaattcatgtaacccaatcagatgaaaacatgagcgactaataatgtaattctttttctttccgttgcaagtctatttatagaatccttattacttgcgacacacgtaatcgacaaatgtgctatattttatacctttttacccaccattattaatgcttgcatcacttaggaaacgttttgatcatttctatataatggaggacctaatataaaataatttaaatttaacattaaaagga

SEQ ID NO: 49438 - DNA, 2087 bp, Glycine max
  Clone ID: PAT_MRT3847_1564C.1
ggctcgagaaaaaaaatcacagaattttcgcagtccaagaagacacgcatcccaaaccgttttgatttggaacgtgtcacgctctaaatttgcatggcatattgtctttaactgagtcaatttcgcttaataaaacctctcttcactcctctgctttaccaacccaaccccctgttcctgtgtgtgtgagtgaccgagtgagtttgtttttctcagctgatatatatggcgcttgatcgctccattataagcaaaacgacgtggtacagcgtcgtattatggatgatggtggtgctggtgagagtgcacggtgcagccgcgaggccgaaccggaaggagtgggactcagtcataaagttaccgactgaaccggtggatgctgactcggatgaagtgggaacacgatgggcggttctcgtggctggttcaaacggctacggaaactacaggcatcaagcagatgtgtgccatgcgtaccagttgctgataaaaggtggactaaaagaagagaacatagtggtgtttatgtacgatgacatagctaccaacgagttgaatcctagacatggagtcatcatcaaccaccctgagggagaagatctgtatgctggtgttcctaaggattacaccggtgataatgtgacgacggagaacctctttgctgttattcttggagacaagagtaaattgaagggaggaagtggcaaagtgatcaacagcaaacccgaggacagaatatttatatactactctgatcatggaggtcctggaatacttgggatgccaaacatgccatacctttatgccatggattttattgatgtcttgaagaagaaacatgcatctggaagttacaaggagatggttatatacgtggaagcttgtgaaagtgggagcgtgtttgagggtataatgcctaaggatctgaatatttatgtcacaactgcatcaaatgcacaagagaatagttggggaacttattgtcctggaatggatccttctccacctccagagtacatcacttgcctaggggatttgtacagcgttgcttggatggaagatagtgaggctcacaatctaaaaagggaatccgtgaaacaacaatacaaatcggtaaagcaacggacttcaaatttcaacaactatgcgatgggttctcatgtgatgcaatatggtgataccaacatcacagctgaaaagctttatttataccaaggttttgatcctgccactgtgaacttccctccacaaaacggcaggctagaaactaaaatggaagttgttaaccaaagagatgcagaacttttgttcatgtggcaaatgtatcagagatcaaaccatcagtcagaaaataagacagacatcctcaaacaaattgcggagacagtgaagcataggaaacacatagatggtagcgtggaattgattggagttttactgtatggaccaggaaaaggttcttctgttctacaatccgtgagggctcctggttcgtcccttgttgatgactggacatgcctaaaatcaatggttcgggtgtttgaaactcactgtgggacactgactcagtatggcatgaaacacatgcgagcattcgccaacatttgcaacagtggcgtttctgaggcctccatggaagaggcttgtttggcagcctgtgaaggctacaatgctgggctattgcatccatcaaacagaggctacagtgcttgattttgggttttgtacacaaaagctttaaagcccggttgatgatgtaatatttctctattgcattctgcctactggtttctgctgcttgtgtcaaattttctctaaactagagtagcccaatagcatacgtgttatgtgcattggtcatgtatacaagtgtaatactaaaaccttctacataatataagattagttagtttacttgtctctgtttcaagctctattttcttgaactcaactccttctaaatcaaggagatttttcttagttcttaccatgttactttcctttggtgagattgattataaacaacataggtctaaaaaaaaaaaaaaaaaaaaaaaaagaaaaacaagggcggccgatctagagga

SEQ ID NO: 49439 - DNA, 289 bp, Glycine max
  Clone ID: PAT_MRT3847_15650C.1
tactctgaggccgaactttccttttttttttttttatgggaatccccacatcaagagacagtttatatgtattcgaacatattatccatgatcacactcagggctacaatgccgggtacataaaggtactgtctccccctctattcttgcttactaagtgagtcgagagcagaatcccatatttcctggacttctccaggaaaaaattttttataacattacaatttacttattaaccaaatataggtggttgaatacgcgggaattaagataaactagcaccaaagct

SEQ ID NO: 49440 - DNA, 193 bp, Glycine max
  unsure (1)..(193): unsure at all n locations
  Clone ID: PAT_MRT3847_15651C.1
ancgaatcgcgaccgnccacgcgnncgngannccaggaaccagtgtagaagaggctcacaacaagccaacagttgaacccgagaaaagagctcccacatcgaatggcactgaatgccccaaggatgagaaacttcctcggcgcaaaattgttgacaaacctaagacgcgctgcttcactattctccccatgga

SEQ ID NO: 49441 - DNA, 254 bp, Glycine max
  Clone ID: PAT_MRT3847_15652C.1
aaaaaaaacccccacaattttattaatgaaaatactttacaatttcaacacatattcactggcctggatataattttgcaccctttaattattttttcccccaaacaatggagtaatgcttaacaaagcacaaaccaacaataataacaattttagttgcattaatttacacgagaaagtgaattaacgtaataggcgacacatgtgtggcacgttcatgagggtccttttttaaggatttgcaacattgaatt

SEQ ID NO: 49442 - DNA, 1082 bp, Glycine max
  Clone ID: PAT_MRT3847_15653C.1
atttgttccagcatctgcttcgccacctacacgttttgtcttttctcgtgtaccatttggtgttggcaacagaaactatcctcagtctgcagccaatgatgattcatagacacgtgctgacccaaatggagacctggctggagatggcttgacagctttagttgggctaagcctgggagggagtaatggaacaaatgtacatacagagctaacacaaaggggatatgaaatgggcttgcaaagcagcatgtctggaactactgctggaggtgcaagtactggtggcattcccatgcacatgttagagacaccggaacataccattggtatagaatgggacaatgtcaacagtagttaaataaccctggatttgaaaacacctttaagccatttccccccttttcgctttggtgtacgttttgaggatgtgcataggcttggtgatggccaggtcaagcattctccagaagttttctatgctggttctttgtggaaggtcagtgtacaagcttttaatgatgaagacccccagggacggcgaacccttgggttgtttcttcaccgtcggaaggcagaggtaactgatatacatagaaaggtgcatatgtatgttgactcgcgggaaaaggtgactgcacgctaccagttgaccgtcccatccaagagagaaatgacggtgtttggaagctttaaacaaacaggcactcttctacctaaagctcctaagggatggggatggcgaactgccctgttatttgatgagcttgctgatcttcttcaaaacggtgccctaagggtcattgctgtagtgcagcttgtttaaattaaacggttaaaccattaagttttgcacactatggctgaacatgctgatgatttgtggaaggaaaattattagtcagttttttcttttgtaaaacaaaaactttcttttgtccagtcttgggggctggacgatggtgaaagcctcattacatatacatgataaaaattgagaattatgaaactgcatgctattgtatgaatagtatgggatcagtaattcagtatactatgcaccatttagccttgctttctcctcc

SEQ ID NO: 49443 - DNA, 301 bp, Glycine max
  unsure (1)..(301): unsure at all n locations
  Clone ID: PAT_MRT3847_15654C.1
ctcttcatcaccctcatcntcatcactttcattgccttatcaacatccttcgccttcgcctttctctacttctcttgcaaaaccaccactttcaccttctccttcttctctctctctcttctcatcaaaagctcgtcctctctccaaactcaaacgccccgtcgtcctcctagtctcctccgacggctttcgtttcggttaccaattcaaagccccaactccccacatttcccgtttgatcgctaacggaaccgaagctgaatccggtttgattccggttttcccctctctcactttcccc

SEQ ID NO: 49444 - DNA, 241 bp, Glycine max
  unsure (1)..(241): unsure at all n locations
  Clone ID: PAT_MRT3847_15655C.1
gggnatttgtttgagcntagnacgcacctcanncanggacantctttctccctgcactcacttaaannntcaacactttcccaatggnttgcacggcgtccaagctagnaaacgagtcacacngtgcgccgctgcaaagagcgccgccgcctgatgnnggaggcggtgtangtgcgtgangacctggccgcngcncattccgactactggnggtgnctccgcgtccannggctccggtctt

SEQ ID NO: 49445 - DNA, 116 bp, Glycine max
  Clone ID: PAT_MRT3847_15656C.1
ttattaccataaattttattgtcattgaccggggcaaacatgacgcattgacgcacctcaagtaacagctgctctccaactggcactcttgagatcccacgttctgaatcgcaaac

SEQ ID NO: 49446 - DNA, 1392 bp, Glycine max
  Clone ID: PAT_MRT3847_15657C.1
cggtgtttgctttagaaggggagagtttggtctacacacaccaccacatgaagagcatggtgacgccattgacgagggtcttaccctttcgtcacccaaatggccataatacccttccattttctcttacacgctacccttcttcaccaaacttctccttctcccctctcactctcactctttccatggctgcttcaccccaatcctccgctccaactgtgtcgcctggtgatgttaacatcgacaaagatggtgtatttcaattgattcaagctcatcaggaaaaagctgctagacttccaccagttgaggagattcgaactgtccttgatcgtagcgtgcgcgggatgctctctacattctcaaagaagtttgatggttatccatcagggtctatggttgactttgcatgtgattcaaatggatatcctatattagcagtgagcgacttggcagttcattcaaaggacctaactgccaatcctaaatgttcattgcttgtggctagagatcctgaagataggactgatttagtgattactgtacatggtgatgctatctctgttcctgaaaatgaaagagaagccgttcgagctgcatatttggcgaggcatcccaatgcattttgggttgactttggagacttccattttcttgcgcattgaaccgaaagttgtacgatttgtgtcaggtgttgccacagctttgttaggatcaggagagtttagtggagatgagtataaatctgcaaaagttgatcccatagctcagttttccaagccagtggcgtctcatatgaacaaagatcatgctgaagataacaaagtgattgtgcagcattggacctcagttccagtggactttgccttcatactagatttggatagtcttggtttcaatgttaaggctggttatcagggtgatactttcaagcttcgtgtacctttccctcgatgtgcagaagatagaaaggatgtgaagactctcattgttgagatgcttcaagctgctaggcctaaagttgattgatcacttcacagatcaatgatgaacagcacctgccatccttcttggggagaggacaaaatgtatacgtcaaaaaagtaaatgcagttataatttccaaagataaagatgacaaagcaaatggttgacttttgtcatttcttgttcacactctatttagtattttcaatagggaaagcacttgaatattcaagcatacagcacaagtggtatgatactttatcaaagaaacaaacccttcatacataaatggttttattatgtatttcttcaggtgtatcgagttgaaacaatgtatggatggataataattaattatttttggtacttgcaatagcaaactctgagctagatgttgtgccatct

SEQ ID NO: 49447 - DNA, 729 bp, Glycine max
  Clone ID: PAT_MRT3847_15658C.1
ccacgcgtccgcagacacaccgtgcgtccttgttaggttacctctgtgacatttgtgctgctagttcatatatttgcggctgacaccgagaaggaaagcaggaaaaaaacaaaaaggagcagatgggtagctcaggtttctcatggaaattggcggatcatccaaagcttccaaagggtaagactgtggctgttgtggtattggatggttggggagaggccacacccaatgagtacaactgcatccacaaggctgaaacaccctgcatggattcacttaaaaagggtgctcctgaacggtggagattggtcagggctcatggtactgctgtaggacttccaacagaagatgacatgggcaatagtgaagttggtcacaatgcccttggggctggtcgcatatttgctcagggtgctaagcttgtcgaccttgctctagcctctggaaaaatttttgaaggagaaggtttcaagtacataaaggaatgttttgaaaatggcacattgcatctcattgggctactgagtgatggtggagttcactccagacttgatcagttgcagttgttgcttaaaggagttagtgagcgaggtgttaaaagagtccgtgtccatattcttacagatggccgtgatgttttggatggctcaagtgtggggtttgtggaaacccttgaaaatgatcttgcaaacttgcgcgcaaaaggtgtcgatgctaggatagcatcag

SEQ ID NO: 49448 - DNA, 463 bp, Glycine max
  unsure (1)..(463): unsure at all n locations
  Clone ID: PAT_MRT3847_15659C.1
atctatttttagcaaactaaacacacttctcttagaagataattgtaaaatggcatcactcaaagctgagaaacctgttgaatctcagtcatcagggcaggttaagaaagaacctgcaaaacccagtggtagcactccaaaagctccttcttccaagccagctccaaagaaaactcagaaaaggtctcgtcctaaacagaaggcaagcagcaataaataagatatattagtagaatgatgaataagaaaaatagttgttggaatcttgtgaagagtttgtaagcatgctgtcgtgtagggctcttcaacaaaatttgataccagtactttacctcttgcttctgttgcttactagtcatctgcatgtaacttattacaaggctaagctaaaataaataaaagatacttatttattagttatgagaacatgagatcattagcataggtaattgattacacattn

SEQ ID NO: 49449 - DNA, 220 bp, Glycine max
  Clone ID: PAT_MRT3847_1565C.1
gacagcactggatgagttgatcagaatagtcgatagccttctgatcgaacctcaaggtcgctagtgctcctgcgagagccacagcgtattgatgcattcttcgagcaatacttcggtcaggtcgtctctctcaatgctcactgcatatgattcgcttactccgaaggcgatctcctcacgttcaaagcctactgtcatatcacactcaatgcttgcactt

SEQ ID NO: 49450 - DNA, 472 bp, Glycine max
  Clone ID: PAT_MRT3847_15660C.1
gctgcttcaacataacaactgtgtttagccactctcagactgttgtggtttgcggaaactgccagactgtgttgtgccaaccaacaggcggacgggcaaggttaaccgaagggtgctcttgtggaaggcttttgatggcagtgctctgagactgaatcattgaaactagattcaatttattcgctcctttcttcaccaaaattgaattgaatggatgctatcagaaagcaagcctccaagcttcgagaacaggtcgctcgccagcagcaggctgttctgaagcagtttgggggtggcggttatggaggttcagataatgtggttactgatggagtggagctccagctacaccagaaacttgagaaactttatatatcgacacgtgcggggaagcattatcaaagggatatttgtcgtggtgtaaaaagttatatttgtactggatccaagcaagtggaaataggaacaaatt

SEQ ID NO: 49451 - DNA, 697 bp, Glycine max
  Clone ID: PAT_MRT3847_15661C.1
ctggttgtgcacgccactgctggggctgctgctgggggtttggctgctgtggttaccacgccgcttgatgtcgtcaagactcaattgcagtgtcagggtgtctgtggttgtgataggttcacaagtggatcaattggggatgttattagaacaatagtgaaaaaagatggttacagagggctgatgcgagggtggattccaaggatgctctttcatgctcctgctgctgctatttgctggtctacatatgaagctggaaagtccttattccaagatttcaatcagcagaaagacactggcaccgttacctaaataacagagttagaatatacatcattattcggttccgttataatagatgattctgtctgtcaaaattgataaaatgctacaaacgggggcgtgagcaagcaagccttttcaagttatgcgttctaaccccaaataatatatacagaaagcatcggattaacctactaatggagaacttgttttcttgtacacattgtcagttttaattatgatttttcccccgccttagcttttttgctagtttcatttagacagaacattattccatggaaacgcctctacgccacatgaaatttttgccttagtttcatgcagctgtaagttttaattctgtgaaagattattttgatattctgaaatttttaagagatttcatttccgggcc

SEQ ID NO: 49452 - DNA, 2423 bp, Glycine max
  Clone ID: PAT_MRT3847_15662C.1
gcagaaggtttggtcttgttaggttacctctgttaggttacctctgtgacatttgtgctgctagttcatatatttgcggctgacaccgagaaggaaagcaggaaaaaaacaaaaaggagcagatgggtagctcaggtttctcatggaaattggcggatcatccaaagcttccaaagggtaagactgtggctgttgtggtattggatggttggggagaggccacacccaatgagtacaactgcatccacaaggctgaaacaccctgcatggattcacttaaaaagggtgctcctgaacggtggagattggtcagggctcatggtactgctgtaggactttcaacaggagatggcatgggcaataaaaacttccaacgggttagcctgtggctggtttggtattggattgttggggtgaggccacaaccatgttcgtacatctgcatccactaggccgaaaaaacctgctcaggttcacttaaaaagggttggaaaccgccctggggattgtcattgggaaatggaggagttggtggaaattcccagtgactctgggattacattcaatgaactaccattaatgaaagcattgcagattgctgaaaaggctagggatgctattcttagcgggaaatttgatcaggtacgcgtcaaccttccaaatggtgacatggtggggcatacaggtgacattgaagcaacagttgtggcttgcaaggcagctgatgctgctgtgaagatgattcttgatgcaatagagcaagtgggtggaatttatgttgtcaccgctgaccatgggaatgcagaggatatggtcaagagggataaatctggaataccacttctaggcaaggatggaaatatccggatacttacttaccagactcttgagcctgtgccaattgctattggtggtcccggattggcccctggtgtaagattccgaaatgatgttccaaccggcgggcttgccaacgttgctgcaactgtgatgaatctacatggatgcgaggggcgaagccccttataagtttacaaatgctcttgaagctgtcaagaagctgagggcagaaccaaaggccaatgaccaatatttgcctccttttgttattgttgacgagagtgggaaacctgttggtccgatagttgatggtgatgctgttgttacattcaacttccgagctgatcgtatgacaatgattgctaaagctcttgagtatgaaaattttgacaaatttgatagagttcgttacccaaaaatccgctatgctggaatgcttgaatatgatggtgaattgaaacttccaagtcattaccttgtttctccaccagagattgacaggacttctggtgaatatttagtgtataatggtattcggacttttgcttgcagtgagactgttaaatttggccacgtcacattcttctggaatggaaaccgctctgggtattttaatgcagaattggaggaatatgtggaaattcctagtgattctgggattacattcaatgaacaaccattaatgaaagcattgcagattgctgaaaaggctagggatgctattcttagcgggaaatttgatcaggtacgcgtcaaccttccaaatggtgacatggtggggcatacaggtgacattgaagcaacagttgtggcatgcaaggcagctgatgctgctgtgaagatgattcttgatgcaatagagcaagtgggtggaatttatgttgtcacagctgaccacgggaatgctgaggatatggtcaagagggataaatctggaaaaccacttctaggcaaggatggaaaaatccagattcttacttcccatactcttgagcctgtgccaattgctattggaggtcctggattggcccctggtgtcagattccgcaacaatgttccaactggtggacttgccaacgttgctgcaactgtgatgaatcttcatggatttgaggctcccagcgactacgagacaactctgatagaagtagttgataactaggaaccaatagatgattttttttttttttaatttgcaaaaactcagggtaagcattgcagcccacaaaataattgaaagttttcatccttccacatgtgtggtggttttgttcttatgagttaccaaatttcagtctggagttgacagaacagtataaccaattaatggcattttgacactttctcctataaaaaaaaaaaaaagtgctgtgaagttggtcacaatgcccttggagctggtcgcatatttgctcaaggtgctaagcttgtcgaccttgctctagcctctggaaaaatttttgaaggagaatgtttcaagtacatacaggaatgttttgaaaatggcacattgcatctcattgggctactgactgatggtggagtccactccgacttgatcagtgcagttgttgcttaaggag

SEQ ID NO: 49453 - DNA, 706 bp, Glycine max
  Clone ID: PAT_MRT3847_15663C.1
cataataatagaccattgagtgctccaccgtagcctttgctctaataactaataagattgatatatatcactatattttacaattctaaaccaaagtcagaacttggaagggaattgcttgagaacttgttcattctgtttcgtctctttcactttgctcctccgtagtccctttctattctacttacagtcaagacagcaacaaccgccacaggtacgcgccattttcactctccgattcgcagagtttcacttcaaaattatcggaagcaactgaaatcatatcaaaatcaaatgtattattattagtaaatagcacaaccaaattcactaacaaccatgtcaaggcaaactgagacaccgttcctcgaagaatggctaagcattaggtgcggcattaacgccgccgtcgccgccgtcgtcgtcaccatcacaaaacccaccgtgcgagccatcgttcaagcatggaccgcactccgagactctctgcaatcccagcagcagcagcaccttcaaaccctagtaaattcccaatcctccctccacgtggcagaaccccaagcaaagctcctcctcacccttctccaatcttgtcccacgtcctacttcgctcgcgtgttagactcctgtacacgtggctccgagaatccccaaaccctaattccaatataatcgattccgcggtcgagattctctcgcacttcca

SEQ ID NO: 49454 - DNA, 361 bp, Glycine max
  Clone ID: PAT_MRT3847_15664C.1
atctctcctttcttcctcaaaatccagatttgccaccgcagttcctctgtctagctttggtgtcaccaatgcctcttcttctcgcttttctatgagtgctgactgaatgccaggccagcctaaacctccttaccttgatggttcagcgcctagaggacttggatacaaccctcttcatgctggggagaatgaccagagaatcttgagaggttcagagagtcagaactcattcactgcaaatgggccatgcgtgcgtggtgcagggattttgtatccagaagcggggggcttaagcaactagatgaaggctgaggagtcgacaacactgcctgggggccaatcaacctgcctgtacgagcca

SEQ ID NO: 49455 - DNA, 745 bp, Glycine max
  unsure (1)..(745): unsure at all n locations
  Clone ID: PAT_MRT3847_15665C.1
ggtccggnaattacccgcgggagtcagacgctccagcaaactactgctacgttaatcatgggtccaacctctatggccgccggaagagtcacgaggtttttggccaggcactaccctctcgagcaccaccgtgataacgccgatgttgagttcgactttcttgatgatattggagaagccttgttagctcaaagtgctagcagtgatgagtgcggtcaccccaatgaaatggaggaacagttcgaccaagacgaggatcacagagataccgtcgaggagaatagaaccttttgggacaaacaacaccagcttttgcaggtaacaattcattacttaatccacccaataccttcctcaatttaattactaatttgctagctactgtacgcctatctaagaaacttgcatgcaccctgttaatttattttgatttttttaaatgttctcgttagattaaattgtttttttttttatatagtttttctatattacatgttttaccttatgtgatttatcatgtgtcatcaagttaataaattgacgaaaaaatgatttagtctatcaacagatgtgtttttttatctatagatcaaagaaaataatgagatgatggatcaaaatgtattttaagttgttttttggttatctgcaaagaaaaatataaattaagggagtatatatctgtttttaaccaaattagntaggggttaaatttagtgcagggccagtatatgcagaacctagt

SEQ ID NO: 49456 - DNA, 353 bp, Glycine max
  Clone ID: PAT_MRT3847_15666C.1
cccacgcgtccgctagtactagattgcgagcggctgccctttatttatatgagaagacctatatgtgttttcatggtgtaaaaggaaaaaaaatcattactctttaattaatttatatcacttgctttggaagctaattacttttattgccaattagaagattgcctttttgggccttgggctgccaatgaaaaatgagaaaggaagaaggggtttatagtttaaatcgccagcgggcgttttaaaggattcaagttaaaggacgcgggcaagcaactagatacctattttatagggacaccaaaataaaatcccctggccccagatgtacaacgtggaaaaagggaaaaccc

SEQ ID NO: 49457 - DNA, 534 bp, Glycine max
  unsure (1)..(534): unsure at all n locations
  Clone ID: PAT_MRT3847_15667C.1
gagagagaactagtctcgaagttttttttttttttttttaataaactaagcataactttgtaaaacttataatttacatcattttataaaaactacgtacggctctttccaaatcttccttagccatcatatcaatcccagatataataatataagctgaaaccgtcatacgtatgtacactaattttttaacaaagcaatttggcagcttgaatttctaatcctcaaattcccaaacccagttatgaatttgatcatcatctatgagtcatgactcattaataatacattaatacatcttagacattcaagtcattcaaactaaacccattcaaccaaaagatctattgcatatttgaaaaccgttgagaatagaagaaaaatcacgtttgagatgtgaaagctataactaatatataacttctaaaaatcatatcaaacgtgaaaaatcatattcgaatcgtgaacctcgtgccgaattcggcacgagggcatgttcgggtgtggagtggtgatggcggcgtcncaagcaat

SEQ ID NO: 49458 - DNA, 521 bp, Glycine max
  Clone ID: PAT_MRT3847_15668C.1
ataaaaatgattacattatcacttgcttttattcttcaaatatgaatcaatttaatccataaatatccctgcttcaagactacttaaagaggcagtaggagacaagaaacaaatgtattcctatttataatatcttgcatacatgcttagtacatgacttgttcataattttcctttgttaggtactcgcaggaaatcttgattagctgtgattgatgtaaaaatcactccacaaacattgcatccaagctattcccatctgaagtctttatctttggaggatttcatctcttcgacttgaaaaccccataaactttatcagtttaagatgttccattcctgtgcatttagtccctttcactacgcatgaattggaccctccagccaaataacttttcaggatcattagtcacaaaaagttgctccaaggtagggcataattttaagaaggagaataaagcctccttggtggattcatccttatttatagttggaaattccccataactcttttaatttta

SEQ ID NO: 49459 - DNA, 1212 bp, Glycine max
  Clone ID: PAT_MRT3847_15669C.1
acgaggttgctttgtaagatcactgcgctgccattgccaaacattcattcattcatttccataacttcagagagagccacgccatggtggcggaaatcgtcggccaaatcagagaggctgcatacgaagccgaagacatcatcgacacctatgtggcggacatgattcgacgtcgaaagatgaacctgttggagaaggtggtcatcgaggccatgcctgatttcaacctgagtgatgccatgcttgatttcagattaggactcagctgcagaggtttaaaggccaaggattttgatgcaacccttttaacaataaagaactttgaagttcttactctgtgtaaatggacttttgaggtatgccatgctcgtttaattcaaattctataaatttagtgtcttttcgtgggtggactcccatgggttggacctctacctagtacttctatgcaaaattctgtcacttgacatcttctctatgacattaatatggggggctatggtcccgggttgctttgtgcctggcccgtccatgtctttcggagtgtcggggtcttagtgcacggctttggatcatctgatactcgggtacttcctggggttgcctggtcgaggtgtcgcattctccctggcgatgtgttggatgcacctgttcactccaaaaaggttctcttttgtaggaattttcttttttcactaactgatgtgcagaatgatcctgaaagttatttggctggagggtccaattcatgtgtagtgaaagggactaaatgcacaggaatggaacatcttaaagtgataaagtttatggggttttcaagtcgaagagatgaagtctccctggctaaatgtttgattcatctgatcaagggaaagcctccaaagataaagacttcagatgggaattgcttggatgcagtgtttgtccagtgatttttgcttccttcaccgctttccaaggcttcccccgtgcacctatctgtggttatttttgatctcgtcatcgtctaagcatgtatgcaagatattataaataggaatacatttgtttcttgtctcctactgcctctttaagtagtcttgaagcaggaatatttatggattaaattgattcatatttaaagaataaaagcaagtgatcatgtaatcatttttttaatgatgtcatccaattgatttgattcaaaatatatgcttgcaatattgcttggaa

SEQ ID NO: 49460 - DNA, 375 bp, Glycine max
  Clone ID: PAT_MRT3847_1566C.1
aataagaataacgagtgaagtagcctattgttcgttaacaacatcttggtaaaagtattgacagccatggcagcagtagctcagcatgtcttgcttcctcctatcgacagtagctttaatggtagccagacacctcctggaaatgaccaccaggattgaacttaagaagaaagttgggcgcctccttttccaactgggacggctcgacgtccaactcccgcagacccggcaagtccgacgtcttgacctcgttcatgctgagacgcgtggcccagtcacgcgtgaatttagggtcccgaaactgctcacagaagtagccaatggcctgagccacgggaagggcaagttgatcaacctcgagttacgcttagtcac

SEQ ID NO: 49461 - DNA, 420 bp, Glycine max
  Clone ID: PAT_MRT3847_15670C.1
attttgaatcaaatcaattggatgacatcattaaaaaaatgattacattatcacttgcttttattcttcaaatatgaatcaatttaatccataaatatccctgcttcaagacacaaatgtattcctatttataataccttccatacatacttagcacatgacttgttcataattttcctttgttatgtactcgcgggaaatcttgattagctgtgattgatgtaaaaatcactccacaaacattgcatccaagctattcccatctgaagtctttatctttggaggctttcccttgatcagatgaatcaaacatttagccagggagatttcatctcttcgacttgaaaaccccataaactttatcagtttaagatgttccattcctgtgcatttagtccctttcactacgtatgaattgga

SEQ ID NO: 49462 - DNA, 266 bp, Glycine max
  unsure (1)..(266): unsure at all n locations
  Clone ID: PAT_MRT3847_15671C.1
ctcattctcattctaacattaccagacagccatgtacgnagagaagaagatgggcgaggagctggccccagtggtcacctccagctgtggcgatgtcgaggacttgaagcctacgacagaggtcgacgctgtcttcggcganatcaacgaggatggcccaaactacaaggatgtcggagcggtttggcaccgtcatcttgatgatgaagacgcaaatcggatgggagtcttgggtatccccgctgccctgcacacccttggtatga

SEQ ID NO: 49463 - DNA, 215 bp, Glycine max
  Clone ID: PAT_MRT3847_15672C.1
cggctcgagctccattggtccttaaacactcatcagtcatgagcatggccaagctagttttttccctttggtttctggttttcaatggcttctggtttcctttcaagtccaaaaaaccaccctaggcaaaccaattgcaaaacccaaaacttaatggccttaaaccggattacccgattgagtccgaaagaaggctcattgggaaactggaaccc

SEQ ID NO: 49464 - DNA, 339 bp, Glycine max
  Clone ID: PAT_MRT3847_15673C.1
tattgggtggtttacaccatttgggtgagttgtaactgttgggtggtttgcaacccttggatgttgtccgccctgctgctggtagtccatagttattacttctcttgctcgctgtttgcaggtgtacaccgtgatgatgtgtggcttatgcttatgcttatcaatacccctgcctaaaagactcaccttgtcctcaaggtgataagtcggaaaaacctcttgtaatttagccacagattcccaactattttcattgggagggagattttgtcactgaattaaaactttcacgttggcaggttgtaattcacaaatatttaaaacagaatttggataaac

SEQ ID NO: 49465 - DNA, 513 bp, Glycine max
  Clone ID: PAT_MRT3847_15674C.1
attggtgagcttaatcagtagtctctcaagtttaggtctgactatgttgctgctttaaatattcgaagggagaattttgtcactcacagctttattagccgtttagtttctcctgctatggtctctaaaaatgaaactgataggtggccctgccaaatcatggcgaaaccatgaaaaagtagaagcaactaattgttgtttcacctttatcatgaaaaattaagtgatttttcgagcaacattgcctatcctgctatggtctctaaaaataaaactgactagtatataactattttattcttactttttcagagggcaccaaagtatatgtttggattttaattgagaggactcaacagtgcttttactattaaagcaacaaattttttcttctttatgtgtattgaaatgcgaaaacatgcattgaaattcacaaaaatactttcctagcttttattgaaagtccaaacattgcaggattaattcggatacattttttaaaaataaattaat

SEQ ID NO: 49466 - DNA, 342 bp, Glycine max
  Clone ID: PAT_MRT3847_15675C.1
ggaaaaaaattgggtgccaccggcttctaatggcgttcctttattaaggccccggaaaaaggccccttcccaaatttaaattttcccagggttccgggattggaaccagcggccggggatttttgcggaattcttttgcttatggggataacaaatggttttttggagaccattttttaaagggtgcctttaaaaaccaaccttattgccttccccaaggcaccaggttttagaaaccccccccaattcattccctggggcggtttcttggcgaggaggctcttctttggtttgggtttcgcttgggaattggaacccaaggttcccccccccctttttttt

SEQ ID NO: 49467 - DNA, 408 bp, Glycine max
  Clone ID: PAT_MRT3847_15676C.1
ctatgatccaactccatcaccaccctcaggtggtggtggaagttacaatccatccccatcaactcctccaagtggtggaagctatgatccaactccatcaccaggcttaggtggtggtggaagttacaatccaactccatcaagttctacagctggcggaagccatgatccaactccttcaccaccctcaggaggtggtggaagagacaatgcaactccatcaactcccccaggtggaggaagctatgatacaaccccatcaccacgcaccgcatgtgggaagtcaatccaaccccatcaccaccctcaggcagcaactgtggcacaccacgacatgaaacttctacttcaacgccataatgaacatcaacatccataaccccaacaacaccataaaccccatgaaca

SEQ ID NO: 49468 - DNA, 421 bp, Glycine max
  Clone ID: PAT_MRT3847_15677C.1
cacattgcttcttattcggagattagcttttgttggcaacttgttgagctttcggttgaacttttagccaccaaatatccttcatcaaatctgaaacttgtgatcccaccaagcccaaatgaatttctttgtaggcctaattaaccgagaaatttccggaaacattcacctcccaaatccaagtgtctttatggtctctaacaaagttggttttagtcaaaaaattattgagttcctccaagtgacctttcccactcaaacatactccttctctactcaagactccatttcaaaacaccttctctccaatgacccaccctctcaatgaactaatttttttgattggaaatattgaataatcaaaggaatttttccaccaattcatccccacccaattaacaagccaaaatcttgcctgatt

SEQ ID NO: 49469 - DNA, 874 bp, Glycine max
  Clone ID: PAT_MRT3847_15678C.1
gttgaagccatggtattggtggtcatggcctgttctgccattaggcctccagtggcatgaacaacgccgtcaaactttagggtatggtgctgaattggctgtgatacttatccaatctgcaatatatgtgggagtaatagcaatgacgcgtttggcaaggccaagcttctcaaagctatgttataggcgctctgataagagcatcacccttgttcataacagcctcaaattagtagctttgtggtgcatccttgctgcttacgtaacaccattctttatcattcctcacacggtccaccctcttctgggttggatcctgtatttgcttgctacttttgcactttgctcaattgcaatcaatatctttatgctaccaatgttaccagttttggtaccatggcttggaattgttggggtccttatggtcatggcatttccttggtatcctgatggggtagtgagagcactgtttgtctttgcttatgccttctgctctgcaccatttttgtgggcctctatggtgaggatagttcaaggtcttcagttatctctagaaagggaagcttttttgccagcaagattgggagagttttcgccaaattcatggtttaacaagttatattgagctgtctagttgggccccccaatacaaggctgggacaaaaagggacctttttggcaagctcagcaaacatagaagggagcatgatccattaaatacccaacatgccagtaaggcttcccaatgaatccaatcaactcaattagtttgaaacttgactggttaatttgttgaagttggtggatgaattaaagtaactcaatttgagttgaaaattcagctcattaaacaaatgggctgatcttgaatccc

SEQ ID NO: 49470 - DNA, 144 bp, Glycine max
  Clone ID: PAT_MRT3847_15679C.1
ggaatagcttcttttacgccgcctgcgtcccaaccgttatgaacttatagtgtggatcagtgctagacttgcgctctccacgtacgttgctccctcaaacgattaccagcagtctgccatgttatcatcgaatgcaaatatcac

SEQ ID NO: 49471 - DNA, 255 bp, Glycine max
  Clone ID: PAT_MRT3847_1567C.1
ggttgagaatcttatgaagcgaaagagattttgaccatttgggacaagctcaaagtttctttttgcatacgcgctcctgcggacggacataccagaataaaatgtgaaagttgattagtggcatattctaccaaacgggtgagtttatcaccttctgtggatcccatactgtcccccctcaactgttaatccataattccaatagatacaggaattccatttaattgaccagttcctgtttgaacaaacttattt

SEQ ID NO: 49472 - DNA, 349 bp, Glycine max
  Clone ID: PAT_MRT3847_15680C.1
gacagataacggcagcggcatgcttaatgtttccagtctctctgtgtgtgatcatgattctgcgccgcaccttattgcggttccttcacactctgacaatatctacaagacgaagtcgtgctcatataagagctatcacacgatttttatgactgaggacatcgtcaacttacctcagaccattcatcacgaccctggcctgcaaatacggtgctatctaaactctccggatacgatcacgaagcgtgatattcatcgcgcatagagccttggcacactaagcgctaatccaaaacggcttcatactctccaatcgtccgaatgccttctggaccatcaacatcatcag

SEQ ID NO: 49473 - DNA, 247 bp, Glycine max
  unsure (1)..(247): unsure at all n locations
  Clone ID: PAT_MRT3847_15681C.1
gtttgcaatactagcgatagctgataagagagatacgancatgatcagacaaaaggaagagttgagattccctttgaagaaaaaatggcatccaaaaggcaaactatgaaaccgggtaaaattaagggcgaactgaagaaaagaagaaccaaaccattgggaataattgaaaaaaaggtcaagctgcaaaggagaagacccaagaaatggcccaagctgcaaaggagaagaccccagaaaaaaccca

SEQ ID NO: 49474 - DNA, 551 bp, Glycine max
  Clone ID: PAT_MRT3847_15682C.1
gaagtgcgaagatagcgagcgaaccaggcagctagtgaagagaagtgagttagtagcagtcaccggcggcggatagacatgaccggagaagagatttccggccccgccggccccaagctcctccgtcttgtttccttcgtcggcgccgcagtgatctgcaccgccgcaatcaacaagtatcgcgaatacgagaggaacaccatcatcaagcaacagcaacagcaagtagtagagacacataattcgtcggaatctgttgccgttcccaaaactctcaaatgaaaagaatcagtggaagggactcataggaatttacaaatttgagttcaaaatgacattctgacttctgatgcaaaatccttatgttgtatataaatattgggttcattttcaattgtattgcataacaatgccaacaatcccattactcagaaacttatgagagaaaatagttagctagtctagatcttttattgatgtctctagtgaaagaggatcaatacaagagaactatggagctatgtctacagtatgtggcctagctgagccta

SEQ ID NO: 49475 - DNA, 2571 bp, Glycine max
  Clone ID: PAT_MRT3847_15683C.1
ggaaggctcttcgatagatccaagttccaagatgaagatgattcactttcttttcctctttgctcttgtctcgttcacttcccatgcttctgtcaatgatttctgtgtagcagacctaaaaggtccagatagcccttcaggctatcagtgcaagccacctaacacagtcacagtggatgactttgtgttctctggctttgtagctggaaacaccacaaacactttcaatgctgcattaacctccgcatttgttactgattttccaggtgtgaatggtcttggtgtatctgcggcacggttagacatagccaaaggtggatcaatcccaatgcacacacaccctgctgccactgaacttctaataatggtggaaggtcaaatcactgctggttttatgaccccaactgcactttataccaagacactgaaacctggagatattatggtttttccacaaggacagttgcattttcaggttaattctggaaacggaaaagccactgcttttctggcattcagtagtgcaaaccctggagcacaactacttgaccttctgttatttggcaacaccttgccttctgacttggttgcacaaactaccttccttgtatgtttcacgaagtcaagaaacttaaggctgcgtgctttggtggcagaagttcgaaatgttattgaaaatcaataaattagttgtcttatctgtttaattaagactacagtacaattatatccaaatctggcactccacagtatatgattccattcttaattaatctgatttactgttcatgtctaatgctattgaagaccagactcaacatattatctagcaaatgaaaaacctcagcatgtcaaccaaactgcatgtgaagagaagtcatccatgacgtctcataacaatattaacgcagcgaatggctaatatcttggacaatcttcaaaattatcccgcataattggaatcctgttacattggctttggagtaatccaagttcaaagatgaagatgatccacgttcttttcctctttgctcttgtctcgttcacttcccatgcttctgtcaatgatttctgtgtagcagacctaaaaggtccagatagcccttcaggctatcagtgcaagccacctaacacagtcacagtggatgactttgtgttctctggctttgtagctggaaacaccacaaacactttcaatgctgcattaacctccgcatttgttactgattttccaggtgtgaatggtcttggtgtatctgtggcacggttagacatagccaaaggtggatcaatcccaatgcacacacaccctgctgccactgaacttctaataatggtggaaggtcaaatcactgctggttttatgaccccaactgcactttataccaagacactgaaacctggagatattatggtttttccacaaggacagttgcattttcaggttaattctggaaacggaaaagccactgcttttctggcattcagtagtgcaaaccctggagcacaactacttgaccttctgttatttggcaacaccttgccttctgacttggttgcacagactaccttccttgatgttgcacaagtcaagaaggttaaggctcgttttggtggcagaggctagggtttcttatgaatcaactcatacctagtgtttgttttagtgataatcgtcagcaattaataaacttgtgcatttgggtgtgttttgctttcattttaagtttgattccaaacttatgatttgagggtttgaagtttgacgatgtataaataaaaattttagagtttagtttgagtgcatcattgatttcaagaaagtaattaagaaagaaatcaagatgttcacttgatttcttttattataataaaaataataatatttcaaacaagatattaataaaaagtttaataccttgttgtgttacattcaggagtttacgaagcttgcgcgtgctctcatcagtggccagcctgtagaaccaggtccacaaccccctgacctccttgataagcaaataagcttattaacaccagttgtgatggatgcaacccctattggtgtaaagtttggggattgtagctctgatgttcccaagaactcgaactttaagagaggtgacatggtgtctgttactttctggtctgcgtgccctcgtaacgaccttatgactgaaggtacattttccctggtggaatttctccaaggaaaggatacttgggttcctgcttatgatgatgatgatttctgcctgcgcttcaagtggtctaggcctttcaaactcagttctcacagtaaagctaccatagaatggagaatcccacaggatgtaactcctggtgtatacagaatcaaacattttggggctgcaaagggcttgttaggatcaattcatcactttactggttcatctagtgcatttgtagttgcatagtaaaggggggcatactgattgattaaacgtgtttaatggttcgaacaccattactactatattgtggtttattgtactgaactgtggcagaatacattaaaattaaatcaaggatgattccaccggaacaaaa

SEQ ID NO: 49476 - DNA, 2596 bp, Glycine max
  Clone ID: PAT_MRT3847_15684C.1
aaccagtccaatttcctttcctttcctttctctccattggacactgcctcttgtctctctcaattggcttttcttcccttttcctttattggggcagcctctctgcaatccacagataacttagattacttccacatgctcatctcatcattcccagcttttcatctgagtgggagatgagaagaactggccgagctttaaaaaaaaaaaaaactgctcttgttttttctctgaatttcggtgtgatggagttcccttcccctactatgcgagtttggacccttttcttgttcctgctacttctgaagagtgatgttgtgcaatcggcttctgattccttgattggtcttggaagctatgacattaccggtcctgcagctgatgttaacatgatggggtatgccaacactgagcaaattgcatctggggttcactttaggctgcgggctcgggctttcattgttgctcagccaaacggtaaccgggtagtgtttgtgaacctcgacgcttgcatggcttcacagcttgtagtcatcaaattaatcgagaggctgaaagcaagatatggtgacctatatactgaaaagaatgtggctattagtggaattcacactcatgctggtcctgggggttatctccaatatgttgtatatattgtgacatctcttggatttgttcgccagtcatttgatgtcattggtgatggcattgagaaaaccattgttcaggcccatgaaaatctccgcccaggatcaatatttgtcaataagggagagctcttagatgctggtgtaaatcgcagtcctagtgcttatctcaacaatcctgctcaatgaagacgctgatatttgaatgatgcgaacaaactaatgactcagcggggataataagggtgcagctgcacgatttatggaagactggtttgagcgaaaagggtctgtaagaatggattcggttggatttgaaaatgatggaatcccccgaagaatttcaaacataattcccagccttcatgataatcaccatgaattactggaacttgctgcctcattccaatctcctcctggtaaacctgcaaccaaaacttcaagcgttgctagacgtgtgagaggtgtccttaggcaggttgacaagcctagatttgtttctgcattttgtcaaacaaattgcggtgatgttagtccaaatgtacttggagctttttgtatagacactgaactaccttgtgacttcaatcatagtacatgtggaggaaagaatgaattatgctatggccgaggacctggttatccagatgaatttgaaagcacacgtattataggggagagacaatttaaaaaagcagtggagctattcaacggagcatttgaacagattaaagggaaggttgattttctacatgctttcatagatttctcccagcttgtggtaaatacttataaagtaggagcttctgagggtgtaaagacatgccctgctgcaatgggatttgcatttgctgctggaacaacagatggacctggagcttttgactttaagcaaggtgatgatcagggaaatcctttctggatgctggtccgtaacttgcttaaaacgccaggcaaggaacaagtagactgtcaccacccaaagcccattttgcttgatactggcgaaatgaagctaccatatgattgggcgccttcaatacttcctatccagatcctccgagttgggcagcttgttattctcagtgtaccaggagaatttacaacaatggctgggaggcgtcttcgtgacgctgtgaagacagtgctaagtggtagcaaaggctttggtagcaacattcatgttgttattgcggggttgactaatacttattcacagtatgtgactacatacgaagagtaccaggtgcagagatatgagggtgcttccacgctgtacggtccacacacactgagtgcttacattcaggagtttacgaagcttgcgcgtgctctcatcagtggccagcctgtagaaccaggtccacaaccccctgacctccttgataagcaaataagcttattaacaccagttgtgatggatgcaacccctattggtgtaaagtttggggattgtagctctgatgttcccaagaactcgacctttaagagagctgacatggtgtctgttactttctggtctgcgtgccctcgtaatgaccttatgactgaaggtacattttccctggtggaatttctccaaggaaaggatatgtgggttcctgcttatgatgatgatgatttctgcctgcgcttcaagtggtcaagacctttcaaactcagttctcatagtaaagctaccatagaatggagaatcccaaaggatgttactcctggtgtatacagaatcaaacattttggggctgcaaagggcttgttaggatcaattcatcactttacaggttcatctagtgcatttgtagttgcatagtaaaggggggcatactgattgattatacatgtttaatggttcgaatgcaattactactatattgtggtttattgtactgaactgtggcagaatacataaattaaatcaaggatgattccatcggatatcatttgttatc

SEQ ID NO: 49477 - DNA, 528 bp, Glycine max
  Clone ID: PAT_MRT3847_15685C.1
ggctcgagctagtctgttctctgtggaaaagttgttgtgtggcgagaagcgaatggtaggattgaatgtgtctcagccatttttgtcaccgatttgcaagacggcaccttacccacttgatctcatagccaccgccgcgtgcctccacttcggccaccttctccgccgccgcgccacccaccatccccgccttggggttcttcttcactcctgtttcaagattgaaggattagtggtgtcagagatgccttcaactcaatgggttgaactatcttcaactatcaactggcgatttgacttcctcatgttcaactagtttctccttctttaatgggggaggagatggaggccgctttggaaaggctgggatttccaactccaagatgtctggtaaagatccatttaatggaaggaaatggacagaaattctccttgctgccaatgttttataaatagtctaattgaaaaaggacaactttggagacttgccatgtcttcctttttgcatgccaacaccgggcacctttt

SEQ ID NO: 49478 - DNA, 532 bp, Glycine max
  Clone ID: PAT_MRT3847_15686C.1
cgttcgcgtgggtttactatttggctttggttgtattcgttgatgccatggcgatttggctttcgtcttcttccgtttctcagtttgattacagcaattattaattactaattatattattaccactaccagtttcgtgtttggttatttgattttctctttttcatacttttaggatcaatggattttagagatttagctcacaagttctctcgttgtattgttactattggaaatctcgggcttcaactgctatggtactttctgcgaataattctcagcgcatggaaaggttcgctaccttgccattgtcatagaaagtgaagaagcttatcagatttccagagttgttaaacttttgcagtggctggacattattggtgtaaagaatgtgtgcctctatgacatgaatggagtattgaagaagtctaaggaaaccatctttaaagaattgaagaatgcaaaatccattgaggaagttaatgaagttgtcgcactccatgatccagatcacatgactttagaatttctt

SEQ ID NO: 49479 - DNA, 1836 bp, Glycine max
  Clone ID: PAT_MRT3847_15687C.1
gtgccacactagttttttttctacacatacatatatcccaagaaaaattaagcaacgattcaagaagaaaatgggttctgaacttgaagctcccattcacgtcctcatggtgtcctatccagcacaaggacacataaaccctttgctcagactaggtaagtgccttgctgcaaagggcttatttgtaaccttcaccacctcagagaccgctggtaaaaacatgcgaaccgccaataacatcactgacaaatcagtgattcctgtcggcgatggttttctcaagttcgatttctttgaagatggcatggcagatgatgatgatggtcccaagaagataaatctcggtgatttcagtgcacagcttgagcttttcgggaagcaatacgtttcccaaatggtcaagaagcatgctgaagaaaaccacccattttcttgcatcataaacaacccttttgttccatgggtttgtgacgtagctgctgaacatggtattccttctgccatgttatggattcaatccagtgctgtcttcaccgcttactacagctacttccacaaactggtaagttttccttcagattcagatccttatgttgatgttcaattgccttccgtagtccttaaacacaacgaagttccagattttctgcatccttttagtccatatccatttctggggacactcatattggaacagtttaagaatttgtccaagcctttctgtgtgttggtggatagttttgaggaactagagcatgattacataaactatcttacaaagtttgtgcccataaggcccatcggtcctttgttcaagaccccaatagcaacaggcacaagtgaaatccgaggtgattttatgaagagtgatgattgcatagagtggcctttgttcaagaccccagcatctgtggtatatatatcttttgggagtattgtgtatctgcctcaagaacaggtaactgaaatagcgcatggatttacgaattcgcatgcctcgtttttgtgggtgttgaagccacctcctaagaatttcggggttccacctcatgttctgccagatgggttctttgaggagacaagagataaaggcaaagttgtgcagtggagtccacaagaggaagtgttggctcatccttcggtggcatgcttcttgacacattgtggttggaactcttcaatggaagcactcactttgggagtgccaatgttgacatttccagcatggggtgaccaagtcacgaatgcaaagtttttggtggatgtgtttggagtggggattaaactgggttatgggaaggctgaaaagaaagtggtgagcagagaagaggtaaaaaagtgcttattggaagctacagaagggccaaaagcagacgagttgaaacaaaacgcgctcaagtggaagaaggatgcagagaccgcggtggctgtaggtggctcatctgccagaaatctcgatgcatttgtgaaagaaattaaaaaacgtggagctgttggggtcagcgggagataagtctatacctttattaattattatgtcactcccttcatgaaaaaacaagagagtaaaaaagtggaatagatcgataacctttaatttgtactttgtagcgtggaatacataaattaaatgctgatatatagctccgtgttacattaacacatgcaaatgctaaataaaggtattaaaaaacgtggagctgttggggtcggcgagatataactaagtctacctttatgccccttcacgattcattattgcattgcatgtataaccttaataaaatttattcaggaggaactaccttctcttccaattaagaagattatgctcgt

SEQ ID NO: 49480 - DNA, 982 bp, Glycine max
  Clone ID: PAT_MRT3847_15688C.1
tcggaacatcggcctcgaatacggctgcgaggaagcgacataattgaggcggcgagaagaggacgttcgctgggggttgtgtgtaagtgtgaagagaagagaatggtagtaggattgaatgtgcctcagccatttctgtcaccagtttgcaagccggcaccttacccacttgatctcatcgccaccgccgcgtccctccacttcggccaccttctccgccgccgcgcgacccaccaccgtccgccttggggttcttcttcactcctgtttcaagaaactcgcttctttaactcacatttttagattgaacgataagtggtgtcaaagatgctttcaactcaatgggttgaagtcccttttcaattttcatttgtctattccacttaattgcaaaatttggaacttaggtttggttcacattttcaagttatttttcttttcctcatttatcttatgggaactgattgaaatggaggtcacaagtaccatgtcgtttaaaaagggtttattattttgtagaatttcgcttgttatgatcatgtgacgtagttgatcttcttgttactggattcatgctactttgaatactgattgatgatgggaatatgaaataggttatggtgtttaagatgtgtactcaattttttatcacttgtttgaacttgctccattctggttgatgaggctttctcttgtggcttgtcagtcttctttttatattttttggtttgtatgaatttggatattgtaatggtctgaactcaaggagtagaggaagatcaacaaaggttggtccagttggtaaagaacccactcatattccaaaaggaggtggattcgattgccgctgtggatgtaaggaacttgttggtgggtaatctataagcccctttgtaagtgtctctttgaaactttaagtctgtacctggcccgggccctggttagtcccaagacccaattcacccaaactttttttaccccc

SEQ ID NO: 49481 - DNA, 241 bp, Glycine max
  Clone ID: PAT_MRT3847_15689C.1
gtaattgaaaatgaccgtgggagtataactagcaaggcctagctctataccacctgaagaaacaaatgctgatgtccttttcccattcttctgcggatataacttaccatcaattcccaaaaaagaaaaaaatcaaactcaagaattgccatggttatagctgttatgctatacacacaagtcaccccacatacaagaagctaaacatcatcacaattcatcggtgcataaacaaaacttg

SEQ ID NO: 49482 - DNA, 283 bp, Glycine max
  Clone ID: PAT_MRT3847_1568C.1
cctcgagcgattcgagtcacggctcgaggtaaaatttacaagcggaggcaaaagaagcatcaaagaggatgggcaatggtagagcagtcggaccaaataaaatatctattgaactttggaaatgtctagttaagaatgaacatagcaaagttttataaatatcagaatattgtggtgaattagtggaaatataacaaaatataaaagcttaggaatgaatgtgttaagacaaaaagtcagagtaccacttattgatgacagatgatagaatttcaccttagat

SEQ ID NO: 49483 - DNA, 659 bp, Glycine max
  Clone ID: PAT_MRT3847_15690C.1
acgaggcatagtcgagataaaaaaaatcatatacttctcaatccaaaatgctcaatgatggtggtgccaatcatgtctcaattgagaagtccttcagaataaaagaggatgataggttcttttcaaggctaatgtccaaggaaacctccatggctaactcttcttcaagggtcttctattatggagaaacatcaattgcagtccctttcatgtgggaggcacaacctggcacccccaaacacccttcttctgagacttgtctaccgccccttacacccccaccttcatattattccaattccaagtcgaaaaacaagagaagaaactcaaagtccaatatattttcatgttttatgccaaagtttatagtggcaagaaagggacatgtgtcaccaacatcatctcgctcatcatcctcatcctcatcatcatcatggtcatcggtatatccggcatactcatattccatgagggacacagatcaaggaagcatctctttctcacgctctacaaatgtttgctcttttctcaaacacaaagcttcaaacggatttagaggctgttattcctttgggaacataaagaatgcaattgtgagccatggagcaatctagtttgtggaggtaattaacatcattaggaattgattttctacatgg

SEQ ID NO: 49484 - DNA, 424 bp, Glycine max
  Clone ID: PAT_MRT3847_15691C.1
ttttgttgctgtttggttgctactggaaactgggatcaccttgaatagaaaaaccagctacattgctttggcttgcatctttcacgtggtttttcctattgatttgtgattcatactatcaggaattagaagctgagaatgcaaagctattatctcaacttgctgattgccgctgtcatgagatggagaaaaaattgcatatccctgatgagaaaggcagggaatcaaaaataggcaacaggaaatctgaagagaagatagagaaaatgccaggctataacacatggtttatgagtcatcatagcaagagatatgtagctctaaaagtcacgtactttggaaaaaggttttatggttttgcttataggcacaaatggaaccaactgctgagtctgaactttttaaaagctttgagaaaactagg

SEQ ID NO: 49485 - DNA, 117 bp, Glycine max
  Clone ID: PAT_MRT3847_15692C.1
cacgctccgagaagcccgtatgctccgcccgctgcacccgactcccttttcacatgtgtgtgcggcctaacagaccgaagacttaacgactttttgcaggaccacaactccgatcct

SEQ ID NO: 49486 - DNA, 325 bp, Glycine max
  Clone ID: PAT_MRT3847_15693C.1
tacgttgcacccccagcgacccttcgtgagccggatcaggccattatggccgttctacccattcttccgagtacaatgtcgaaggtggtctaagcctgttaaacggagttgcaccgcctgctggacgtcgtgcaggcgtacgtgcattctactgaacaggtgcctcacttcatggagttatgtcagggtcaatgcgctctgaagccattgaactcgttacactctagctctgaaaatactctcttcaagtgcgtacaaccgcttcattgtcaccactactcgactttaccagccagcttgtccatattgtacagaaaggatggca

SEQ ID NO: 49487 - DNA, 166 bp, Glycine max
  Clone ID: PAT_MRT3847_15694C.1
atcattacattgcagaatggcactctatttctcaatgatctgctttcttacgatcatcactcttgggaaggctatagaaagacttcccggagacccaaatttaccgcatactaatacaacatgcactctcattacgaggccattacgagatcattatagtgttctg

SEQ ID NO: 49488 - DNA, 106 bp, Glycine max
  unsure (1)..(106): unsure at all n locations
  Clone ID: PAT_MRT3847_15695C.1
agatatgctctggataagtgtgacattgggacataggattttactttgcatattatgatttccacatgtnatgattcnnccgaaggatataattgtgtaatacttt

SEQ ID NO: 49489 - DNA, 173 bp, Glycine max
  Clone ID: PAT_MRT3847_15696C.1
ctcattgacagggaagaaatataatgcatttaattcaatatggtttgatggtttcgttattttttcgaagactaggaaatcactgcatcatttaatagatattcagtcacgccgagagtttcccaaagtttcaaaatgggaagccaaggttaaataaaattttggctcaataa

SEQ ID NO: 49490 - DNA, 402 bp, Glycine max
  Clone ID: PAT_MRT3847_15697C.1
tacggctgcgagaagacgacagaagggatactattagtaagagtgtcatactaataggttcaccattctcttttggcaaaaaaaaaaaagcggacgctctaaaaggatccgggcgttactaaacgatccaatgttacgtactagtgcttgcaaagtgatacctaattctatattgactagctaaatgcaatacaatggccggactggtaaaaccctgggactgccaaaatcatggggctaccaaaatataaccgctttggacaacatgcgcatttgggaagatggcggaacagataagaggtccgaacagatgggcattctgaacggtgaatgagactgactgtggaatgggacattaactgcagcggctgattaagctacgcgcatggggagcgtaccact

SEQ ID NO: 49491 - DNA, 2709 bp, Glycine max
  Clone ID: PAT_MRT3847_15698C.1
caccagaaagtgacactgagagaagaaggaaaaactaaccaacaccacagcccctaatttcctttttctcacaatggcggcttcagtcgacaaccgtcaatacggcacccacataaacgccgtcgttcgcgcttgcggcccagacttcaatacccctctcccgtcggatttcgatttggactcatccagcgacgacgaagaccaaaacgacgacgcttcgtatctcaaggagttgatacaaaaagcgaacgcggaaaccgaggcgtcgctgttggacccgcgagacgagggaaccgcggaccagtggatcccgcggaacgcctccatggtgcggctcacagggaagcaccccttcaactcggaggccccactcccccgctgcgtcatgtgctgaaacgctgtgggatcctcgcccgtatgaagggcgccatgtacgtgtccttcgagggcgccgaggatctccccgggggcggtgggtccaagtatggaaccagcgtcaagagggagatggccatggatccgtcgcgtgacatcattctcgcgttcatgcaaaacggcgagccgttggcgccggatcatggatttcccgtgcgcatgattattccgggattcatcggtggaagaatggtgaaatggctcaaacgcattgtcgttactgagcatgagtgcgatagtcattatcattataaggataatagagtactcccttcccatgttgatgcagaacttgctaatgacgaaggttggtggtacaagccagaatacatcatcaacgagttgaatataaactcagtgataactacgccttgtcacgaggagatcttgcccatcaactcatggactacacagaggccttacgtaatcagaggctatgcatattccggtggtggaaggaaagtgacacgtgtggaggtaacacttgatggtggagaaacatggcacgtgtgcacattggaccatactgagaaacctaacaaatatggcaagtattggtgctggtgcttctggtctttggaggtggaggtgcttgacctacttggggccaaggagattgcggttcgagcttgggatgaaggtctcaacactcagcctgaacacctcatttggaatgttatgggcatgatgaataactgctggttcagagtgaaaacaaatgtgtgcaagccccacaagggtgagattggcatagtgtttgagcatccaacccaaccaggcaaccaacccggtggctggatggcaaaggaaaaacatttggaaaaatcacaaaagccaaaaccaaccctaaaaaagagtgtctccacaccattcatgaacacttcctcaaaaatgttctccatctccgaagtgaaaaaacattccaaccctgactctgcttggatcattgtccacggtcacgtctatgattgcacccgcttcctcaaagatcaccccggtggtactgacagcatcctcatcaatgctggcaccgactgcaccgaagagtttgacgccatccattctgacaaagcaaaaaaattgcttgaagattaccgaatcggggagctcatcaccactggctacacctcagactcatcgcccaacaactccgtgcatggcaattccgaattcactcatttggcccctattaaggaatctacaacaccaccatcacgtagtgtggctctcaacccacgcgagaaaatcccatgcaagctcgtgtcaaagacctccatttctcatgacgcgaggctattccgttttgcattaccctcagaggaccaactcttgggattatccgtggggaaacacattttcttgtgtgccaccatcgacggcaagctatgcatgcgagcctacactccaacaagtagtgtggatgaagtgggtttctttgatctactcatcaaggtgtacttcaaaggtgtgcatcccaagtttccaaatggaggactcatgtctcaacatttggactctctacccattggatccatgttggacgtgaagggcccattaggtcacatagaatacaccggaagaggcaacttcatggttcatggaaaaccaagattcgccaagaggttggccatgttggctggtggaactgggatcacgcccatttaccaagtggcgcaagcgattttgaaggacccagaggaccacaccgaaatgcatgtagtgtatgcgaatcgcacagaggatgatatattactgagggaggagttggatgagtgggcgaagatacataatgaccggttcaagctatggtacgtggtggaaatcgcaaaggaagggtggaaatacagtgtagggttcatcacagagagtatcacgagggagcaccttccaaaagcgtcgagggattccttggctttgacatgtgggccaccacccatgattcagtttgcagtgcagcctaatttggagaaaatgggatatgatatcaagaacgatttgcttgtgttttagggcatggagaagtagctagattgctagattgtgttgtgtattgtatttgtttgtgtatcgggtgttattggagtattaatgtttgtttcattctttataagggtaaaaaaagaagtgaaaaattgtatatgaaccgagattgttgggaagtaactcttcatcccttctcacgctttaatgtagacaggtacgtcaagatttttttactactttagtgtaaataaattaatgttatatatgcctaatacaaaaaaaaaaaaataa

SEQ ID NO: 49492 - DNA, 2984 bp, Glycine max
  Clone ID: PAT_MRT3847_15699C.1
ctctttcaccagaaagtgacactgagagaagaaggaaaaactaaccaacaccacagcccctaatttcctttttctcacaatggcggcttcagtcgacaaccgtcaatacggcacccacataaacgccgtcgttcgcgcttgcggcccagacttcaatacccctctcccgtcggatttcgatctggactcatccagcgacgacgaagaccaaaacgacgacgcttcgtatctcaaggagttgatacaaaaagcgaacgcggaaaccgaggcgtcgctgttggacccgcgagacgagggaaccgcggaccagtggatcccgcggaacgcctccatggtgcggctcacagggaagcaccccttcaacgcggagggcccactcccccgccttatgcaccacggtttcatcaccccatcgccactccgctacgtccgcaaccacgggtccagttcccaagatcaaatgggatgaatggaccgtggaagtgactgggttggtcaaacgatcaacccacttcaccatggagaaacttatgagggaattccctcaccgcgagtttcccgccacactagtgtgtgcgggaaatcggcgcaaagagcataacatggtgaagcagagcatcggcttcaactggggtgccgccgggggctccacctccgtgtggcggggggtcccgctgcgtcatgtgctcaaacgctgtgggatcctcgcccgtatgaagggcgccatgtacgtgtccttcgagggcgccgaggatctccccgggggtggtgggtccaagtatggaaccagcgtcaagagggagatggccatggatccgtcgcgtgacatcattctcgcgttcatgcaaaacggcgagccgttggcgccggatcatggatttcccgtgcgcatgattattccggggttcatcggtggaagaatggtgaaatggctcaaacgcattgtcgttactgagcatgagtgcgatagtcattatcattataaggataatagagtactcccttcccatgttgatgcagaacttgctaatgacgaaggttggtggtacaagccagaatacatcatcaacgagttgaatataaactcagtgataactacgccttgtcacgaggagatcttgcccatcaactcatggactactcagatgccttatttcatcagaggctatgcgtattccggtggtgggagaaaggtgacacgtgttgaggtaaccctggacggaggtggaacgtggcaagtgtgcacactggactgtccggagaaacccaacaaatatggaaagtactggtgttggtgtttttggtctgtggaggttgaggttttggacctgctcggagccagggagattgcggtgcgtgcttgggacgaggccctcaacacccaacctgaaaagctcatttggaatgttatgggcatgatgaacaactgctggttcagagtgaaaaccaatgtgtgcaggccccacaagggtgagataggtatagtgtttgaacaccccacccaaccaggcaaccaatccggcggatggatggcaaaagaaaaacacctagagaaatcatctgagtccaacccaaccctcaagaagagtgtctcctccccattcatgaacaccacctcaaaaacctataccatgtctgaagtcagaaggcacaacaacgccgattcggcttggatcatagtccacggtcatgtctatgattggacccgcttcctcaaagaccatcccggtggcacagacaggatcctcatcaacgccggcaccgactgcaccgaggagttcgaagccatccactccgacaaagccaagcaaatgcttgaagactaccgaatcggcgagctcaccaccacctgctacaactctgattcttcatcgtcaaacccctccgtgcatgggaggtccgacaccatccctttgacccccatcaaggaagtgattacaccaatgcgaagcgtggctcttatcccacgcgagaaaatcccatgcaagctcatctcgaaaacctccatctctcacgacgttaggcttttccgctttggcctcccctccgacggactactcatgggtttggcagttgggaagcacatattcctatgtgtcaccgttgacgagaaactatgcatgcgagcctacactccaacaagcagcgttcacgaagtgggatacttcgacctcgtcgttaaggtttacttcaaaggggtgcaccctaagttccccaacggtgggatcatgtctcaacacttggactctctccccattggttctgtcttggacgtgaaaggaccacttggacacattgaatacactggcagaggaaacttcctcgttcatgggaaaccaaggtttgccacgaggctagccatgttggctggtggcacaggaatcacacccatttaccaagtggttcaagccattctaaaggatccagaggactgcaccgagatgcatgtggtttacgcgaaccgaaccgaggatgatatattgctgaaggaagagcttgatgagtgggctaagaagtatgataggttgaaggtgtggtacgtgatacaagaaagcataagagaggggtgggaatacagtgtgggattcatcactgaaagtatcctgacggagcatattccaaatgcatctcctgataccttggcattgacttgtggaccaccacctatgattcaatttgcagtccagccgaatttggagaagttgggctacgacacccagaataacttgctcgtgttttaggggactaaactagaatacattgtatgtgtatatagtagtttattgttatatataaataatggattctattagctgcttcgtttcaagatttttttatgtttcaatttttaaataaaagtgtacatgggacagctagctagctacgcaggtttacttttcctcgtcaacttttgatgtagacaagtatgtcaattattttgactacttttgcatgtataaataaataaataaaccagtcgtgcc

SEQ ID NO: 49493 - DNA, 414 bp, Glycine max
  Clone ID: PAT_MRT3847_1569C.1
aaaaaaaacccaccctttacattcttttacaatacttaaaaaaggggtggaaattttaaaataggcaaagctttttcaaacgaggggcatccctaatttcctttttttggttgaaaacaaaacccatttaaaagaaaaccctcccccccaatcattcaaaaaatttttctttttaaaaaaatctggctttgccctttggaacaaaaaaagcttgctttaaagtgtttccaacaatttcaaagttttgtgaaatccctaaaaaaacataaaaaggcggggattgtttgggattttcaacaaggaaacttaaatccccccaatttttattagcccatttaaaaactcccatttttaaaaccattattgggcccacccactttttttggaaaaatcaattcccaccaatgtggtttt

SEQ ID NO: 49494 - DNA, 265 bp, Glycine max
  Clone ID: PAT_MRT3847_156C.1
cttttttttttttttttttttttttttaaatcgtaaaattaaacctgaaatgtttaactttcaaaccccttaacaggaagagcgacatccaaattataagaatatatcaactacgtttcaatcaaagggcgaccaccatgttaacaataatgaaaacatgcagaaaaataaaatccctaaactagaagaaataagccacgaagcccaaaagtgcccccaaagcaatccaaaatcccgaaaaaaatattcagggcaaggggtgatg

SEQ ID NO: 49495 - DNA, 330 bp, Glycine max
  Clone ID: PAT_MRT3847_15700C.1
tatcggctgagctggcccgcctgcagtaccgggccggaacttaccgttcgattttcgcgtgcgattttctgcaacgcatgtgggagctatcgaaatcatcatttgccgtaccttaagacctgactgaaacataattggtgcaatgcttcaggaagatacttattataccactacttgtaaatgcactaagtattatttttgaggaaccttttatatgcggaaggcccatactggtggaaacattttcttataccttcttgcacaatgaaccgaacattattccatgggattcagctactgagtcaccactaccaaacgtgatttggttca

SEQ ID NO: 49496 - DNA, 3177 bp, Glycine max
  Clone ID: PAT_MRT3847_15701C.1
accggtccggaatcccggggcgaccccgcgtccgcgtctctttcccccgacgcctcttataactcgcccaatccctccatctttcactcgttcaaaaacaaaaccattctaccttctccaaaaccatccaactctcatgttcgaagaaaacatacacaatctcttcaaactctaattttcttttcctttcatttaatttcctcaatggcggcttccgtcgaccagcgtccgtaccccggcctccacaatggcgtcgttcggcccctcaaaccaggcccggatatcccgcgtcccaagaagctaccccagccgccgccgccactctcggattcctcaagcgacgaagaagaagacaccaccttgaacttgaaggacctgattcgcaagggaacaacggaagttgaatcctccattttcgacccgcgcgacgatggaacctctgaccactggatccaacggaactcttcccttgtccgtttaacgggaaagcacccgtttaactcggagccacccctccctcgcctcatgcaccacggcttcatcaccccggtccccctccactacgtccgcaaccacgggccagtcccccgggcccgctgggaggactggaccgtggaagtcacgggcctggtcaccaggcccacatgcttcaccatggagcaactcctccacgatttccccagtcgcgagttcccagccacactcgtctgcgctgggaaccggcggaaggaacagaacatggtgaaacagagcatcggcttcaactggggggcagccgccatctccacttcggtgtggcgcggcgtgcccttgcgcaccctgctcaagagctgcgggatctacacccgcaccaagggcgcgctccacgtgtgcttcgaaggggccgaggatctgccaggtggaggtgggtccaagtacggaaccagtatcctgagggaggttgcactggatccctcccgcgacatcattctcgcctacatgcaaaacggggagcctttgtccccggatcacggcttccccgttagaatgataatacccggtttcattggtggccgcatggtcaaatggttgaagcgcatcattgttactaccgaccaatctcaaaactattaccattataaggataacagggtactcccttctcacgttgatgccgaacttgccaatgctcaagcttggtggtacaagccggactatattatcaacgagcttaacataaactccgtgataaccacgccttgccacgaggagatcttgcccatcaactcatggactactcagatgccttatttcatcagaggctatgcgtattccggtggtgggagaaaggtgacacgtgttgaggtaaccctggacggaggtgaaacgtggcaagtgtgcacactggactgtccggagaaacccaacaaatatggaaagtactggtgttggtgtttttggtctgtggaggttgaggttttggacctgctcggagccagggagattgcggtgcgtgcttgggacgaggccctcaacacccaacctgaaaagctcatttggaatgttatgggcatgatgaacaactgctggttcagagtgaaaaccaatgtgtgcaggccccacaagggtgagataggtatagtgtttgaacaccccacccaaccaggcaaccaatccggcggatggatggcaaaagaaaaacacctagagaaatcatctgagtccaacccaaccctcaagaagagtgtctcctccccattcatgaacaccacctcaaaaacctataccatgtctgaagtcagaaggcacaacaacgccgattcggcttggatcatagtccacggtcatgtctatgattgcacccgcttcctcaaagaccatcccggtggcacagacagcatcctcatcaacgccggcaccgactgcaccgaggagttcgaagccatccactccgacaaagccaagcaaatgcttgaagactaccgaatcggcgagctcaccaccacctgctacaactctgattcttcatcgtcaaacccctccgtgcatggcagctccgacaccatccctttgacccccatcaaggaagtgattacaccaatgcgaagcgtggctcttaacccacgcgagaaaatcccatgcaagctcatctccaaaacctccatctctcacgacgttaggcttttccgctttgccctcccctccgacgacctactcatgggtttgccagttgggaagcacatattcctatgtgccaccgttgacgagaaactatgcatgcgagcctacactccaacaagcagcgttcacgaagtgggatacttcgacctcgtcgttaaggtttacttcaaaggggtgcaccctaagttccccaacggtgggatcatgtctcaacacttggactctctccccattggttctgtcttggacgtgaaaggcccacttggccacattgaatacactggcagaggaaacttcctcgttcatgggaaaccaaggtttgccacgaggctagccatgttggctggtggcacaggaatcacacccatttaccaagtggttcaagccattctaaaggatccagaggactgcaccgagatgcatgtggtttacgcgaaccgaaccgaggatgatatattgctgaaggaagagcttgatgagtgggctaagaagtatgataggttgaaggtgtggtacgtgatacaagaaagcataagagaagggtgggaatacagtgtgggattcatcactgaaagtatcctgacggagcatattccaaatgcatctcctgataccttggcattgacttgtggaccaccacctatgattcaatttgcagtccagccgaatttggagaagttgggctacgacacccagaataacttgctcgtgttttaggggactaaactagaatacattgtatgtgtatatagtagtttattgttatatataaataatggattctattagctgcttcgtttcaagatttttttatgtttcaatttttaaataaaagtgtacatgggacagctagctagctacgcaggtttacttttcctcgtcaacttttgatgtagacaagtatgtcaattattttgactacttttgcatgtataaataaataaataaaacagtgtgcaactatcactttttcaaaaaaaaaaaaaaaaagggcggccgctcgcgatctagaactag

SEQ ID NO: 49497 - DNA, 315 bp, Glycine max
  Clone ID: PAT_MRT3847_15702C.1
aggcgtgcgatgacagcagacggcggaaggcactagtgcccatcctacactttatacttcaatgtactgcgtggcagcatgtaacatcaacaatcccgagggctcttggacatcatcttctggactaccacacatggatggccataacattaatgcataccatcatcaccccatccacgtggctaaatgtaactagcatgccccttatctagataccgatataacatcgaacattcggaacatgctcaaccggactgaaagcagctcacagcatgccagtccacctagctcgacctgcatctgcatcataacaag

SEQ ID NO: 49498 - DNA, 2982 bp, Glycine max
  Clone ID: PAT_MRT3847_15703C.1
cactgagagaagaaggaaaaactaaccaacaccacagcccctaatttcctttttctcacaatggcggcttcagtcgacaaccgtcaatacggcacccacataaacgccgtcgttcgcgcttgcggcccagacttcaatacccctctcccgtcggatttcgatctggactcatccagcgacgacgaagaccaaaacgacgacgcttcgtatctcaaggagttgatacaaaaagcgaacgcggaaaccgaggcgtcgctgttggacccgcgagacgagggaaccgcggaccagtggatcccgcggaacgcctccatggtgcggctcacagggaagcaccccttcaacgcggaggccccactcccccgccttatgcaccacggcttcatcaccccatcgccactccactacgtccgcaaccacggtccagttcccaagatcaaatgggatgaatggaccgtggaagtgactgggttggtcaaacgatcaacccacttcaccatggagaaacttatgagggaattccctcaccgcgagtttcccgccacactagtgtgtgcgggaaatcggcgcaaagagcataacatggtgaagcagagcatcggcttcaactggggtgccgccggggcctccacctccgtgtggcggggggtcccgctgcgtcatgtgctcaaacgctgtgggatcctcgcccgtatgaagggcgccatgtacgtgtccttcgagggcgccgaggatctccccgggggtggtgggtccaagtatggaaccagcgtcaagagggagatggccatggatccgtcgcgtgacatcattctcgcgttcatgcaaaacggcgagccgttggcgccggatcatggatttcccgtgcgcatgattattccggggttcatcggtggaagaatggtgaaatggctcaaacgcattgtcgttactgagcatgagtgcgatagtcattatcattataaggataatagagtactcccttcccatgttgatgcagaacttgctaatgacgaaggttggtggtacaagccagaatacatcatcaacgagttgaatataaactcagtgataactacgccttgtcacgaggagatcttgcccatcaactcatggactacacagaggccttacgtaatcagaggctatgcatattccggtggtggaaggaaagtgacacgtgtggaggtaacacttgatggtggagaaacatggcacgtgtgcacattggaccatactgagaaacctaacaaatatggcaagtattggtgctggtgcttctggtctttggaggtggaggtgcttgacctacttggggccaaggagattgcggttcgagcttgggatgaaggtctcaacactcagcctgaacacctcatttggaatgttatgggcatgatgaataactgctggttcagagtgaaaacaaatgtgtgcaagccccacaagggtgagattggcatagtgtttgagcatccaacccaaccaggcaaccaacccggtggctggatggcaaaggaaaaacatttggaaaaatcacaaaagccaaaaccaaccctaaaaaagagtgtctccacaccattcatgaacacttcctcaaaaatgttctccatctccgaagtgaaaaaacattccaaccctgactctgcttggatcattgtccacggtcacgtctatgattgcacccgcttcctcaaagatcaccccggtggtactgacagcatcctcatcaatgctggcaccgactgcaccgaagagtttgacgccatccattctgacaaagcaaaaaaattgcttgaagattaccgaatcggggagctcatcaccactggctacacctcagactcatcgcccaacaactccgtgcatggcaattccgaattcactcatttggcccctattaaggaaactacaacaccaccatcacgtagtgtggctctcaacccacgcgagaaaatcccatgcaagctcgtgtcaaagacctccatttctcatgacgcgaggctattccgttttgcattaccctcagaggaccaactcttgggattatccgtggggaaacacattttcttgtgtgccaccatcgacggcaagctatgcatgcgagcctacactccaacaagtagtgtggatgaagtgggtttctttgatctactcatcaaggtgtacttcaaaggtgtgcatcccaagtttccaaatggaggactcatgtctcaacatttggactctctacccattggatccatgttggacgtgaagggcccattaggtcacatagaatacaccggaagaggcaacttcatggttcatggaaaaccaagattcgccaagaggttggccatgttggctggtggaactgggatcacgcccatttaccaagtggcgcaagcgattttgaaggacccagaggaccacaccgaaatgcatgtagtgtatgcgaatcgcacagaggatgatatattactgagggaggagttggatgagtgggcgaagatacataatgaccggttcaagctatggtacgtggtggaaatcgcaaaggaagggtggaaatacagtgtagggttcatcacagagagtatcacgagggagcaccttccaaaagcgtcgagggattccttggctttgacatgtgggccaccacccatgattcagtttgcagtgcagcctaatttggagaaaatgggatatgatatcaagaacgatttgcttgtgttttagggcatggagaagtagctagattgctagattgtgttgtgtattgtatttgtttgtgtatcgggtgttattggagtattaatgtttgtttcattctttataagggtaaaaaaagaagtgaaaaattgtatatgaaccgagattgttgggaagtaactcttcatcccttctcacgctttaatgtagacaggtacgtcaagatttttttactactttagtgtaaataaattaatgttatatatgcctatctactctcttcaattc

SEQ ID NO: 49499 - DNA, 2750 bp, Glycine max
  Clone ID: PAT_MRT3847_15704C.1
cccacgcttccgcccacgcgtccgcggacgcgtgggtgcaggtggtgggagaaaggtgacacgtgttgaggtaaccctggacggaggtgaaacgtggcaagtgtgcacactggactgtccggagaaacccaacaaatatggaaagtactggtgttggtgtttttggtctgtggaggttgaggttttggacctgctcggagccagggagattgcggtgcgtgcttgggacgaggccctcaacacccaacctgaaaagctcatttggaatgttatggtacgttcctgtctctgccacattcttttaattgaaattttaactttaattaggcctctgaaatttgataggattgttaactacaattacaatgcacgtagtgctggtcacattggtgattgctattgctgtataagtatcggatcaaattgtctccattactgattaactgtaccattttttttgtcagttagcaaaaataaactattatactattattaatctcaatagtaaagactaaacagttactatgacccatgtacacgtagaaaaataaacgtatggtataaaatcataaaacgtatatgtaataattattttttgccattttgaatatatatatatatatatgtgtgtgaaagaaaaaaatgtaataaataacttgataagaaagaaaaatagagataaaagaaatgaaataaaaataaatgaatgtatggttataattatttttgcacaccatatttcactttttttttcacgttatttcatagtttctttctgtcactatatttttgtttttattttttacattctctctttttatcgtatcacatcaagtcatcaattatttcatcgatccattgcctctcatgtatttttcattcccgcgtgctcattgaccgcgacattgtttgatagattcttgcaaaccattggctccgatcaaatagtgacagctagcaataaactattgcccgtgacttaaaatctaatcaaaatctttactaaagtgcccgactttgagtctattttattaaataagttttgacatgtacagggcatgatgaacaactgctggttcagagtgaaaaccaatgtgtgcaggccccacaagggtgagataggtatagtgtttgaacaccccacccaaccaggcaaccaatccggcggatggatggcaaaagaaaaacacctagagaaatcatctgagtccaacccaaccctcaagaagagtgtctcctccccattcatgaacaccacctcaaaaacctataccatgtctgaagtcagaaggcacaacaacgccgattcggcttggatcatagtccacggtcatgtctatgattgcacccgcttcctcaaagaccatcccggtggcacagacagcatcctcatcaacgccggcaccgactgcaccgaggagttcgaagccatccactccgacaaagccaagcaaatgcttgaagactaccgaatcggcgagctcaccaccacctgctacaactctgattcttcatcgtcaaacccctccgtgcatggcagctccgacaccatccctttgacccccatcaaggaagtgattacaccaatgcgaagcgtggctcttaacccacgcgagaaaatcccatgcaagctcatctccaaaacctccatctctcacgacgttaggcttttccgctttgccctcccctccgacgacctactcatgggtttgccagttgggaagcacatattcctatgtgccaccgttgacgagaaactatgcatgcgagcctacactccaacaagcagcgttcacgaagtgggatacttcgacctcgtcgttaaggtttacttcaaaggggtgcaccctaagttccccaacggtgggatcatgtctcaacacttggactctctccccattggttctgtcttggacgtgaaaggcccacttggccacattgaatacactggcagaggaaacttcctcgttcatgggaaaccaaggtttgccacgaggctagccatgttggctggtggcacaggaatcacacccatttaccaagtggttcaagccattctaaaggatccagaggactgcaccgagatgcatgtggtttacgcgaaccgaaccgaggatgatatattgctgaaggaagagcttgatgagtgggctaagaagtatgataggttgaaggtgtggtacgtgatacaagaaagcataagagaagggtgggaatacagtgtgggattcatcactgaaagtatcctgacggagcatattccaaatgcatctcctgataccttggcattgacttgtggaccaccacctatgattcaatttgcagtccagccgaatttggagaagttgggctacgacacccagaataacttgctcgtgttttaggggactaaactagaatacattgtatgtgtatatagtagtttattgttatatataaataatggattctattagctgcttcgtttcaagatttttttatgtttcaatttttaaataaaagtgtacatgggacagctagctagctacgcaggtttacttttcctcgtcaacttttgatgtagacaagtatgtcaattattttgactacttttgcatgtataaataaataaataaaacagtgtgcaactatcactttttcaatttatttactctgaatcaaaggcattacaacattatgtcattaatttaatgacattttatatgaataaaatacatattacaaggcacgactcgtacctttcattctat

SEQ ID NO: 49500 - DNA, 358 bp, Glycine max
  Clone ID: PAT_MRT3847_15705C.1
ttaatttccataattattattatttaaaaatccaagatattcttataatcacatattattatttcacaaattatcttatgaaaattctatatcaactctatttaagtaaattacgaacttcgaccattattatttatcgaacacggtgaagctcaattatgctcactttgggtggctacaactcatttttctttcagggaattttgaacatttattacaaaccggaacttgacgttcctatttatgagcctcttaagcgcttcattggcttactcgattggaatcacctttatatttgggtgaatctcgtttgcagtacataagccaatcatcctctgtctatcttttgtcccacctg

SEQ ID NO: 49501 - DNA, 361 bp, Glycine max
  Clone ID: PAT_MRT3847_15706C.1
gagcctgcacaatctgcactttttttgccttggcttctattctctcctcactttgaatccgaagatatcctttccattcaaggcagttttctagaagttttttttaagggaggttttcccacacaactactatcttctcaacactatagcaatcaccatcatctaaataattcccttttttctttctctttctctcacacacccccataatctcaaaacatgttattttctcttctattcctatcatcactccccaccattccttaacatttctttctttcttctttttttaaccttttataaaattaccccataaaccttcctcttcaccaaccctctccttctcccaccctatacatcc

SEQ ID NO: 49502 - DNA, 375 bp, Glycine max
  unsure (1)..(375): unsure at all n locations
  Clone ID: PAT_MRT3847_15707C.1
gcaaaacgttcgaaatgggtcgcacactcacaactgcagcaacgtgtcttcttctctcattattattagtgtccctctgtgtgaccaccaccaccaacgccctaatgccatacacacgtagcagcaccctctgggacacgatgctctcatcagaggacccgttcagaatcctggaacacaccccattcagcgacattcccaccaccaccagaggagtggacactctcgccctggcacgtgcggactggaaggagacccctaccgctcacgtgatagcgctggaccttcccggcatgaagaaggaggacgtgaagatcgaggtggaggagaatcgcgtgcgcgaatcancggcgagaggaagggagaagaagaaga

SEQ ID NO: 49503 - DNA, 603 bp, Glycine max
  Clone ID: PAT_MRT3847_15708C.1
ggaaagacaaaacctagatagagcaattaactatccctatactactccgactgagcaaaagcaagatcagtgctaaccctaccccaagatagctccaagaagtccccaaagaagacgaaggcagatcaaaagacgatgcgggagaagtagggggaacatacatgtacttgggagtatgagcattaacgaggatgaatggcaatggtatctcaataggtggtacaacaggcagtgcaccaatgggcaaaagagaaagtacgacatcaccaaaaaaagctatcttggtcagtgccatgatgatgggccagtgcccaccaccagtcctaatggtgagatgaaacaatgggtccctctgcgtctccatctttagttgaaagacaaaaagggtatgccatgcatgggcaagggaaagaagcaatagagttctttcaaaggactgtattggaaggtatgaagcctgatcatgttacttttgctctgttaagtgcttgtagccactcagggcttgtcaaggaaggaaagtactactttcaaattatgtctgatatttacggagttaaaccctaattggatcactattaatgtatggtgatcttcttggcc

SEQ ID NO: 49504 - DNA, 140 bp, Glycine max
  unsure (1)..(140): unsure at all n locations
  Clone ID: PAT_MRT3847_15709C.1
aagctcggaattcggctttagttaacacaacgaatgcagtgncttgccgctancacaaggtnggnganggcctttttttataggctcccgcggttataaccacctcttcttccaggggcatagaactcacaaagttagac

SEQ ID NO: 49505 - DNA, 240 bp, Glycine max
  Clone ID: PAT_MRT3847_1570C.1
acaggcccggtgataaaacccttttgggaaaccaaaaaaaaaaaaccctggcggccacaaattgaggaagagcccctggaccccacctaagggatgcaaaggtgtcccccccccgccccgaaaaaaagaaaggatcttgagtgagggataaaagggggtttttcgaaacattagaaagaattgtccccgggttcaaaaagaacacaaagttcccacccttaggagggcggaggagggggg

SEQ ID NO: 49506 - DNA, 141 bp, Glycine max
  Clone ID: PAT_MRT3847_15710C.1
cacaaacatgcgggttctcacaatgctcatagatactgatttagtagaaaggacatgggatgcgagataaatattgcagtcctataatgatcactcgctgataatgcacatgctaattactggacactgtcagcttaagct

SEQ ID NO: 49507 - DNA, 199 bp, Glycine max
  unsure (1)..(199): unsure at all n locations
  Clone ID: PAT_MRT3847_15711C.1
gacttttctgtccatgctttgccacttcaggtctgggattttcttcttctttggaggttgggtggtggtgatgactacgtttgtgtactatttcctgccagagaccaaaagtgtgcctcncgttcagatggagaaagcgtggcaagagcattggttttgcaacacactagtgggtgaagtgagtgatacacagcataaa

SEQ ID NO: 49508 - DNA, 340 bp, Glycine max
  unsure (1)..(340): unsure at all n locations
  Clone ID: PAT_MRT3847_15712C.1
ttcttttgcgagaagacgacagaaggggagccagagctggtatacnagaatccgaccctctgtcctctcgaagcagtaatcgttcagcatagtctcaccaacccagacatgggcctgctatcttgttgtaggactaccgacctgagaaaatgatccaaaggaagccctggcacgacaagatacctgtatacgaacaatattcaacgaaactggaggtcgcctggcggcaatgaaacgcaacaagggtagtcaacaggagaacaaacactccactttaaatgggaacagggactgcggggggatcacaagggcaaggagcagggggccaaacgcaggatgc

SEQ ID NO: 49509 - DNA, 287 bp, Glycine max
  Clone ID: PAT_MRT3847_15713C.1
cccacgcgtccgtacgggtgcgagaagacgacagaagggcatggaaggagaaactgtaccatctgagggcaaacttttgccaccaaagccaaattttgagctcatttgaagcctcatgagaaaaaataatggtcacgtacagttccgtaaggtgtatgatccacctaatcgactttcccctcttaagaaagctaggatggatatttatagggccatatatgcacaggagaaaattgatgtccgtttaaattcgaacgctcaaagagagaaactgaaaacaccgcctg

SEQ ID NO: 49510 - DNA, 366 bp, Glycine max
  Clone ID: PAT_MRT3847_15715C.1
tacggctgcgagaagacgacagaagggggatgaccatgtgatgaatttcacacctttgtattactgggtgacttcatttgtattcaaaattggatattacataaaaaccagagggtggttgccatagaagttttttttttttttggttttaatttgttaacaagatgcaatcaagggttttgacccttgaagagggaaaggagagaatcaaccaatctaataagcctttgagaccagtgcgggtacttgggttgttttttgctctatgtgtcctggtctcagtgatcagcatatacactggtaagcattttggaattgagagggtggggaccacaatgaggtctagttttcaaccatgttattatg

SEQ ID NO: 49511 - DNA, 692 bp, Glycine max
  Clone ID: PAT_MRT3847_15716C.1
tcaattggttggtctgttggtgcaactcttggtatgctcaggctgttcctgagaagagagtgatttcttgcatcggtgatggaagctttcaggtgacagctcaggatgtgtccacaatgctgcgaaatgagcagaagagcatcatcttcctgataaacaatggtggatacactattgaagttgaaattcatgatgggccatacaacgtgattaaaaactggaactacactggcttggttgatgcaatccacaatggtgaaggaaaatgctggaccactaaggttacatgtgaagaagagcttgttgaggcaattcagacagcaacaggagtcaagaaggattgcttgtgcttcattgaggtaattgttcacaaggatgacacaagcaaagaattgcttgaatggggctctagggtttgtgctgctaacggtcgtcctcccaatcctcagtgaatttcaaacacttaattagttgagccattcacaaatttgctggagtttagccatattaatttattaagttgagatcaattcctttaagatgcttacgtacgagagaaattttccttttggaaatgctttttgagtttattaaagtgttgaaatgagtgcactagattttatgtaaatttactcatcgtggacaaaagttaatctatcaatttttaacatgaatcaatgcttctggatttt

SEQ ID NO: 49512 - DNA, 410 bp, Glycine max
  unsure (1)..(410): unsure at all n locations
  Clone ID: PAT_MRT3847_15717C.1
aggaacatgtctaggatgcctgtttcacagaaacagttggcagaggtgtttttgttgttatagagattgcaatgctttcatgcangtatatatatcttgggctattcaacagcgaaatanaaactgcaagggcttataacaaggcanctatcaantgcaatggaagagaggctgtgactaactttaanccaagtacatataaaagcaagatgaaacccaaagctattaatgaaagtggcantcacaaccttaacctcagtctgggcatagcaaccccaagacatggtcccaaaaaaaacanggggcatcttcaattccantccatcccttacaacatacatcctagaaaaagttcaatgatagagactaatattaattccgttattgataatccttctttaaaaagactg

SEQ ID NO: 49513 - DNA, 320 bp, Glycine max
  Clone ID: PAT_MRT3847_15718C.1
ataagagcatcaaaggctaaagagattgtgggtctttttattttttttttttttaaaatgggcccaactaaccttttgaaaaataaaaggggggaaactaagcgaaagaaagaccctgggggggagaaggtcccaatccaaaaccctaaacccttgagggctaaaaggggaaaaccaacaaacacacccgtaaggaaaatgaaaaaggcagccccaccacaaaaacaaccaggttaaacagttttacaactaaaacttttggtctcggcattacggggggggtggtgttccaggcggagaaggggcgcaagccccattcc

SEQ ID NO: 49514 - DNA, 512 bp, Glycine max
  Clone ID: PAT_MRT3847_15719C.1
acgcccacgcgtccgcccacgcgttcgcccacgcgttcggttcagaaacgcttcacagacaagtataattatgattttgtgaaggacatgcctttggagggacaatacgagtgggttaaattgaagtcataaaagtgaaagtaccaaccttgaaagaagaagaagaagaagaccgttaattaaaaaatcatgccacttgctgacattatttttacgttaattaatttactttaggtacttcattttttacttcgacttttcgttttttcacggtaggactacgtttggtgtacagttaattttatttttcttcttctatggttaaattcccttttgtataaatttgtgtacggtttatgatatagttatacggagaaagctagttctgtgaattccgttgatggtagtgactgtggcgaaaacgattcctataaggctacaacaaaattgtagtctctcatttttttttttcccctttctttgtgctttgcaaatcgcaatttcccccctaa

SEQ ID NO: 49515 - DNA, 237 bp, Glycine max
  unsure (1)..(237): unsure at all n locations
  Clone ID: PAT_MRT3847_1571C.1
gggaatgnagtgggtgctcccaatatcacttgctagtaacncttatnccttctgcttagtttanagagnccagttttnttatgctcgagtgaagaaagagagagagaaaagagagagtttggtttgcttgttttgttggtgtgagnaagaanaacctgcgngagtnancaacaaaaaccaagtctcattggtacaagangatnnnngggnccccatgatggttantatcgcccatgg

SEQ ID NO: 49516 - DNA, 251 bp, Glycine max
  unsure (1)..(251): unsure at all n locations
  Clone ID: PAT_MRT3847_15720C.1
caaaatgaaattatatggggccccagggtgttgnnnntnaatgctcaccggagagcacatcaccgcttgtggcgaccgtatgcaaacgggcaccgacctatgggatctaccaatcgtaatggatctgggctgcgtgaccacaccataaaacccaaggggcaccctaaagatgccatgtgttccatacattaaaggtgccatccacaaacaaggaaagccaccggggttccctaggaagataacaaagacat

SEQ ID NO: 49517 - DNA, 359 bp, Glycine max
  unsure (1)..(359): unsure at all n locations
  Clone ID: PAT_MRT3847_15721C.1
ctgtatgatcatcactgtatgacgtcctccttgctttgggggggggggggggtgaaaaaaaggaatagagagcagagagggaggggagggggataagaatgcgtagattaaggagaagggttaaggccggaatacgataaaaaaaagggatattcagaagataggcaaagtaaaatgtgaatgagaggcgtaagaatattgtaaggggttagttaaaagccatgccacaggatattgagcatagaacagggcgaaaggatagcagaggtgtagtagcaaggggtgaacgtggggctaatagcggcagcatttggcagtacagttcggcntgtggcgttttgcaaacaggggaaatgaag

SEQ ID NO: 49518 - DNA, 731 bp, Glycine max
  Clone ID: PAT_MRT3847_15722C.1
aattaaatcaaattcttactctattatttaaaatatttttcataccattactttttgcttaccatctttacttaaattattaatacacaaccccgggggaccacccgaaaaatccgaaccgaaaccaaggaggccacccacactccccaaaaagaagacgaaaaaaaaccgggaaaaaaaaaggcaaaaacgccccccgagagaaaaaggtgacacccaaaaaattcccaaaaaaaaacaacccgaaacaaaaaagggaaaaccccgggggcccaaaagaagggcccaacccacaaaaagggggggggcccaaatgccccgctaaaaagggaaaaacctgcgcccccaacacaaaaaagaaaaccccccaccccccggaaaaggccttatagaaaaggggccccagggggattcttttttcccccaagaagcagggaaacaggggaagcccctaaaccgcccggcccaaaaaaaagtgaaaaaggggcccccccaggtacgccccaccaggaaaaaaaccgcgagggggggggaaaacggggagaaaaaaaaaagaccccgcccaaatgagcgaaaccaaccaacaaaaaaaccccaaccaagcccaaaacgaaaaataaaaaaaggccccccaaaagccccccacccccccaaataaaagggtggaaaacccaaaacccgaaaagggaaaaaaaaaacccccccaaaaaaaaaaaaatagcaaaggggcc

SEQ ID NO: 49519 - DNA, 1546 bp, Glycine max
  Clone ID: PAT_MRT3847_15723C.1
cggacgcgtgggcggacgcgcaaacaaccacaagtgttcttcctctgtaaacacacaaactctgttcctatttcagagtactgtccctttacctcgtacacatcaaacaatggaaggagatgggtattgtgggagtttctttcagaggtgcaagccttacatagccatgatttctctgcaattcgggtttgcgggtatgaacataatcaccaaggtttccctcaaccgtgggatgagccactatgtgcttgtggtttatagacacgcctttgctactgcagctattgctccttttgctattgttctagagaggaaagtgaggcccaagattacatttctcatgttcatgcaaatattcgtgttgggtctccttgggcctgtgattgatcagaacttatattatgcggggttgaaatttacttcccctacctactcatgtgcgataagcaacatgctccctgctatgacatttgtgatggctgctattttcaggatggagaagttaaacgtgagaaaagtaagatgccaagcaaaggtgattggaactgtagtaacagttgctggggccatgttgatgacattgtacaaagggcaagtaatcagtttcttggggtctaagtacatgcatcacccaagaaactatgtacctgaaaacaacactgattctggtgaaaaggattggttcaagggttctgttcttctcgtacttgccaccctttcatgggcttctttcttcatccttcaggcagtgacattaaggaaataccctgctcagctctccctcacagcacttgtgtgtgccttgggtacactgcaatcaattgcagttacctttgtcatggagcacaaaccatctgtttggaccattggctgggacatgaaccttcttgctgcagcctatgctggaataatatcatcaggtatcacctactatgttcaagggattgtcatgcagaaaaaagggcctgttttcgttactgctttcagccctttgatgatgattatcgtagccatcatgggtaccttcatccttgcagaaaaaatatatcttggaggggtcattggagctattctcatagtaatgggactttactcggttctgtggggcaagcacaaggagaacaaagagaaagaggcagagataaccattgaggtattgaagtgttgttcagaaaatgggatgaggttggagactgtggtagaagatgctgaaacaaacaacgacattgagatgcaaaagggtgaagcctcaagagagttaagggtagccattggagttccaaaagtttaaagtggttaagattagaaaggaaagggatgaataataatagaggctgcaatgaaaaaaggggtctttaattgagagcagagaaattgaaaggggttttgttttgtgtactcaccatctttcttcggaaaattaactaaggcttatttttttctttcttttttgtattttgattaggaccttatgtgtggaccttactgtccataatgtaacttaaattttgcacactttggtgaaaggaaaattgacatttgcagc

SEQ ID NO: 49520 - DNA, 526 bp, Glycine max
  Clone ID: PAT_MRT3847_15724C.1
gacacgcgtccactgcaattcctttttccctcgagcaacgacgatggaggacgcggaagcggcgaacacgcttcgcattctggtggcgacggactgccacctcggttacatggagaaggatgaggtgcgccgccacgactccttccacgccttcgaggagatttgcgccgtcgccgagcgccaccgcgtcgacttcgtcctcctcggcggcgacctcttccacgagaacaagccctctcgctccacgctcgtcaaggccatcgagattctccgccgctactgcctcaacgaccgccccgtccccttccaggtcgtcagcgaccagacgctcaatttccagaacgcgtttggtcatgtgaactatgaggatcctcacttcaatgttggattgccggtatttactattcacggaaaccatgacgatcctgctgccgtggacaacctttctgatgtcgatattctctcggcatgtaatctagtcaactactttgggaaaacagttcttgggggttctggggaggggcag

SEQ ID NO: 49521 - DNA, 531 bp, Glycine max
  Clone ID: PAT_MRT3847_15725C.1
gacgtgaggaactatagggttcccctttgtgtgctcaatgggcacgggtatgctgttaggaaggtgaaattctcgccacacgtgcggaatttgatggtgtcttgctcctatgatatgacggtgtgtgtttgggatttcatggtggaggatgctctggtgagtaggtatgatcaccacacggagttcgcggtcggggtggatatgagcgtgcttgttgagggcctcatggctagcactggttgggatgaacttgtttatgtgtggcagcatgggactgaccccagggcaccttgaaggtgaagggtctaccacagcgaaatctgtggcattccaagttcgagctgagaaatttgcaaataggaagaggaaaaatcagtataggggaatccgtcaacgcccttggggaaaatgggcagctgagattcgggatcctagaaagggggttcgtgtctggcttggaaccttcaacactgctgaagaagctgcaagagcttatgatgctgaagcacggaggattcgtggcaagaaagc

SEQ ID NO: 49522 - DNA, 311 bp, Glycine max
  Clone ID: PAT_MRT3847_15726C.1
ctcgagccgcaaactccaccaacagactctctcactgtccttctctctccccctttcctgtggcgcggcggtgtgccaggcttcggcttttctcctcgttcttccggtggtaagggcgacatgggggtcacgtgggaagcgtgcaatgagtattccctttacacgggagctcttgggaccgcatagctgcttttcaaggcctaccaagtaaccaaggacgggaatgatcataatttgtgctcagagattgttaaggctgggtttctgcttcaattgattcccggtttttggggagaaggaattttgcaagc

SEQ ID NO: 49523 - DNA, 375 bp, Glycine max
  Clone ID: PAT_MRT3847_15727C.1
accaaaactgacgcttttgttattcttcgagtctctgagagagatgtgtggaggcgctatgatctctgacttcatgctcctttttgagacttctaatatcctcagggttttttgggagaattggctaaaaaatgggtctaccacagcgaaatctgtggcattccaagttcgagctgagaaatttgcaaataggaagaggaaaaatcagtataggggaatccgtcaacgcccttggggaaaatgggcagctgagattcgggatcctagaaagggggttcgtgtctggcttggaaccttcaacactgctgaagaagctgcaagagcttatgatgctgaagcacggaggattcgtggcaagaaagccaaggtgaattt

SEQ ID NO: 49524 - DNA, 1132 bp, Glycine max
  Clone ID: PAT_MRT3847_15728C.1
gactggaacaagtacgacgagtgtgtcaatgccactgcctccgtcgataagagcgttaaggtttgggacgtgaggaactatagggttcccctttgtgtgctcaatgggcacgggtatgctgttaggaaggtgaaattctcgccacacgtgcggaatttgatggtgtcttgctcctatgatatgacggtgtgtgtttgggatttcatggtggaggatgctctggtgagtaggtatgatcaccacacggagttcgcggtcggggtggatatgagcgtgcttgttgagggcctcatggctagcactggttgggatgaacttgtttatgtgtggcagcatgggactgaccccagggcaccttgaaggagtgaaaaatgaatagagagttctatagatctttaccacacattcatacaagcttcaagtatacagattatatatataattcaccatagtgaggtgctctggaaggttgaatagtctggttacagtggtgaattatggatggtaacaggtggatatgcaacttctttagctatctatatctacattcttttttaaatccattaccaaaatctgtttcttatcatgtttgaaacgaaaatgtaaactccttttgtccataccatgtcaaatctcctatctgaaatgttagataaccaagatatctgaataatgatcgttcttatgaatatgttggtggatgattgaaatctaatgtgaaccttcgaaaggtctaccacagcgtgtatattagtaacagaaaatcgagtatatgtcattttggacaatcaacattattatactccctagtgggatccaaacaatggaggaaattaaaccatctttattccctcttttgctgggttttacgcttgttgactttacacttgtttcgcagtaataaccagcaaaagagggaataaagtcaacaagcgtaaaaccctcgagcaaactgtcagtactttaccgtgttgcaatcaatggtgggggtgatcttgtagggcaagttgatcccacacttgctagggagggctgaaagggttgcaagattgagtccagccaagctcaaaacagtgcttttgaggcacctacacaccccagatcgtcacggacgcgtgggcggacaagtggg

SEQ ID NO: 49525 - DNA, 758 bp, Glycine max
  unsure (1)..(758): unsure at all n locations
  Clone ID: PAT_MRT3847_15729C.1
ccggggggggggggggnnnnncttacttaacaaaccactttaattcaaatatttcttctacttttcattctatttcttttcaaccaaacaacctctctttccaccctatttcaactttatttctcttcttttttatccttttcttttctcacctacctactgggggggcctctatttcttctctgcctaccaaacagcctaagtcagaacctggtatttcccctatagcatgtagcgcaggctaagggccctcatctcacccaaggtttcttcatataaggaatcctagctggtactttgggggtttctgtatcttttatgcttgatgagcatgccagacaatgaagactgtagaggattataacatatatgttgcttactagctcttattgtgataaacaaagagaaccttggccaataatagaagcttcaagaggagcatgcaaaactccgtaagccatggtgatagttacttgactatcctctagtggaacaatttggggtttcaattttctcaagactcgtaatgagcagcttagacaaaaaggaagagagagttaatgccatagggcacgtttgggtaaatagcttaaataagcattttttcaataaaatcaaatgagagcttattcataagcttgattgtgaaacttgaaattaagctaaaaagagcttattttttaatagggtttctcccatgaagcttattgaaataagctcttatgaacgcccatttaaaatagattattattcttttg

SEQ ID NO: 49526 - DNA, 413 bp, Glycine max
  unsure (1)..(413): unsure at all n locations
  Clone ID: PAT_MRT3847_1572C.1
tgtaattttacgacggctgatacaaattctggactaaacactagaaaaatctcgctttgacagaagaggaaacgatggaagtgattagaaatagaggcattcctgctgatgttcttgcagagcgagctcatgaatttgaaaaacatgttgcccatgaaagcctcaaggatcaaattcctgctgatgacacggcggattctactaaggataacacgtttgcaaacattatgaaccttagacagagcgttgatggagatcttaaacttcttactgatgggaagacggatgagagggaagcatattgctgtgtctaatactagtgcaggggataatcatgtagatcaaatagccttaatggcacaggaggagactctggctgctagtgcangtgatatcagaactgcaatggtgag

SEQ ID NO: 49527 - DNA, 273 bp, Glycine max
  Clone ID: PAT_MRT3847_15730C.1
ccctcagccatggatggtatattcaggaacatgtggtccaccatgtggtcaagcttcttgcttcttcggtacctcctagtcattctggatctcagagccctttggttaatatcatcctcatgctgtgtgctgtcctccgtggcacttcctctatcgatactattcatatactttctttatatggtgtagtccccgcagttgctgcttctttattaccactttgtgagacatttggctcaattaaaccgacttcaaatagcactggcgatgagt

SEQ ID NO: 49528 - DNA, 1987 bp, Glycine max
  unsure (1)..(1987): unsure at all n locations
  Clone ID: PAT_MRT3847_15731C.1
tgccaaaactgaggcttgcgttattcttcgagtctctgagagagatgtgaggaggcgctatcatctctgacttcattctcctttatgagacttctaatctcctcagggttttctgggagaatggactaaaaaatggttatatggacccgtgcancgcgctcttctatggaggggtgtgaccnacttagtctaatggttctgaatgtctctgttcttactgcgatttttacactgttccaattatattaaagggtctgccaaaactaaggctttattgttacaccgtttagctgaggatcgcctatttctgttttcttatagttccatctttcctcccttgggaacggacgcttttgttattcttcgtgtcttgttgtgtttttcatctgagatgtgtggaggagctatcatctctgatttcattccggcggcggcgatcgccgggtctcgccgcctgaccgccgattacctgtggccggatttgaagaagcggaagtctgacttggacgttgacttcgaggctgatttcagggattttaaagacgattctgatatcgacgacgacgacgacgatcaccaagtcaagccctttgctttcgccgcctcttctcgtctgtctacggcagcgaaatctgtggcattccaaggtcgggctgagatatctgcaaatagaaagaggaagaatcagtataggggaatccgtcaacgcccttggggaaaatgggcagctgagattcgggatccaagaaagggggttcgtgtctggcttggaaccttcaacactgctgaagaagctgcaagagcttatgatgctgaagcacggaggattcgtggcaagaaagccaaggtgaattttcctgaggcaccaggtacttcttctgtaaaacgttccaaggtaaatccacaggaaaatcttaagactgttcagcccaatctgggtcaccagagttcagtgctggcaacaatcacatggactcctggtggaacagaaacccctagttagctcagtatgctaacatggcttccttccctggcagtggaaatgggctaagatcccttccttcgtctgatgatgcaaccctttacttcagttcagatcaagggagtaattcatttgattatgctcctgagatctcatccatgctttctgctcctttggattgtgaatctcattttgtgcaaaatgccaaccagcagcagcctaactctcagaatgtggtatctattgaagatgattctgcaaagacactctctgaggagcttgtggatattgaatctgagttgaagttctttcagatgccttatcttgaagggagctggggcgatacttcattggaatccttgctatctggtgacacaactcaggatggtggaaacctcatgaacctttggtgctttgatgacattccttccatggctggtggagttttctgaaccgctttttctttggtctccctgtgtgtaaataaagctacaagttgtttttctctgtttttgatttttgttgcatttgttgttctcttgttggacacatccccccatgtgtctgaaaaaaaaaatgtaatttccatttttgttgctttctggaatggttgtcatccgtgttgaagatggagttaaaacaattaactcgctcaagcatctcttgtatctaaagtatggggctatatagttatttaggtgtcctttgccttgtcaaaggccttagttttggggaaatctcgattgttgttcgagggtgattatatatgatctgtgaaacaatcttggctgctgataatttttaactgggttgtttctctaaaagaacaaaagaagagagaacaggagcacccttctgaaaccaaggtacaagagtggagccatttggttcctccaagatctaaagggccaggctgctagcttgcgtcaatcaaaattaagaccaggatatataatactaatagagattgggtctgagcctaacccgcgaagttatgaatcaagg

SEQ ID NO: 49529 - DNA, 270 bp, Glycine max
  Clone ID: PAT_MRT3847_15732C.1
cggctcgagacggctgcgagaagacgacagaagggatcctcacatcggcaataggatttgaatccacgtctttgtggaatttgagtccaatccttaccaactggatcaacttttgttcgctgcatccattttagttattttaaaacattgtgattagagtattcttcttttctttgaccaggttgccatcaatttgcagacttaacagaatccataatgttttgatttgaacactagtccagtaaactttgaaatttcactcagaatcct

SEQ ID NO: 49530 - DNA, 240 bp, Glycine max
  Clone ID: PAT_MRT3847_15733C.1
ggattctgttgggcatctcaagccactgacctgatcattttcattctactagggtttccagaatttccccaaatcaactaacgtgtttctgaatgaatctcataacgacgcaatataagaatacgagtcttccatagcttcgattcctacactgtacagcatcattccacaggcctataggtgactggagggggtattaaagagaattctcaaccaaatgggtagtgttgcaatgttcgc

SEQ ID NO: 49531 - DNA, 186 bp, Glycine max
  Clone ID: PAT_MRT3847_15734C.1
ggctcgagaaagagatagaagcagcgagctaaagaagcaaagtagtttcccgcattcttcgaatacttaaggtaatttagctatctttagctttagctttggagtttttttttttaatcaaccttgacttctgttaagcttactcaatttggtttacaatacctatcagaacaaaagatagataac

SEQ ID NO: 49532 - DNA, 1016 bp, Glycine max
  Clone ID: PAT_MRT3847_15735C.1
gcgtccgccctttcgtcccaatatattccattctctctgtgtatttccctacctctcccttcaaggttagtcgatttcttctgtttttcttcttcgttctttccatgaattgtgtatgttctttgatcaatacgatgttgatttgattgtgttttgtttggtttcatcgatcttcaattttcataatcagattcagcttttattatctttacaacaacgtccttaatttgatgattctttaatcgtagatttgctctaattagagctttttcatgtcagatccctttacaacaagccttaattgttgattcattaatcgtagattagggcttttttcattgattacttcagatcccgtaaacgttaccatagatcaaggctttttcatgaattacttcagattcgttaaacaacaggctcaatttttaatgaggaatattgttagcaccaaagaggagtggtagacaaattgttcaaaagtatgtcggtagggttggggcttgaagagaatgagctaaaggagggtgcaaatgaagatgacatgcattatcttttaaaaatcaattattacccaccttgtccatgtcctgatctggtcttgggtgtgccaccacacacagacatgtcctacctcacaattctggtgcctaacgaggtgcagggccttcaagcatgtagggatggccattggtacgatgttaagtatgtccccaatgccctcgttattcacattggcgaccaaatggaggtacatatcttgcttagatgctatagttatatttggataaatttaaattgataaaagtatgaattaaaatcagctctcacattaagagagtttctataatttaacttatgtataaattaatttaaatttatgggagaaatctatttttggaaaaaacatatttttttagtttttggttatcaaatgtaattaacgtctctgtatttctatgttgatgaacttgatttataaacttttggcccttttctcttagattcatgatgtattt

SEQ ID NO: 49533 - DNA, 170 bp, Glycine max
  Clone ID: PAT_MRT3847_15736C.1
ccaaggtgtatgattttgtctggggaatgactccagaggcactgctatttgtacttaggtggcaggcaactatacttatgatcttctgtgtggttgcacccggggctggataccaagattttgtcatatcagatgggaagcgaagtgctagtggggtggatgaaagcaaa

SEQ ID NO: 49534 - DNA, 226 bp, Glycine max
  unsure (1)..(226): unsure at all n locations
  Clone ID: PAT_MRT3847_15737C.1
ctcgagccgtctggatgggattattcttgacggggcacctgttaaggtcaggagacctactcattatagtccttccttagctgctaccctaggctcaagccaacctagccctagccttaatctgggtgctgctggctcacgactgngtcggcaggtgacatgatggtctgatcggattncaatngatgactcatatacttactgaacacagtcaggagtttagagc

SEQ ID NO: 49535 - DNA, 271 bp, Glycine max
  Clone ID: PAT_MRT3847_15738C.1
tccactcgtgcgcccacgctaacgatatgtgtattaaatcttgatcccaatgttattatgatctctgcctcaccatgggaacagaagcaggatcactgatgaacagctgggcttaggatcaaccatcaacacctgtcaagtcactgcacatacaatgattggaccctgtccggcgaactggatgggctgcagaggctacttcgagacaaccctgctcttctgaacgagagaaaccccgcttatggagaaactccattgcacatggaagata

SEQ ID NO: 49536 - DNA, 631 bp, Glycine max
  Clone ID: PAT_MRT3847_15739C.1
attatagcataagcgatatcccaccttattattggatattgattgcactacgaccccttacatgtaattccttgtgtgataaaaccaattgacttcacgcaccaaatcgagtatcgattagtgaacaatagcactaatatcgcccactcttaaccatattttttatggaagatagggattcaacctcgaactacttgctacatgctgatagacttaatttacttcattacatctttaatacaaaatgtaacaagcaccaacacttgaaagttgtttctaatgtgacgaccctactgtaaactcgtaaccctaaataaaactactaagctgcgctcaacatcaggatacacttcatatggcgatgtaacgctgactctgacatgcctgcagtttatcattgaacttcttatgcatgaccaataattctaaaatacagatgcatgataccttccatgcctcaaaatctgcaatgactcacatcaaaaacaccagtcatagtgagagacttggtacctatcatcaccaatcataaccttctcgatcttttacgcaactccatagattattatcacgcggtttgcatgtgtgctaaaagcacaagtgactgatgaataacatgctaaattgacac

SEQ ID NO: 49537 - DNA, 1883 bp, Glycine max
  Clone ID: PAT_MRT3847_1573C.1
cttgcatgcctgcaggagcttgaatttcgtgaagaggacaagaaccgcaataagcaggtgaatatttcttgatttaacatttttaattatgcttcaactttcagatgtatcatatcatgtgtataatagtcacactagtaaggaaggtttcatcaggaatgtgttattgactgtatcacactcctggggtatgaaggctcaaatcatagcttttgctgggaaacttcatatagcaggcgttgatgaacttttctttcttttttgttaaacggtgatttcttgactatctgtgtggctagtcaacccctaaattcccatccatcaatttatatttacttgctgttcagtgttatccttattaattttggatttttcagtggccaacattctctaaattatcagatcttagcatgttcaagagtacttctgttcctggtttgtcatttaatagcttttctgacagattcaggcttcaattgcaaaagttgttcaacgacaatctgaagcactggttaagagacgtagagatacaccaggttcatttgtgacaagatcacagcgcaatcaacgaaatgttctctctaggagacattgcccggctaccaccgtgggggagagggagcgcgtcagacaccgtggccggcatcgacaccaaaatcgcgggtctcgttcattgttgtgcttccgtttcgcgttggtgatcctcctctcgctgctctctccaccaccacacagagtgactcactcaccaaatagcaatggctgctcagaagcgttccttccctgatgctcctaacgataacaaccgccacgccaaacatcaccacggagcatttgattctggcatacaggaggaaggaatgagcattatagaaaattaagagaataatgagtgctggggcttattctgtacgtacatacaagaggaggaaaatgacaataatgaaaaggactcatcttccacagatgagcgatgtacagaactcaggcagagaaggcgaaagaggcggaccagaggtcgtccttctcagccctcatcatcgacggcaagtcctgatggtggatgcatagaaagtgacatggacataagaatttcttctagactggtgtcaaaacctcaaaaactaacttggggaaggggtggttttaggagtcacacacggcatggcagtggcaatggtagcaatagcaaaagttcccgcagtagtcgcttggctaagttagttgattatctccatagcttgaatgaaaacactgatgagttagatgtccatctcattcttttgtctttagacaaacaaattacaccaagcttgcagcagccacacctttgctgtcggccaacattgtctgtgaagcatctttgtgaatatgttgctcatcagacacctttgctggttgaagaagttgagatattggcagttaaaggatgctgcagtacagtttgtgacaagtcatttgatgagacttcatcctctgatgagctaactacgctggttatagatcctagcaaagatgaactggaaactctgcaagggcatgaatctctggcagggattaaatctaaatgcatatctaaaagggagcatttgattctggcatacaggaggaaggaatgaacattatagacagttttgagatttatgaatgccagggcttattctgtacgtacataggaaaattttcgactacaaaactatatatagttaaataataatatgaacctcccgaaagattatatagacagttttgatatttattgatgtcaggatttattctgtatgtacataggaaaattttcaactagaaaactatagtgaagtaatttgatatgaacctcctgaaaggtcatttatatacaagagtttgtttcgacttgtaaa

SEQ ID NO: 49538 - DNA, 183 bp, Glycine max
  unsure (1)..(183): unsure at all n locations
  Clone ID: PAT_MRT3847_15740C.1
gcttggattctcgagagcgggcggcctttttttttttttttttttgggagagnggacgcnnggttgccatgtgatgagggtgacatgggtttgggtggtggttaggaagcgcgggtgccgattttttatcgtgggtggggcaccagcagaaagacccaacactacagtggaacatggggcgga

SEQ ID NO: 49539 - DNA, 504 bp, Glycine max
  Clone ID: PAT_MRT3847_15741C.1
ggaaatagattgtttgccataggtattgctttcgcaaaactgaattcatattttacatatcgtctcctaaatggtgctattagcaacctatcatatcatacattctttttctttcctaagtagtctactgctaaacaagacctaaagttgctgacaaaaagcatgacatttcatacctcattttcaaaccatgtttgtctttcttcctcttatttgtttctatatgcatttgaagttgagatattttgatcagattttcatattttatttcttcgttgtcagattttactttcctatcgctgtaactagtattttccttgagttggtttatatagattgcctttgtgcttgattgttttttacttccccttctaatttggaactaacttatttttccaatatcaatgatattatgcaaatcaagccaaataatttttttggatttgttatcatacaaattcttgttttttagaaagaatttaagttatatacttttaaaatact

SEQ ID NO: 49540 - DNA, 484 bp, Glycine max
  Clone ID: PAT_MRT3847_15742C.1
tctgtattcggctcgagcggctgcgagaagacaacagaagggtcactccaatggacatgcaatggcaaggaagttgttgagagcaggttactactggatgtcgatggagacagattgttgcaaacacgcaaggtaatgccacaaatgccagatttatgctgacagaattcatgtaccaccaactacacttaatgttctttcttctccgtggcccttctctatgtggggcatcgatatgattggtagaatcgaaccgaaggcttcaaacgggcatcgtttcattctagtggctattgattacttcaccaagtgggttgaagcagcatcttatgcaaatgtgactaagcaagttgtggtccgctttatcaagaatcagatcatctgccgttatggtgtgcccaacagaatcattacagataatggaacgaacttgaataacaagatgatgaaagaattgggtgaagagttcaagattgagcatcac

SEQ ID NO: 49541 - DNA, 821 bp, Glycine max
  unsure (1)..(821): unsure at all n locations
  Clone ID: PAT_MRT3847_15743C.1
gtccggnaaaagtcttctggagaccacgcgttgtctttgtttggtttgtccaccacatgcccagcacgaaaaaccctaaccccagaaatacaatccccctttattaaacaattgaaaaccccttccctctgttcctcccctttttccattcacacacacaacactaaccccactctctctctacatttccaacagtggtatctgtcgccttcaattgcgactttccaccactaaccccattttttctctcactttctctttcttatataaaatttagggcaattgggaatgaatcaaattggtgggacaaaggacccggaggccgagcctgtctctccgtctctgccccaaccccaagacactcccaagagctccgacaaaaccgattccgccaccgctgtcgttgtcgtcgccgctgcctccgaagagcaggaggtcggagaggaggaaaagccgccgcctccgcctgtcccgatggaggaagatcctgtcaaccccgccaccgttttctccatcaggctcaagcagcctaggtccaatttgctgcacaagatgagtgtgcctgaactttgtcgcaattttagtgctgtttcgtggtgcggaaaactgaatgctatagcttgtgcagcagaaacgtgtgccagaattccaagttcaactgctaatccaccattttggatccctatacatattgtgatcccagagaggccgactgaatgtgcagtgttcaatgtcatagcagatttggatcgtgatgcttcccagcttattgaatgctgctcgtcctcttgtccccgtgcattactgattgcaaatttcca

SEQ ID NO: 49542 - DNA, 290 bp, Glycine max
  Clone ID: PAT_MRT3847_15744C.1
atatgtagggtgttttccaaagatcagagactatcagtgttccccggggaagagatggcgactctctcttcctacgataaccgttccctctcgccggaaaaccgacgttgatctgtctttgcggggattggcggccatccctccgccatgagttgccgcgagctcctgcacatacagacccatgagctgcagtttccctttgaattggggaagcccatctcgcgctctatgcagttggggaacaagactgacgactatgtggctgtaaaggtggagacaacaaatgctaa

SEQ ID NO: 49543 - DNA, 249 bp, Glycine max
  Clone ID: PAT_MRT3847_15745C.1
ccacgcgtccggcggaagtcatgtttggcgctgtgattatgcaggatctaacactcatctgacctcagttgcttaagctgcaactagtgtcctgcaagatttggaggatcttgttatgcggaaccttcatgattggcaaaatttcgccattgttggatttttaggcattcacaatattgtgttccaatagaaaccatattttggctatcctagccttcgtacagttaatggaacaacaaaaatgctggc

SEQ ID NO: 49544 - DNA, 152 bp, Glycine max
  Clone ID: PAT_MRT3847_15746C.1
aatgccccatgatggaaacattcaccgagaatcgcacaacagctccaaagttgcaaaatgtgtttgcttttgaaggagaaaaggaatcgagatggcagtgggaaggtgacttgaatgccaccatacaaaaagattttagaaataagcttttg

SEQ ID NO: 49545 - DNA, 284 bp, Glycine max
  Clone ID: PAT_MRT3847_15747C.1
cacaggcttactatacctatctcatttactttttaccttgattattcactactcaggaccagtgtaattataatgtcaaccggcaccattatcttccttatatcaatctacattaagcactacttgatctcatcaataaacatatatatacgatcttgatgtcattgcatattaactatgaaaaatgttgattgatataacttgatcacatttcataatattacaacttatgtataattcaatgacttattatatattaataattaatctacatttagttcttc

SEQ ID NO: 49546 - DNA, 323 bp, Glycine max
  Clone ID: PAT_MRT3847_15748C.1
cagccctcgccttgccgtgccttgcgcccgccccgcggcccgcgcaacactccgcagatcatccaacggaggaaccggatggccttcgacacactcttcctcaacgcacgcttcgacggcggcacccgccatcacatcgcggtcaaggacggacgcatcgccgcaatcacgtccgttgaccagccacccgccggtgccgagacgatcgacctcaaagatgccctcgtcgttcccggcttcgtcgaaggccacattcatctcgacaccagtttctatggcgacgcctggcggccgcacaagccgtgcgccgacggattcaacgt

SEQ ID NO: 49547 - DNA, 276 bp, Glycine max
  Clone ID: PAT_MRT3847_15749C.1
gtgactgaccaagacatggttgatcccgaagatcccgagaaagcgatagacaaagatggttgaccttgatctcgggattatgcagatactcctgcatatatatccagactgataaagaacgctctttttgctaacgttagcaaaaaagagcgttcttgattaatacaggatactgaaacactgtgatccggatatcgcaaaaaaaatatgtcaagcatggaagcatacgctgaatcggaatcctggattcacgccatgatacgctcattaaacaaa

SEQ ID NO: 49548 - DNA, 1789 bp, Glycine max
  Clone ID: PAT_MRT3847_1574C.1
gagcgctgctacaagagagagagagagagagagagagagagagagagagaagcatcgacaccaaaatcgcgaatctcgttcattgttgtgcttccgtttcgcgttggtgatcctcctctcgctgctctctccaccaccacacagagtgactcactcaccaaatagcaatggctgctcagaagcgttccttccctgatgctcctaacgataacaaccgccacgccaaacatcaccacgaagaagcaaaaactgaagaagaagaagaagaagaagaagaagaagcacaacaacaacaacagcatgatgaagaagaagaagaagaggataataattacaaatcagacgattctcctcccgaagacaaatccgaatatgtgtttgtagaacttctggaaatacgcaaagaagtccaatgtccaatttgcctaggtattattaagaaaacacgtactgttatggaatgcttgcaccgggtttgcagggaatgcattgacaagtcgatgcgactagggaacaatgaatgccctgcttgtcgaacacactgtgccagtcgtcgttctttgagagatgatccaaactacgatgccttaattgcagctttatatcctaatattgagaagtatgaacaagaggagcttgaatttcgtgaagaggacaagaaccgcaataagcaggcttcaattgcaaaagttgttcaacgacaatctgaagcactggttaagagacgtagagatacaccaggttcatttgtgacaagatcacagcgcaatcaacgaaatgttctctctaggagacaaaaccaagggatggataatcaaggatctgaagataatgaggaggaaaatgacaataatgaaaaggactcatcttccacagatgagcgatgtacagaactcaggcagagaaggcgaaagaggcggaccagaggtcgtccttctcagccctcatcatcgacggcaagtcctgatggtggatgcatagaaagtgacatggacataagaatttcttctagactggtgtcaaaacctcaaaaactaacttggggaaggggtggttttaggagtcacacacggcatggcagtggcaatggtagcaatagcaaaagttcccgcagtagtcgcttggctaagttagttgattatctccatagcttgaatgaaaacactgatgagttagatgtccatctcattcttttgtctttagacaaacaaattacaccaagcttgcagcagccacacctttgctgtcggccaacattgtctgtgaagcatctttgtgaatatgttgctcatcagacacctttgctgcttgaagaagttgagatattggcagttaaaggatgctgcagtacagtttgtgacaagtcatttgatgagacttcatcctctgatgagctaactacgctggttatagatcctagcaaagatgaactggaaactctgcaagggcatgaatctctggcagggattaaatctaaatgcatatctaaaagggagcatttgattctggcatacaggaggaaggaatgaacattatagacagttttgagatttatgaatgccagggcttattctgtacgtacataggaaaattttcgactacaaaactatatatagttaaataataatatgaacctcccgaaagattatatagacagttttgatatttattgatgtcaggatttattctgtatgtacatagaaaattttcaactagaaaactatagtgaagtaatttgatatgaacctcctgaaaggtcatttatatacaagagtttgtttcgacttgt

SEQ ID NO: 49549 - DNA, 338 bp, Glycine max
  Clone ID: PAT_MRT3847_15750C.1
agaaccgggcgtccacctatgattcaggtgcgtgacgagaaccggtgattcagggcacgaccaggtgacgcagctggctgaccttgacctggtgacggccaatccattggtgtacctatggtccttccgggtcatcagcggtgtggaaatgagtccatgaggaatgatgaacccgaagcccgtcttgagccgctcagtgagcaacggaaccaacgatgtggactgaccggaacgaaagaagaactgcgtctcggagttgccaagctgtactaggacatagacgacactaggccgatggatggcactggacgccgcgttacaacgaaaggaatgggaaa

SEQ ID NO: 49550 - DNA, 687 bp, Glycine max
  unsure (1)..(687): unsure at all n locations
  Clone ID: PAT_MRT3847_15751C.1
ccacgcgtccggaaaaagctctatgctgtatttttgtgatggcacttgtgaataattgaatgctatggtgagggtcttttggggcgtttactccgaaatattcctgaatcatagctatctgcaatctcccgtacgcatcatttgatagtttaatcatcaaaaacagccacagcacagcacaggcctcatcagttttgtgttgctgttcctgaaacatacacagatcaggtagcaggaggaggaggagttgcactttgctcaactctcctcactcttttcttctaacagatagatagatagatacatagtgagaaagaaagatggtttctgaaacctcactctcttcttctaaacgctctccagctactcctaagttctgcaactcattcactactaggatatttgctgatgttgctggtgacattacaattgtcgttgatggcgagtcttttcttctgcataagtttcccttggtgactctaagtgggaagatccggaaggatggtggctgaagcctgtgtttccaatgtttcaagcttggagctcatcaacttgtgagggggtctatatttcatcggactggccatgaagttcttaacttcaatgaaaatcaagggaatcaagtttgattgggtgaacagactgcgtgagtgtgagttgctangacacacagaagaaacagggagc

SEQ ID NO: 49551 - DNA, 2753 bp, Glycine max
  Clone ID: PAT_MRT3847_15752C.1
ttcgatttgttgtctgctattagatatatttcaagttaattgattagaaccagcacatttttggcttgttactttggctcttttattctcctgcagtcttcttgactatataataaatttctatattctcttctaactgccatgaccctgtctatttaatctacaattttcaactctgtgggttttctttgttgttatcttgactaactcctgatttttacttgaagtcatatatgttcttggtttagcctgacgtgcatattatctgcccgcgtagaatccaagtaaattcctttcccatggctagactctgggagttattgtcaataccatggtgtaggacttttatatgaatgttttcttgggttattgctctgggtagtgtccagtgtgaggttatgcaattaacatgctgaaggtcatgtaagcttctactttccaggctctggggcaattcttactggagacaccttgttcagcttatcatgtggcaagctcttagaaggaacccccgaacaggaagcacacagtagacaagaaagagtgtgtgtcaacgtagtaacataaatgcaactgcttctctttctcttttcattcagatgagatcaatgcacttccatttccacctcctcctctagggtttctctttatccctttcttccacgcatccctcctccgaattcaattccccttacattcaactctcctttgccgaatctgcaacaattacacaaaatgaattgctaacaacacgcacacacactctccgtgttttttccccctctcttttttaagaagaacgcgctttctcgtatctcctcgtttgaagaagcgaaacggcatcgcattcgatgagtgatgcggaacatgaagaaggggtggtggttagggagagaaaagcaacttccttttcaaccaaatagtgccaacccactctttaactatttcccttttcaaccattgcttagatgctctctaaggcttcttctgctatgcccacttttccttcttccatggtgagaagtgggttgtgcgtgtggccaaatgtgagacaactttgctttagaaaaggcattctatatgggtttatgcgattgttttctactccgttgaaaacgctgcgtggagctagccgctcgctgagagtggctcaattttgcagtgttgccaatatgtcttcctcattgctgattgaattggtaccttgcctgaatgacaattatgcttatctgttacatgatgtagataacgggtacctggtggttgtctgtttgatccctttctgaaatctgtgctctttcatatgatgccattgagtagggaaaaatcgaaatttgacatacatactgtacacactcatccattcatcatgatccgcacacgggttggaatgtgttatgaattgaaagcaagatatggggcaaaggtgattggttcagaaactgacaagtaaaggattcctggcattgatatctacttgaacgatggtgataagtggatgtttgctggccatgaggtgcgtgtaatggacacacctggtcacaccctaggccatataagcttctattttcctggatctggggcaatttttactggagacactttgttcagcttatcatgtggcaagctcatatctatttgcccgaagcagatgctatcttctcttaaaaagatcatgtctttgccagatgatacaaatatatactgtggacacgtgtatacattgaataatacaaagtttgcattgtctatagaacctgaaaacgaggaacttcaatcctatgctgcccaagtagcttaccttcgaagtaaaggcctgcccacgattcccaccacactgaagatggaaaaggcttgtaatccattccttcgtacatccagtgctgcaatccggcaatcactaaacattgcagccacagcaaatgatgcagaagcccttggtggcatccggcaagcaaaggataatttttagatttttgacttacaatattttgaacgtttgaagaaacttgttctatgtagggtaggatataaatccatccgtggaataatatatgcttgatgctatgttctcgatgtatatgatttcagaaattttggttctatttggaagtgtgtgtacttggtgcctaagaaagttgtggtgcgatttagaggggtacaatgcacacatgacactcactcagtgttctgttcagttgaggatgtgtggcgggaagaagggtagctagaagtttaaagtaaactccttgtccttggccaatggccacccaccccacttccctcagaagaacaagaaccttgtaaatgtatgggtctgtactctggacttagagcgcgtatatttggcttcttcaggatctatctgcaagtctcaacatacaaataaaataaatcattaattaaaatttaaaattctaaagatacttattctgtatagattaggttaatgaatccatcaaatggaataatatttacttggtgatatcgtaatataatttttcaattttctttgggttcatttgagatgtaaattagatttcagttttgttggcctgatgggagtcaaaatcatgatggtgcgtggaagaagctcatcactcagacactcccttcgtgtttagcatatatatgcatatgttgagaattatttagaaagttgtattttgatccattgcacttttgtgacatgaagattttaaatatttcaaaaaaaaaaaaaaaacggaaaaatctggaggccgcccccaggt

SEQ ID NO: 49552 - DNA, 250 bp, Glycine max
  Clone ID: PAT_MRT3847_15753C.1
agaaaaaagaaccggaaccaaacttccagctgttggataatccagcacgggtcatgcctgcccagctgaaggtcttaagtatgacagagacctgcagataccaacccttcaagccactctccatcgggggcatcataattctgaaagacaccagcgaagacattgaggaacttgtggaacccgtggcatcacatggcccaaagattgaagaggaggagcaggagccagagcccccagagccatttgagta

SEQ ID NO: 49553 - DNA, 591 bp, Glycine max
  Clone ID: PAT_MRT3847_15754C.1
tctgcttcctctgtttgcttatcaacatcactgaaggaaataatggtgtctaaagtggaagaagcaatgaagaggaacaagcaaatgcaaccacaagcccagaatcagcaacaacagctgcagaaacaaattcagtgcaacaaaggaaaagctggcaagttcaagaagagcagctccaatctggaagaggatggtgcctcttctgccattctctttctagcttgcatagcttatgccccttcctatgcgtagcgcgcataattcatatatatatataaatgcttcttatcaaatagaaatatatatatatatttattctgatctatatatatatatatatatatagataataacctttggtgtctagttaatttattagtaaaccatataacttttatgtcttcattcttttttagtaagtgtatcattgctctatatattaattgcaatttatttgagtaagtttcttagtagactatagcttttatgccttcattcttttttagtaagtgtatcattgtttaatatattaattgcaatttatttgagtaaaaaaaaaaaaaaaaaactccgagactagttctctctctc

SEQ ID NO: 49554 - DNA, 1544 bp, Glycine max
  Clone ID: PAT_MRT3847_15755C.1
ggctcgagcccttttcaaccatagatagcttagatgctgcatatgttctctaaggcttcttctgctatggccacttttccttgttccagggtgaaaagtgggttgtgcgtgtggccagatgtgagacaactttgctttagaaaaggcatgctatatggatttatgcggttgttttctacaccgttgaaaacgctccgtggagctagccgctcgctgagagtgactcaattttgcagggctcccaatatgtcttcctcattgcagattgaattggtaccttgcctgaaggacaattatgcttatctgttacatgatgtggacacgggtacagttggtgttgttgatccttctgaagctgtgcctatcatagatgccttgagcaggaaaaatcgaaatttgacatacatactcaacactcaccatcatcatgatcacacgggtggaaatgtagaattgaaagcaagatatggggcaaaggtgattggttcaggaactgacaaggaaaggattcctggcattgatatccacttgaatgatggagataagtggatgtttgctggccatgaggtgcgtgtaatggacacgcctggtcatacccgaggccatataagcttctattttcctggatctggggcaatttttactggagacactttcttcgcatcatgttacagatgctatcttctcttaaaaggatcatgtctttgccagatgatacaagtatttactgtggtcatgaatataccttgaacaattcaaagtttgccttgtctatagaacctgaaaacaaggaacttcaatcctatgctacccatgtatctaaccttagaaataaaggcttgcccacggtaattttcagaacttggcttctttaatggatggtttcaagtgccctctgtaggggctcttccttcactagaaacacctgtctttcacaactcattgttattgaagcttgcattgccttattagttgttggtatgctggaattttgtgtttttgcttttagcaaattattcctgttttctcagattccaactacgctgaaagtggaaaaggcttgcaatccattccttcgcacatggagcatagaaatccggcaaaaactaaatattgcagccacggcagatgatgcagaagccctgggtgttatccggcaagcaaaggataatttttagaattttttaattaaaatttaaaattctaaagatacttattctgtatagattaggttaatgaatccatcaaatggaataatatttacttggtgatatcgtaatataatttttcaattttctttgggttcatttgagatgtaaattagatttcagttttgttggcctgatgggagtcaaaatcatgatggtgcgtggaagaagctcatcactcagacactcccttcgtgtttagcatatatatgcatatgttgagaattatttagaaagttgtattttgatccattgcacttttgtgacatgaagattttaaatatttcaaagactagtttgtacatttaagagcattaacgttgggtttatcagtaa

SEQ ID NO: 49555 - DNA, 738 bp, Glycine max
  Clone ID: PAT_MRT3847_15756C.1
gattttgatttctagaggttattgcagatgtacaagtggctacgaatgcaatccatttcttttatgtggtcaagtctgttacttgataagttagtaatgtgttttatctttaaatagtgagaatttcttccatgttgcagcttatcatctccccacagatgctatcttctcttaaaaggatcatgtctttgccagatgatacaagtatttactgtggtcatgaatatacatagagcaattcaaagtttgccttgtctatagaacctgaaaacaaggaacttcaatcctatgctacccatgtatctaaccttagaaataaaggcttgcccacgattccaactacgctgaaagtggaaaaggcttgcaatccattccttcgcacatggagcatagaaatccggcaaaaactaaatattgcagccacggcagatgatgcagaagccctgggtgttatccggcaagcaaaggataatttttagaattttttaattaaaatttaaaattctaaagatacttattctgtatagattaggttaatgaatccatcaaatggaataatatttacttggtgatatcgtaatataatttttcaattttctttgggttcatttgagatgtaaattagatttcaagtttgtggccttgatggagtcaaaaatcatgatggtgcgtggaagaagctcatcactcagacacttccttcgggttagcatatatatgcatatgttgagaattatt

SEQ ID NO: 49556 - DNA, 715 bp, Glycine max
  Clone ID: PAT_MRT3847_15757C.1
cacgagtatacattggttagttacatttactcttgtccttcatgttctgtgcttccttttcctggcctaagcactgcgacattgacttttttgctttggtgtttggcagaataatacaaagtttgcattgtctatcgaacctgaaaacgaggaacttcaatcctatgctgcccaagtagcttaccttcgaagtaaaggcctgcccacgattcccaccacactgaagatggaaaaggcttgtaatccattccttcgtacatccagtgctgcaatccggcaatcactaaacattgcagccacagcaaatgatgcagaagcccttggtgtcatccggcaagcaaaggataatttttagattatttacttataatattttgaaagtctgaagaaacttgttctatgtagggtagggtatgaatccatccgtggcataaaatgtgcttgatgctatgttctcaatatgatttcagaaattttgtttccatttgggagggtctgtatgtacttggtgccttagaaagttgtggtgcgatttagaggtgtacaatacatacatgacactcactcagttgaggatatgtggcgggaagaaggctagctagcagtttaaagtaaactccttggccaatggcgacccacccccacttccctcaaaggaacaagagccatatatgggtctggactctggactgagttttgctaccaagagcgcgta

SEQ ID NO: 49557 - DNA, 862 bp, Glycine max
  unsure (1)..(862): unsure at all n locations
  Clone ID: PAT_MRT3847_15758C.1
tacggctgcgagaagacgacagaaggggcagagttgaaagaaaggtatggggcaaaggtaatgggttcagaaatagacaaggaaagaattcctggtattgatatctatttgagtgatggtgataactggatgttcgcaggccatgaagtgcatatattggccacacctggtcacaccgaaggtcatgtaagcttctactttccaggttctggggcaatttttactggagacaccttgttcagcttatcatgtggcaagctcttagaaggaacccccgaacagatgctatcttctcttaaaaggatcatgtctttgccagatgatacaagtatttactgtggtcatgaatataccttgaacaattcaaagtttgccttgtctatagaacctgaaaacaaggaacttcaatcctatgctgcccatgtagctaaccttagaaataagggcttgcccacggtaattttcagaactgagctttgttaatggatggtttcaagtgccctctgtaggggttcttcttcactagaaacacctgtctgtcataactcattgctactaaagcttgcatagtcttattagttgctgttgtggtggaattttgcgtttttgcttttaccatattactactgttctcttagattccaactacggtgaaagtggaaacggctagctatccatttctttgcacatggagcatggaaatccggcaaatactaaacattgcaaccacagcagatgatngcagagccctgcgtgctacttagcaagcataggataatttttagaatcttcttaattaatattaaaattcttatatacttattcatgatagattaggttaatgaatccatcaatggaataa

SEQ ID NO: 49558 - DNA, 293 bp, Glycine max
  Clone ID: PAT_MRT3847_15759C.1
gaaaagtcaaaaattatgatggtgatatctcatcacttggctctgcaaaaagatttcttaaagcagtgattgagatcgctttcgccttcaaagagttgaagctatgggaggtagaggcaaatttgatgcataagttaagtaccttagacagtcttggcaaacgatggaggctgaacgtgaggaattatggatcagccggttactcggcatactcattgacactgttctaacgagaggaaacatgatgaatgttggaactaccagacgggatgctaacgcgttcaaattggtga

SEQ ID NO: 49559 - DNA, 458 bp, Glycine max
  Clone ID: PAT_MRT3847_1575C.1
ttctactttggtaatggctgcacttgcgaaatgtgatcctacatcggggggcattgaatgtcccaaggatgagaaactggctcgtggggaaattttggacaaacctaggacgcgctgcttcactattctgcctatggagaataatctggcggatcgtcagaagatgctaagatgtgcgagggacattatgaagaaaagggacaagcgtactggctaagtcggaattagacccatacttcatggaatggactggttaggccaatagattactgagtaagggcagcgatattgtggggcgcgataatgctagatgggacggtttgatgaccacgcaagctatgaccaagatggcaaaagtgccaaacaggatttgagggggtgatgaaaaaattgacgcgtgacaggacacaccttggtgatggttattagtccaaggatggcaaattggtatgaaagat

SEQ ID NO: 49560 - DNA, 1356 bp, Glycine max
  Clone ID: PAT_MRT3847_15760C.1
agtttcaatttactctcattatcatatcgcaattcctccgtgtttctgttttgataactcgtaaaaatcctactccatagcaccatatctcgttccctgaatactgattttgaacttcccctgatttttttttcagggaaacaaattattgccccttcctctcttttccaatcatctccagtgaaaaaaaaaaacaatacaaaaactatatctgaaacttattggggatcaggtattgggagatgcctcgagacttgtcgcgatcccgatcacctccctataggcggaggcattcaccatctcctgtgggacacaggtatagcaggaggagcagaagagacagaagcagatctccttattcatcctactcttacaacaggcgaaaaagtcgttctatttcaccaagaggtcacagaagtccttctactactccaagacgtcgtagaagccgaactccatctgctaaacgatacagaagacatagaagtaggagttcctcgttgtctcctactcgtaaatcttccagtccaagtcttgggtcagtagagcacaaaagtgccactgaaaaactaaagaaagaagaagagaagaaaaggtagattaaatggttattatttttttttctaactctaacttttcttcgctgttccttgagttatgctttaagatggaaatcatgggtaggttcttctggtttatgatgagaacttctggcttttatgcgtaacttataatgtattgctagaactttggaacactgatgctattagtgggcatatctcccatatgaaaaaggtgcatattatctttaagacacagactgcctggaaaattagggaaggttatattggtaaaattttgtaattcttgttctaatttcttggtgaaatagttctagtttcaaatgtcccatctacatgtctatttaaaatattgatgtactctacataccagtgttttaataatgttctgatatctattggtttatgttatgcttaatttcatgttgtgtagctatattgtttgatttatgcatttcttttatcactttcagtgtcaaattactaagatattccatttattagtccataaaggtttttacatcattgttccatttctggcatgttgccacttctatgttgctttttttttttcggcattctatgttgccacttctatgttgcttattggttgagggcttgagggttagaatatgtactcacacgtactacaatttcaaagtaaaatggatcaacatcttatttaaattgtttaatcttatgaaccctcctttctctgtcttcacttgtgatgcatcaatttactgactagatgtccttgtattcattatagtgg

SEQ ID NO: 49561 - DNA, 3009 bp, Glycine max
  unsure (1)..(3009): unsure at all n locations
  Clone ID: PAT_MRT3847_15761C.1
aattcggctcgagcaacgtagtaacataaatgcaactgcttctctttctcttttcattcagatgagatcaatgcacttccatttccacctcctcctctagggtttctctttatccctttcttccacgcatccctcctccgaattcaattccccttacattcaactctcctttgccgaatctgcaacaattacacaaaatgaattgctaacaacacgcacacacactctccgtgttttttccccctctcttttttaagaagaacgcgctttctcgtatctcctcgtttgaagaagcgaaacggcatcgcattcgatgagtgatgcgaaggaaagaagtgggttttgcgtgtggccagatgcgagacaactttgcttaaggaaaggtcttctgtatggatttatgcgattattttcaataccattaaaaacattgcgcggagctagtcggtcgttgagagtggatcaattttgcagtgtagtgaatctatcttcctcattgcagatagaattggttccatgccttagggacaattatgcatatcttttacacgatgtggatacggggaggcttggtgttgttgatccttctgaagctgcacctatcatagatgcgttgagcaagaaagatttaaatttgacttacataatgaacaccaaccaccatcctgatcatactggtggaaatgcagagttgaaagaaaggtatggtgcaaaggtaattggttcagaaatagacaaggaaagaatccctggtattgatatctatttgagtgatggagataactggatgttcgcaggccatgaagtgcatatattggccacacctggtcacaccgaaggtcacattaatagcctatttgcatttgtaaatattcttattaattgttgtctgctattagatatatttcaagttaattgattagaaccagcacatttttggcttgttactttggctcttttattctcctgcagtcttcttgactatataataaatttctatattctcttctaactgccatgaccctgtctatttaatctacaattttcaactctgtgggttttctttgttgttatcttgactaactcctgatttttacttgaagtcatatatgttncttggtttagcctgacgtgcatattatctgcccgcgtagaatccaagtaaattcctttcccatggctagactctgggagttattgtcaataccatggtgtaggacttttatatgaatgttttcttgggttattgctttgggtagtgtccagtgtgaggttatgcaattaacatgctgaaggtgctgctaatgtcttttatttgatttgattttctttacttcaacctgctgatcctcactttttcaatttactatctaatatctatttgtactataagcaggtcatgtaagcttctactttccaggttctggggcaatttttactggagacaccttgttcagcttatcatgtggcaagctcttagaaggaacccccgaacaggttgatttgaattgcttttagtttctcattttgttttctggttgtacatttctatcttcagggacaagtgattgcatcttgttgcaatgtttctttcttgttttatatatcttgttttaaattgaactacctgcaagaaaggactcgaattatagtgatttaaattacaagtaaacgaggactatatgatatttgaaacttgtattcttttgtgaatgtaaatgccagtacaaaaatatggtagttatttgactatatttcttgaaggtcttgtctaaaaagaggttacgatgtttgtattcttagttaggcagatattctccatgtctgcaatcttagtgggaacatttgaatttaattattaagatcttactagataagactaattaaataatactactatgccatttcctactaattactacgttaatatcagaaatcacttatgtcaataaatattattttaggggttataataatgtttttcatattttaacttttgttgtttatatatattttgtcatataatgcttgccgatatgttgaatattggattttgatttctagatgttattgcagatgtacaagtggctacgaatgcaatccatttcttttatgtggtcaagtctgttacttgataagttagtaatgtgttttatctttaattattgagaatttcttccatgttacagatgctatcttctcttaaaaggatcatgtctttgccagatgatacaagtatttactgtggtcatgaatataccttgaacaattcaaagtttgccttgcctatagaacctgaaaacaaggaacttcaatcctatgctacccatgtagctaaccttagaaataagggcttgcccacgcatggtatgcgattgcttaaatataaatctcattttccatgtactaaccacgcgtccgcccacattccaactacgctgaaagtggaaaaggcttgcaatccattccttcgcacatggagcatagaaatccggcaaaaactaaatattgcagccacggcagatgatgcagaagccctgggtgttatccggcaagcaaaggataatttttagaattttttaattaaaatttaaaattctaaagatacttattctgtatagattaggttaatgaatccatcaaatggaataatatttacttggtgatatcgtaatataatttttcaattttctttgggttcatttgagatgtaaattagatttcagttttgttggcctgatgggagtcaaaatcatgatggtgcgtggaagaagctcatcactcagacactcccttcgtgtttagcatatatatgcatatgttgagaattatttagaaagttgtattttgatccattgcacttttgtgacatgaagattttaaatatttcaaagactagtttgtacatttaagagcattaacgttgggtttatcagtaattaggctggcgacctgtaaaaaaaggcgggtngggggannnaaannnnaatttnnncaattaagagcatt

SEQ ID NO: 49562 - DNA, 1236 bp, Glycine max
  unsure (1)..(1236): unsure at all n locations
  Clone ID: PAT_MRT3847_15762C.1
ggctcgaggttagattcacactgaacaaatgctctcaatctatttctattttgtaagacatcagatctcctcacgaatgctggtgcccaaagccaaaacgcacccacaaagcagataacggcgtcgtatgcaaccctcaaatgaagtgcaagaaacatacctcagaccttagcagcaccgtcggcgtctgcgcctcctgtctaagggaacgcctcatatccctcgccgccgcccaggcccaagcccaagcccatcacccgcaggcccaattaacgcgagtcatctcacgcgcctccgacgattattccagaaactcagaccctaaccctcccccaccgttaatcttccctcgctctgtttcgccctacgtctctcgccggaagtctgactaccccgccgactggctcgacgaccgccgcgagaggctgttctacagcactccgcagctcggtcccaccttctgcgccggcgattccgaataccacgccgacgcgaagtcgttcaagaaacgcttcaacaagttccgcatattcgcgaagattttcaggaccagatcggagaagttccagtcggatccgtcgtgcgagcaggcctcgcacgcatcgccgtcgtggttctcggcgttttttcccacacgccggaggaacaaggatcggagtggaacgacgaaggaatattcctccgccgccgcgcgccggcggtaccgcccgtcggatcgcggaatgtcgccggtgacgaccgaggatttcggcgacgagtgtgatcagtcaccgtcggggagcggatacgtctcggaggcgtctccgtggtggcggagaacgccggcggtggcgccgtcggcgcggcggtcgaggctagggcacacgaagagcgcgtcgggttcgggcatggcgctttgcctgagtcccctagttcgggcgagtccaaaccggaggtggaaccacaagggattgccgccggagatggcggaggttagggccgcagcggcgaagcctcatctctccgccgcggcgtcgttttgcgcgaaccgttccaggaagcttgcggattttggacgagtcaacccataaccgttgattttgtttaactttcaaatgagcggacccgacccgatccggtgaattttcattctcattccatatgtttttcgttttgtgcacattcttcatttcatttcttcatcatggcggcaaaaaagaaaaaagagaaacttttttttttaaaaaaaaannnnaa

SEQ ID NO: 49563 - DNA, 306 bp, Glycine max
  Clone ID: PAT_MRT3847_15763C.1
atgggtgcaagggatgaatcaatcatgcacaagggaaataaaaatcctgatcctgtcaatgatcctgtgcatgctcattcaggtccagtgctggtgcagatgatggatcctgtgaaagaggctggtccgtgactggcgcaggtggcgcaggctctgtggcctctggaatgtcctcctgttgatcctgctgaggctcctgggctacggaggcctcaccccctcccaaaggagaaggctggactcctgccgcggccggcccccgttccgcaagctctgcatgatcaggagctggccctgatgtaggct

SEQ ID NO: 49564 - DNA, 343 bp, Glycine max
  unsure (1)..(343): unsure at all n locations
  Clone ID: PAT_MRT3847_15764C.1
cttggatgagactgagcaccagggttaggtcccccgttgtgaattgttacagcaaagaaccnactggtttatcaatggcatctggtaaaggggccgtactacctttcgtagcttctgtattatcagccccatattacatgcccagtttgttggctgatcatgttacactacttgctctcttcaatggggagcgccttcccgcgagatatacacagtctaaagccgttgcagagttccggcggacccatgctgatacatggaatgttcataaagaattatttactgatgagcaacttgtgattctggcggatacatcctactcgtcatcatatttttacttgtt

SEQ ID NO: 49565 - DNA, 285 bp, Glycine max
  unsure (1)..(285): unsure at all n locations
  Clone ID: PAT_MRT3847_15765C.1
cgtatacttcgtagcttcaccatcaaaatccagtgcaaacggaagcaagaagaagcgttaatcattggcaaattagtgcatttgtcatcagacactcaggaggctagatcatgatattattctgatggtggtcagtttttacatagttgttggacctctctgaatgaatggataaatgaaatactgagatgaccaattaatttcttgacggcatagctacacagtagtattcgttctcactggacgtatgtatctttagcattatnanatatttctaattacctg

SEQ ID NO: 49566 - DNA, 211 bp, Glycine max
  Clone ID: PAT_MRT3847_15766C.1
aaaggaaaatgccaaaagccttatatagagagatgtattgtacatttaagagtggggaagagcatcaagatggttgatttacatagttggagccctaccagcggagcctgcaatcacactgagcaagttgtcccaaaaggggcactcagatgacttgttaagagctcaaacaggacctactccagggacatatgcttggaaggagacacca

SEQ ID NO: 49567 - DNA, 171 bp, Glycine max
  Clone ID: PAT_MRT3847_15767C.1
accggtactgaatgcccgggtcgacgccacgcgtaccggtgggataagacaaccgaaagggatcccccatcacacaaaaaagattagggtcacgagggtttcttttgcctttggttgggaatcttgatcaaaatatcaatcatcccttcattattcatcgggtcggcggcg

SEQ ID NO: 49568 - DNA, 232 bp, Glycine max
  unsure (1)..(232): unsure at all n locations
  Clone ID: PAT_MRT3847_15768C.1
aagacaatgagggttcttggtctattggggttttcntacggngatatacctnncnctcnnaattgcataaaatttgcgaatgtatcgggcgatgagacttctgcttggcctgtcccgaatcctgtggtgacctgtgcttcaatttctgatgttgggtaccccaataattttgttgcttacccttttttttttatttaaggaaatactttttaccttgtctattaaaccaaaa

SEQ ID NO: 49569 - DNA, 167 bp, Glycine max
  Clone ID: PAT_MRT3847_15769C.1
gaagccaaacttaaaaaactttggaggtttgattaaattaccaaaccgaccaggttagggccctttttggttcttagttccgccaataggcttgttccgaattaataatcaatattctacctttcttggacgaaccaaagtccaaaaaaaatccttgacttgttttt

SEQ ID NO: 49570 - DNA, 207 bp, Glycine max
  Clone ID: PAT_MRT3847_1576C.1
cacaactataagatagaacttccttataaccaaaaccatcatcaactatggctaatcatcacaagcactacgatgcatcaaggtcgcaatgtccacgagtatggtcaacgttgcagactgcagacttgccgaatactcgcaacccggttacatgccactagtgttcacttacgtagccactaggattgtttagttgctacaatgctt

SEQ ID NO: 49571 - DNA, 206 bp, Glycine max
  Clone ID: PAT_MRT3847_15770C.1
ggcaacgttaatgaggacacttaaattcatcacataacctgctgcatatatagacactccttggtctacagcaagcaagtgaatacttacacttctcaactagaacaaactacaaaaacatgatccaatttaacacacgactaattacgattaatgaacgaacacggccaccaaactatttaaataattaagactggatgcaacat

SEQ ID NO: 49572 - DNA, 376 bp, Glycine max
  Clone ID: PAT_MRT3847_15771C.1
tcgagccatcattgttggtgccctcagcagactgacacttggagcactcatcttctgcagtgggtcaagaagctgcatagcattgtggatgcgtgacttgcatatgtgtcgcttaccgttgtctttccaacctagtggacttcacacggcagactatgttgaagctccagatatgtaagatgcatgacagagtggtggcatgtagattcacgaagcagtagatatggattctcggagtcgggtttacattggctcggcttgggatagaccctatgaccattcgctttgttagtcatgaatatcgctggtgacaaacatatttgaggatgacatgctgattcaatggggtttggtctgttagcttatcttagcataa

SEQ ID NO: 49573 - DNA, 303 bp, Glycine max
  Clone ID: PAT_MRT3847_15772C.1
attgtaaatgtatcagacaaattccgaatagaattgtaattacaattcactaccacagagcgatagattgctgagaaccccggcagttcaaagctcttgcacaagaccttggataaattaattaaatttaataaatttacagatctatggcgacgagacctacccctcattcccttacaccacctgaacaagtaccacctcatgctggacccaaagtacataaaaattgctttgattaaaggggcgaaatccttggaactcaactgggaaccggggggtcctatccatccaaagattcttctc

SEQ ID NO: 49574 - DNA, 535 bp, Glycine max
  unsure (1)..(535): unsure at all n locations
  Clone ID: PAT_MRT3847_15773C.1
ggctcgagctggacccaacatcaaagcatacgcggatgaccatgaccttcaaaaaggacaagagatttggccgtcactgtgccaagcaatccaggactcacactttgccatcgtggtattctccgaaaactatgctgagtcaaaatggtgcttgaaagaactggtgcaaatactgcactgcagaaaaactcagggattggtagtcataccagtcttctaccaagtagatccatcccacataaggaagtgtactggcacttacggggaagcaatcgcaaaacacaaagacaaccaatccgtccaagactggaaagctgctctcactgaagctgccaatatatctggatgggacactcgtagccgtgacaacaagtaattgcttatgttttcacctttattttctcaatattaaaaatcactattttttgtaggttttacttcttattgcaaaatcatcagtctntgagtcgagtctctctcagacagncgtgttgctagcattcctcttacataaaattagattatgtatgctttt

SEQ ID NO: 49575 - DNA, 306 bp, Glycine max
  Clone ID: PAT_MRT3847_15774C.1
ccacgcgttcgaataaatttttatttgtgccaaaaaacctgatgtctcaatggcccatagttacttaccctattatttgatcccctcttaatacgatcaattcatgcaagtaaaaccaatgcgcaactatctaccatccttgatgaaggggcttgaactacccttcaagccaaagtgaaaactgctgtgttccttgctatctaagcactagccccactgggaggcctaatactgcgaatgttaaccctcgactgatccaagaccgggtgaaatgcatcattcttggtgctatacgctgccaccaaa

SEQ ID NO: 49576 - DNA, 728 bp, Glycine max
  Clone ID: PAT_MRT3847_15775C.1
gctggcagcttgctcttataatccttgctttggtgcctcttctaggactaaatggatatctgcaattcaagttcttaaaaggattcagtgcagatacaaagaaattgtatgaggaagcaagccaagtggcaaatgatgctgtggggagtataagaacagttgcttctttctgtgctgaagagaaggtgatggaattataccaggaaaaatgtgaaggaccaattaagacaggcaaaaggcaagggataataagtggaattagttttggagtatcattctttgtgctgtattcagtttatgcaaccagtttttatgctggagctcgactggtcgaggatagaaaagcaacattcacagatgttttccgggtcttttttgctctcagcatggccgccataggaatctctcaatctggctctttggtccctgattcaactaaagcaaaaggtgctgctgcttccatatttgccattcttgaccgaaagtcagaaatagacccaagcgatgacactggaatgacactggaagaattcaagggagagattgaacttaagcatgtcagtttcaagtatcctacccgacccgatgttcaaatattcagagatcttagcttgaccattcatagtggcaagacagtagcactggttggagaaagtggaagtggaaaatcaacagtgatttcattattacaaaggatttatgacccagactcaggtcacattacactg

SEQ ID NO: 49577 - DNA, 354 bp, Glycine max
  unsure (1)..(354): unsure at all n locations
  Clone ID: PAT_MRT3847_15776C.1
gaggcagttgtcacgatcctatcgtccctccttataatttcttttgattgcattngttaatggggacctnntttctggttcttggttacctgcccagtaagggggtgagggtagatttnctaagaaaagaaattaaattgcctcgagctggtgtgattcaaaaaggaaaaaaaattatttatgtattctggaatttgctgctcatttatttatttatttatttttaattaacatangtggatattctgtgcctggaatgtgaaagatgttttatagtctagaatgtgccacatttgacacaggatacaaattcaataccacacaaccataggaatatatgacatttttaaaagt

SEQ ID NO: 49578 - DNA, 840 bp, Glycine max
  unsure (1)..(840): unsure at all n locations
  Clone ID: PAT_MRT3847_15777C.1
cagatgattcgtttctatgatttatttannngatgaaataacaaagaaaactcattcctatgcagggtgcttcatcttggctttatgtttatccaaggggacttcgagaactattgttgtacataaagatgaagtataacaaccctgtaatttacataacagaaaatggtatggacgagtccaatgatccaacactatcccttgaagaggcactcatggatacttgcagaattgactacttctatcgtcatctttattatattctaattgcaatcaaggatggggtgaaagtacaaggatattttgcatggtcacttttggacaacttcgaatggagtgctggctacaccttgcgttttggaattaacttcgtcgattacaaggataatttaaaaagacaccaaaagctctctgcccattggtttaggaattttcttcaaaaatactagactcattgcaggttgataccctataattaataagatgaaaacttggtcattaatcaagagcaactttaattttaatttttttaaaacgaattataagtatctggatctgtgttataattgttttataaaaaaaaaaaaaaaaaaaaaaaaaaaaaaaaaaaaaaaaaaaaaaaaaaaaaaaaaaaaaaaaaaaaaaaaaaaaaaaaaaaaaaaaaaaaaaaaaaaaaaaaaaaaaaaaaaaaaaaaaaaaaaaaaaanggggggggggggtttttaaaaaaaaaaaatttttgggggggggtggggaaaaaaaatttttttttttttggggaaaaaaaaaaaaaaaaaggggggggggaaaaaaaaggggggggggggaaaaaacggggga

SEQ ID NO: 49579 - DNA, 435 bp, Glycine max
  Clone ID: PAT_MRT3847_15778C.1
atcgagccaatacgactgaaggtggggcactgatagaaactataccttggccataccactataaagcggaaaaggaggcacccttaagcctaagatgtgcgtattacaagcaccacttgacagggtgtaccatataaaattccttctccgcatccttttttatgaaaaaagatcttgaggattgcatctaagaggctctctcttttatactatacttttaccgatgactccaagaagcccgcttccgtttttttctctcaaaacgagagctccaatgacgaccacagatctgttccttcctgcaatcacctttttccctatcaaggtatagctactgaatccttgatccaccctattgaatacagaaggattgctcatatactgccaactgttactgctgaaaacaacactactactaagattgtgtatgatgat

SEQ ID NO: 49580 - DNA, 147 bp, Glycine max
  Clone ID: PAT_MRT3847_15779C.1
cccacgcgtccggtcgtcgtgaaggtggttactttcataatggaggggacttaggacgacgagtgcggcacgcgtagagaccgtggttacggaattcatacacgttatcgctacactcagctgggcgtagccacgtggatccgattg

SEQ ID NO: 49581 - DNA, 437 bp, Glycine max
  Clone ID: PAT_MRT3847_1577C.1
ggatgtccgcatgcatattagccgagtaaaatttgttctatactcgatgcagggttttggcaaaacccaaatgtccgccaattggtgttgagtggaattcttcgatcaacaacacaatgaaagggttttctagttcaagccaaactttgtggttgaagaatagcaggccatcatggtactcgatcccaggatgggaagtgggattggtgcaaatttgctgaagcttatcttgaaaagaagaactagtggtaaaatgtttgtgcatggcatcgatgaagatgaagtggggtgtggagagtatcatgcactgaccactggtgggaggaggtattctggataaggcatctgtgacaacattcgtttttccgaacttgtattggatcgtgtagtcgtaacctagtagcttggagagataattttgttgttctagcgtctta

SEQ ID NO: 49582 - DNA, 505 bp, Glycine max
  unsure (1)..(505): unsure at all n locations
  Clone ID: PAT_MRT3847_15780C.1
cacgcgtccggccagcgagtgagcgagcgagcgaggtagggttttcgttgttcccccgtctttgaattcagttcgcgacgatggggtccatccccgatccaggcgagttgagcgagttgactcagcccgtccctccgnctnctcnatcgccnnnaagcttcgacgagttccagcgccaaacttccctcatgaccagctgcaccctcctctggaaggagctctccgaccacttctcctccctcgagcaagacctcaaccacaaatccgaagccctcaaacgcaagattcgcaccctcgacaacactacttccgacacctccctcgacgccacgctccagatcgccctccgcacgctcgacacgcgccgcaccggtgccctctgcgccctcctcaccggcgccgacgacatgatgaacagctgccccggcggggagggggacggacgccaccggactagtgctgagactgagggccttgtgactgcgggtaggcgcgtggagggggc

SEQ ID NO: 49583 - DNA, 161 bp, Glycine max
  Clone ID: PAT_MRT3847_15781C.1
tttttgacatttaaaagattcatacactattagttatagcaatcattacgaagtcaaatcttaaacggccatgtactggactccgaaatacaacttaacacccttaatataccgacaatcatgtttgtactattaagccattcttaataacatttatttta

SEQ ID NO: 49584 - DNA, 292 bp, Glycine max
  Clone ID: PAT_MRT3847_15782C.1
cgtttatttcgcattatgctgactgttgtctgcgtgggtgtttctgatgatagttattgttgacacttctgatttgcatgttcttcatcacacgagtttttcgttgaatttatgcaatcgcagctgaaaataaaaacttgctgattgtgaggatattcaaccactcaattgcaattatgggacacgaatggtgaaagcccgatttgctggggatcgatgctcccagggctgttttacccagcattgttcgtcatccccgtcacacgggagtgatggttgtcatgggccaaaa

SEQ ID NO: 49585 - DNA, 571 bp, Glycine max
  Clone ID: PAT_MRT3847_15783C.1
gtgagcgagccaggtagggttttcggtgttcccctctttgtgttcgttcgcgacgatggggtccatccccgatccaggcgagttgagcgagttgactcagccgagcttcgacgagttccagcgccaaacctctctcatgaccagctgcaccctcctctggaaggagctctccgaccacttctcctccctcgagcaagacctcaatcactaatccgaagccctcaagcgcaagattcacaccctccacgacgctgacgacacctcccccgacggcgaggtcgatgacaccgccggcctcgtcctcaagctcaagtccttctgcctccgcatggacgcgttcggcttcttcgccttcgtcagcgccaagaagaaggagctggacggcctacgcgccgagatgccggtggcgctggcggagtgcgtcgatccggcgaaattcgtgctggaggcgatctcggaggtgtttccggtcgacaagagaggggagaaggccggccacgacttgggctgggcctgcgtccttgtcctggagtcgttaattccggtcgtcgtcgaccccgtcatcggaaaa

SEQ ID NO: 49586 - DNA, 2199 bp, Glycine max
  Clone ID: PAT_MRT3847_15784C.1
gacattgactgaagccagcgagtgagcgagcgagcgaggtagggttttcgttgttcccccgtctttgaattcagttcgcgacgatggggtccatccccgatccaggcgagttgagcgagttgactcagccgagcttcgacgagttccagcgccaaacttccctcatgaccagctgcaccctcctctggaaggagctctccgaccacttctcctccctcgagcaagacctcaaccacaaatccgaagccctcaaacgcaagattcgcaccctcgacaacactacttccgactccctccgcctcctcgatcgccgcgaaacctccctcgacgccacgctccagatcgccctccgcacgctcgacacgcgccgcaccgctgccctctccgccctcctcaccgacgccgacgacatcatcaacagctcccccgacggtgaggtcgacgacaccaccggcctcatcctcaaactcaagtccttctgcctccgcatggacgcattcgggttcttcgccttcgtcagcgccaagaagaaggagctcgacggcctacgcgccgagatgcctgtggctctggcggagtgcgttgatccggcgaaattcgtgctggaggcgatctccgaggtgtttccggtcgacaagagaggggacaaggccggccacgacttgggctgggcctgcgtccttgtcctggagtcgctgattccggtcgtggtcgaccccgtcatcggaaaatcgaggctgttggtgactcctattgtgaaggagcaggccacggagatcgcagagacttggaagaccagcctcgaggagcgcggtggcgtggaaaacgtgaagacccctgacgtccacactttcttgcagcacgtcgttaccttcgggattgtcaagaacgaggactccgatttgtaccggaagcttgttattgcttccgcttggaggaaacagatgccgaagctcgcgctttcgcttggtctcgctcagcaaatgcctgatatgattgaagagttgatcagcaaagggcagcagcttgatgcggttcactttacatatgaagtgggtcttgtggaaaagttccctcctgttcccttgttgaagtcttttctcaaggatgctaagaaagttgcggcttctattttggaagatcctaacaatgcaggccgagctgcgtacctagctgcaaggaaagagcagtctgcactcagggctgtgattaaatgcattgaagaatacaaacttgaggatgagttcccaccagagaatctgaagaagcgacttgaccagttggagaaggtgaagacggtgaagaccgagaaaaggaaaccggttgctgttcctgccaataagagaactcgagcaagcaacagcaatggaggtccaatgccaccagccaaagctgggcgtttgactaatgcatatgtatcatctttccctgctgctcctacatttgtcaggtctccatcacacgggcaatacccagctgctcttccaccttacccttccccaccccacatgtatggcagcagaagtcccccgacaaatccttatgctgcttattcacctgagccggcaccggctattgcagggtcttacccggcagctcccatgaactatcctcctgcatatggtggctatggaaatgttttggctcccacttatcagcaggcttactaccgatagaaatgacaacccttgaagatggtaaccactgatatgacgaccttgatccaatttactttcgcaatgttgtttgtaatcactaaccgtttaacggtagcagttgtgtgtgttaattataactactgtcccacttcctgctctgcatggggagaagttgtatttctaatgttgatcccatagtactaggtgattgtggaaagtaactaggacggccaagaaacatcagaaactcaactaccactgttcggtttagttgtagaaagacttaccgtgtttacattatatgcttatcttgggatcgaactgaaggaaaacaaaaaaagaaagaggtaatctgtttcttggcagctgttgactatggtataaagactacaaaggaaataattttttctgagataaatgtttttctgcattcacaatgccggactatggtatttgttagtactgcattcaaccgtagtatgttgttgcattccctttgtagctttcttccaaagaatagttttaaatcttgttacagtat

SEQ ID NO: 49587 - DNA, 240 bp, Glycine max
  Clone ID: PAT_MRT3847_15785C.1
aggtgtgcctagctaccctacgatggaggatattggagttcgcatagatccatagagaacgcttcttcttacctatgcaggataattcgagatttgctttgcctgtcgggtgaaagatatctcactgcatctgatgcatatctcatacattagatacctcacaaggcaggaccaggactgcagtatgctgagctctatccattggcgaggtctgatcttgagcctagtgcgagccatccg

SEQ ID NO: 49588 - DNA, 1050 bp, Glycine max
  Clone ID: PAT_MRT3847_15786C.1
atttcctatttgtgtcttggaagccctcactcttccctcttttctttctttcatccccaaatcaaaacctaaattcccaccttcaactttctcccccaaatcgaccaccaccactgtcaagcccattcatatatattttattcgtatatatacatacagagagtgagtgagagagagagaagaatggattcggatcaaggcaagcttttcatcggtgggatttcatgggatacgacggaggacaagctcaaggagcatttcggtaactacggcgacgctttgagcacttccatcatgcgggagaagaacactgggaagccaaggggcttcggtttcgtcgtttttgcagatcctaacattctagatagggttttggaagacaaacatgtcatagatggcagaacggtaacgcttctatcattttttttgtcatttctttacttcatgttccgattgaaaatattgtattgtactttttagcgtgattgttgctggttctgaattggggataatcttgaaacccttttttgttttggtttatatcagcgtataatgattagtctcttgactctcatttgtgttgcattgaacgtgcttgggcattaataatggttgacgttggactcataataaaaacattacacatagtttttccactatgtaatttgatgtaccaaattggatttttggtttgtatcctgttggatgatgatgctcaaatccttacaatcagtctagcaaacccactgaaaaggactctaattccccatattctctgtttaagattttgattcaattaaatctgaaagaaattatgagaaaggtttgcagctttttgtaatgccgtttcactttatcatggaccatgtttggatgtcaactctccaataaaaccatttctactacatgttcaatgtaatttaatgaagagactaacttaaagtgagttttgtgtataaagtattttaataaagttgtatccaatggcccaatgatgtaattgccccaagaaataaagttagctagtattgtattcccccttgttaaaag

SEQ ID NO: 49589 - DNA, 372 bp, Glycine max
  Clone ID: PAT_MRT3847_15787C.1
aagggaacgggtttaaaggctccttttttttattcataccgatcacccagcatgcaaacaaacaaggggggatgtgtctgtgacctttataaacatcgcaaaggggtttgtaaatgacctccctaaagcttttgaaaggggatagagcaagtcactttgttttaaaagaaaccaatgactttttcaggggggggatcaaaaccaatgttataaaaacatggccttgttggaagccctggcatcgtactcattggtcccacttaagggaaaataaatcccgggcccatactagctttaacatcccttaggggcaaaaaaaacccacttggggcttcctttgctgcaacattggctgaaaaaaaatactgtgtc

SEQ ID NO: 49590 - DNA, 565 bp, Glycine max
  Clone ID: PAT_MRT3847_15788C.1
acggcccgccctttttttttttttttattctttttgaacgtacaagagaacgcttacgggaaaagaaaccattcctttgtacaaattatgcttgttaagccgctcctaattacaactcggggggagggacccttcataaaagaaaatcaaaatgacatttcctccgtcctcaaaagagtctgcctcccaaaaaaaagaatggtattttaccttaaacactactaacatagggcacgggcgaaatttagttaacacccaaatcaggccttttttattatttgggggggaaacaatatttctttacacaagacacgcttgtgacatttacatgcccgggccgattaactgacctttttttcaaaccgtcaccgcataaaattttataacttcctttaaagtcaacctttaagcatccagaattacttttttccgggggggcttattttgaaggaggggtcatcttctgggggtaggtttatttgtggaaccgaatcccaatatcaaaaacacccctggcccgtgaggggggttgtcaaagccacgaccgggatgccgcaattttgcc

SEQ ID NO: 49591 - DNA, 332 bp, Glycine max
  unsure (1)..(332): unsure at all n locations
  Clone ID: PAT_MRT3847_15789C.1
atatccggcaaaacgtgagaaccagagccaattacaccatcacanaactgattttccctaatattccaaaagtgacatccaaaacattttgactgcccataattatcctttaaacataaaatttaaattttctccaaacccaacccagataaccttaaatagtgaaaccacatttatcatcttcttccaaaaacttaaataccaaaaaacaaaaagcctaaactttaaatacatcaattcacttaatcttctaccttgataatctgaacgtacggatgcattaccaactttttggcaaacaactactctatcgttttactttataactccta

SEQ ID NO: 49592 - DNA, 276 bp, Glycine max
  unsure (1)..(276): unsure at all n locations
  Clone ID: PAT_MRT3847_1578C.1
ccgacttttacattaattgcacaataattcgccgatagattgatgtctaaaaaaaacaatcataacttactatatacagttatacacctttttcattanttctgtaacataattttccaactgatgttgatgcngatgtgtttngtttcttntcttttctttaaataaccttgcagcttcgctttaaaaaatttatanattaattaattgttttattaaaaaaatggcgnttaactttccatgcaggcgtaggggnttgtcattagcttcataatg

SEQ ID NO: 49593 - DNA, 2070 bp, Glycine max
  Clone ID: PAT_MRT3847_15790C.1
ggtccggaaattcccggggcgacccacgcgtccgttggaagccctcactcttccctcttttctttctttcatccccaaatcaaaacctaaattcccaccttcaactttctcccccaaatcgaccaccaccactgtcaagcccattcatttatattttattcgtatatatacatacagagagtgagtgagagagagagtgggaagaatggattcggatcaaggcaagcttttcatcggtgggatttcatgggatacgacggaggacaagctcaaggagcatttcggtaactacggcgacgttttgagcacttccgtcatgcgggagaagaacactgggaagccaaggggctttggtttcgtcgtttttgcggatcctaacattctagatagggttttggaagacaaacatgtcatagacggcagaacggttgatgccaaaaaggccttctcaagagaggatcaacaaatttctgtcacttccagaggtggaaattccaattctggcatgaattctgaaaatggaggaaacatcaggactaaaaagatatttgttggagggttgcctcccaccctgactgaagaaaaatttcgtctgtactttgagtcttatggtggtttttataatgtcacagacagtgagtcactgacagtgtttgtgtgtgtctaagagagagagagatggcatcgttttgtgctgcaaggactttcaacattccggcgatgaacgccggcgttcttcgccgccgggcatcgtgggccgccggaatagtcggagcctcggtggccggcgctgcacttttgcgctcttgttcgtctaagcgctctgcgccattcgcttgcatgagcctctctactgatacccggttaaaggaagctgttcaaactgaaaaagccccagcggcattggggccatattctcaagcaatcaaagccaacaaccttctgtttgtgtcaggtgttcttggccttattcctgagacagggaagttcatctctgataatgttgaagatcagacagagcaggttctaaaaaatatgggagagatcctaaaatctgggggtgccagctattcatcagttgttaagacaactatttttgttggctgacttgaaggacttcaagaaagttaatgagatctatgctaaatacttcccttcacctcccccggctcggtcaacctatcaagtagctggcttgccaatggatgccaagattgaaattgagtgcatagccgcactttgagcaccattctaatagtatatatgagtcttcaacaaactcaggtaaataatacgggagggacatatccaaccaaattggattgtttgtatcttgttggatgatgatgctcatgtccgtacaacgtccgagcgaacccactgaaaaggactccaattcccatattctctgtttaagattttgattcaattaaatctgaaagaaattatgagaaaggtttgcagctttttgtaatgccgtttcactttatcatggaccatgtttggatgtcaactctccaataaaaccatttctactacatgtttcaatgtaatttaatgaagagactaaaaaaaaaaaaaaaaaaaaaaaaaaaaaaaaaaaaaaaaaaaaaaaaaaaaaaaaaaaaaaaaaaaaaaaaaaaaaaaaaaaaaaaaaaaaaaaagaaaaaaaaaaaaaaaaaaaaaaaaaaaaaaaaaaaaaaaaaaaaaaagggggggcccctttaaaagaaccaaatttaactaccgggggttgggaaggtaaaattttttttttggggcccccaaattaaattcccggggcggggttttaaaaacgggggaaggggaaaaccctgggggtccccaaattaaatgccttggaaaaaaacccccttttcccaagggggggaaaaaaaaaaaagccccccccaaaccccctttccaaaaattggccccccctaatgggaaaagggaccccccctttaaggggccattaaaccggggggggggggggggttaccccccaagggaacccgttactttgccagggcccttagccccggtctttttggttttttcccttccttt

SEQ ID NO: 49594 - DNA, 391 bp, Glycine max
  unsure (1)..(391): unsure at all n locations
  Clone ID: PAT_MRT3847_15791C.1
tggtataatcatccttttatatttcggggaaggaggnnntggggggatgcctcattatacaaaagctgttgggcttaacccaatattctaactacatcaccttctggcgataaattaacataacaatgaaatggttcactcattnccatcactgatcattatatacgcctctgaacttttgttttgcttcctaaaaagcctgcatcttttgtttctttcgtgctttttttgtaaccttggacatcttagatttggcttttactttaagagcttttctatcaaccttatcctctcgttcaagttctctttccctagcatccaaattcttctctaaataaataatcaaatcacctgcataatcctgtatggctccatttctaattcctatcac

SEQ ID NO: 49595 - DNA, 2393 bp, Glycine max
  Clone ID: PAT_MRT3847_15792C.1
ggttctggtccggattcccgggtcgacccacgcgtccgaagccagcgagtgagtgagcgagccaggtagggttttcggtgttcccctctttgtgttcgttcgcgacgatggggtccatccccgatccaggcgagttgagcgagttgactcagccgagcttcgacgagttccagcgccaaacctctctcatgaccagctgcaccctcctctggaaggagctctccgaccacttctcctccctcgagcaagacctcaaccacaaatccgaagccctcaagcgcaagattcacaccctcgacaactccacctcggactccctccgcctcctcgaccaccgcgaaacctctctcgacgccactctccagatcgccctccgcacgctcgacacgcgccgcaccgctgctctctccgccctcctccacgacgctgacgacacctcccccgacggcgaggtcgatgacaccgccggcctcgtcctcaagctcaagtccttctgcctccgcatggacgcgttcggcttcttcgccttcgtcagcgccaagaagaaggagctggacggcctacgcgccgagatgccggtggcgctggcggagtgcgtcgatccggcgaaattcgtgctggaggcgatctcggaggtgtttccggtcgacaagagaggggagaaggccggccacgacttgggctgggcctgcgtccttgtcctggagtcgttaattccggtcgtcgtcgaccccgtcatcggaaaatcgaggttgttggttacccctaccgtgaaggagcatgccacggagatcgcggagacttggaagagcagcctggaggatcgtggcggcgtggaaaacctgaagacacctgacgtccacactttcttgcagcacgttgttaccttcgggattgtcaagaacgatgactccgatttgtaccggaagcttgttattgcttccgcttggaggaaacagatgccgaagctcgcgctttcgcttggtctcgctcagcaaatgcctgatatgattgaagagttgatcagcaaagggcagcagcttgatgcggttcactttacctatgaagtgggtctggtggaaaagttccctcctgttcccttgttgaagtcttttctcaaggatgctaagaaagttgcggcttctattttggaagatcctaataatgcaggccgagctgcgtacctagctgcaaggaaagagcagtctgcactcagggctgtgattaaatgcattgaagaatacaaacttgaggatgagttccctccagaaaatctgaagaagcgacttgaccagttagagaaggtgaagatggtgaagaccgagaaaaggaaaccagtggcagttcctgccaataagagaactagagcaagcaacggcaatggaggtccaatgccaccagccaaagctgggcgtttgactaatgcgtatgtatcatctttccctgctgctcctacatttgtcaggtctccatcacacgggcaatacccagctgctcttccaccatacccttccccaccccacatgtacggcagcagaagtcccccagcaaatccttatgctgcttattcacccgagccggcaccagctattgcagggtcttacccggcagctcccatgaactatcctcatgcatatggcggctatggaaatgttttggctcccacttatcagcaggcttactaccgatagaaatgacaacctttgaagatggtaaccactgatatgacgaccttgatccaatttacttttgcaatgttgtttgtaatcactaaccgtttaacggtagcagttctgtgtgttaattataactactgtcccacttcctgctcggcatggggagaagttgtatttctaatgttgatcccatagtactaggtgattgtggaaagtaactaggacggccaagaaacatcagaaactcaactaccactgttcggtttagttgtagaaagacttactgtgtttacattatatgcttatcttgggatcgaattgaaggaaaacaaaaagagaaaaaaaggtaatctgtttcttggcagctgttgactatggtataaagaccataaaggaaataattttgtctgagataaaaaaaaaaaaaaaaaaaaaaaaaaaaaaaaaaaaaaaaaaaaaaaaaaaaaaaaaaaaaaaaaaaaaaaaaaaaaaaaaaaaaaaaaaaaaaaaaaaaaaaaaaaaaaaaaaaaaaaaaaaaagggggggcccctttaaaagaaccaaattttacaacccgggggtggaaaggaaatattttttttaaggggcccccaaaataaattcccggggccgggttttaaaagggggggggggggaaaacccggggggtccccaaattaattggcttggaaaaaatcccccttttccccggggggg

SEQ ID NO: 49596 - DNA, 294 bp, Glycine max
  Clone ID: PAT_MRT3847_15793C.1
tccaagacctactactacctctacatccatttttagctccaaccgacaccccaaaagtatacgggttttatatccctactcttcgaatactacctatcgtctacgaaccgtttcactacactcgacacgctcccgcggcaaaaaaccgcccacgactccaaagatcgccacatctaaataaaaaccacaaaccctttctcacgcctcccccaaaccgccggacccccagaaagccaccgccctcagccacccgcacccgtaaaacccaatactatagcaaccaccaaccgcccc

SEQ ID NO: 49597 - DNA, 152 bp, Glycine max
  unsure (1)..(152): unsure at all n locations
  Clone ID: PAT_MRT3847_15794C.1
aaacatacatgatctatctgtttcccctcccacagcattctctttgcagaggcagatcaacattttaaaaataatnttntcattcaccattaacatctcctttaacatcatcacttacaagaacctcacaatttttatttactantatattt

SEQ ID NO: 49598 - DNA, 140 bp, Glycine max
  Clone ID: PAT_MRT3847_15795C.1
acgcgtacgtccgcttggatttccggtcgaggaactgtctaagatgtttcgaatgttgatttcaacaatggaagagacataagctggggtgtctacactggctggttccaatggatccataccgatgttgttaatgccaa

SEQ ID NO: 49599 - DNA, 475 bp, Glycine max
  Clone ID: PAT_MRT3847_15796C.1
gagggtgcctaaatcagtggaggataagttggtgagattacaatgtagattcctatgagaaaaaggacccgaccaacacaaaatcgcatgggtcagctgggagtcagtgtgtctgccaaaagagaagggaggtttgggtataaaggacatcaacagcttcaatatggcattacttggaaaatgggagtggaatcttatgcaacacaaaggggagctatgggctaaggtgttggaatcaaaatacaaaggttggtgaggtttggctgaagtggatagggtggaccacaaatccatttggtggagagacttacaaaaggctcttttcagctcacataaaggacagtttattcaaaagggattgaagtggaaggtgggaagcggagatcaaatcaaattctgggaggataagtggaccggggaggaggaatctttggctgagaaataccctagactctatttaatatcactacaacag

SEQ ID NO: 49600 - DNA, 263 bp, Glycine max
  Clone ID: PAT_MRT3847_15797C.1
atccgttattcgtggacggtttttaagtagacttgtggcatggttatgaagcaaagcaaattgtttatttattactaccattactgggatgacgtttgaggaaatgagataaaacacagcgtaacgccccctggtgaatcgagaccgtggaaattaataagtagagagaaaaaaaaagttgcaaaatccacagtacccacccacccacggaccccttccattcaattgattgattccccggtagtaagaatgaagagaaggcg

SEQ ID NO: 49601 - DNA, 563 bp, Glycine max
  Clone ID: PAT_MRT3847_15798C.1
tacggctgcgagaagacgacagaaggggagctcgataaaaaaaagcgcgagaagacgacaggaggctgaagattgaagaacagtcgtcggctcctcgctcgcccttcgctgctgcgccatcaccgtgcccttctcaaagcgattttaacctaaccgcgttctttttttcttcagaaatcgagcataaggatttgaggattgaagtattgaacaccaaatcctttatacttgttgggcaagaagggagggaaaaaggagaaacacaaaaatgtttttccacatagtgctggagcgaaatatgcagctgcatccacgctactttggtcgcaaccttcgtgataatctcgtttccaagctaatgaaagatgtggaaggcacttgcagcggccgacatggatttgtggtggcagttacagggatagaaaacatagggaaagggctaattcgtgatggaacaaggtttgtgacattttcggttaagtaccaatgtgttgtcttcagaccatttaagggagagatcctgaagctgttgttactatggtgaacagatgggattttttgct

SEQ ID NO: 49602 - DNA, 1141 bp, Glycine max
  unsure (1)..(1141): unsure at all n locations
  Clone ID: PAT_MRT3847_15799C.1
ggcgacatccgctaggggcgagtcggcgagagtgaagattgaagaacagtcgtcggctcctcgctcgcccttcgctgctgcgccatcaccgtgcccttctcaaagcgattttaacctaaccgcgttctttttttcttcagaaatcgagcataaggatttgaggattgaagtattgaacaccaaatcctatacatcgaagaacagcactctggttgccgtgccaccatcttctccaaagttatcatattcgaagagaaaaaaggagtgactgtccaggttgggcaattagggacggaaaaggagaaacacgaaaatgtttttccacatagtactggagcgaaatatgcagcttcatccacgctactttggtcgtaaccttcgcgataatctcgtttccaagcttatgaaagacgtggaaggcacttgcagtggccgacatggatttgtggtggcagttacagggatagagaacatagggaaagggctaattcgtgatggaacagggtttgtgacatttccagttaagtaccaatgtgttgtcttcagaccgtttaagggagagatcttggaagcagttgttactatggtgaacaagatgggattttttgctgaagctggacctgtccaaatctttgtttcaaaccatttgattccggatgatatggagttccagtctggagacatgccaaattacactacatcagatggatcagttaagattcaaaaagatagtgaagtgagactaaagataattgggactcgagtggatgctacagaaattttctgcataggtaccataaaagatgatttcttgggtgtgatcaacgaccctgcaacagtttaaatacccctttctgtactattgtatcgtatatagtttgcatgacttggatttttacaccttaatccgattcagatattatgttttcttactcgattgttgaaagtactaagtcgttgagtttttagttccagaatcaattttcaatcccacaagtaattttgggaaatgccatcaagcaagatgagctgtactattccaataaaattgttagttgcctgtccatttccaaagctgtcgacgtggtatggttgaggctgctaccagctaccatgaggggattataaatntacgcccatg

SEQ ID NO: 49603 - DNA, 551 bp, Glycine max
  Clone ID: PAT_MRT3847_1579C.1
catcaaacaggtgaaagacatgctataggtgtctaataacaacacaaaaagcccacattaccaaaagaccgaattatccaaaaaaaaagttaattttagtcacaaaaggcccacattttgtgactaaaattaattttagtcacaaaaagaccttcggcttctagtatcccataaacttccatccatcctttgggccaattaggagactactctgtccgggaaaacaatttttcttattttcttcctttacaagtcttcaccgaaaaatttacccgaatagaagtttacctcttcaagccagtcttggtcgagcttatcgcccattcgaagtgcagctaaaatggtgatgcggaggagaaaggacggtagcacaatggcaaagaggatgcagctggtgctggggcccgtacgagccgccatcgcccagcctcactgggagagttgaagaagaagggtggggccctcaaggaagcgaatgcggagggataagagattggattggagccgcagaacaaggtcgccatcgctatatggtatttgcggacgcgtgg

SEQ ID NO: 49604 - DNA, 954 bp, Glycine max
  unsure (1)..(954): unsure at all n locations
  Clone ID: PAT_MRT3847_157C.1
tgacggtggtcaactgaccgaggcagttcggcgtcgaccctacactgttgtactctttgatgagattgagaaagcccatcctgatgtattcaacacgaaagcatagccaaaaccttacttagaagtctctgagcattggcggcggcgaagaagagagcgtcgacggcgagaatgaaggcaaagaaggttcttgctggtgatgccatggctatcttgaagcattgaattcgttaatttcgttgggtttgtacaaaattgattcgttttatatacagagcccacgcgtccggctggctgcgagaagccgacagcaatcgatactccttaattcttacaatttattatctttctctaagaactcttccaattttttctctctcttcctctttagcttcatcgccatggcatcaccagcaagaaccttctttgccttcattctcgccgtcgtcgctctcttcttcgccgccgccaatgctcaagacctctccccggctccgagtcccgatgccggagcggcgggatccgtttcgagctccgtcgccatgatcggagcttcggttgtgctgtcattgatggctatcttgaagcattgaattcgttaatttcgttgggtttgtacaaaattgattcgttttatatacagagtggtgattatgagctttggtatctatacttataggtataccggagagagattatacagtatttaatatacttattgttatttgttttaggacttagggagaataagaaggattttatcctttacattggacccgtattctttttcaatttttgttatgtaataatatattgtgattgatgatttatatatatgtttttccatttttaataaattttttaattaatttcgttataggaaaaaaaaaaaaaaaaataaaaaaaaaacacgacccggattctattaacatntatcgttatgcataaaatata

SEQ ID NO: 49605 - DNA, 330 bp, Glycine max
  Clone ID: PAT_MRT3847_15800C.1
ttccaggaaggtttcccgtcatcactgtatgacgtcctccttctttggggggggggggggggggggggggggggggaaaaaggtgggtgctgggagccaactatttacgtaaggtaacctcaaaattccgtgggaaaagagcttccggggtagtgatagcaaggcaacacgctacgtatcttgttgcaataggccaggccacgatcgtaggcgctatagccttgaggtaggcgacctgcaggcttatgcagaggccactttattagggcagtatagatgtatgtgagggtagttatgccttaacctgtaggtcccgatcccagttgggac

SEQ ID NO: 49606 - DNA, 491 bp, Glycine max
  unsure (1)..(491): unsure at all n locations
  Clone ID: PAT_MRT3847_15801C.1
tngtcgtctgcgagagaccacagaaggggagggaaacatttacatttactttttctcaaggagacgagtgagacttaaatttgcaaccagtcacatgcaagaccctgtattgttctactcgacaaaccccttggggttattaagggtctctttctaatgaagtttttggataaaaaattggagcagatggggttgaatcaattaggccataaagatgttcctgagccaacatcaacatgaagtgctaatgcagtgactggccttagcacttcaggtgtggcttttactgcattgatgcgagcttcttgcaattgatttaggaaaaaaatgtcaagcattaatttcggttaaagtattgatttgcaagatgaattagggttaaattagactgattaggaaatttcttacccggcttctgtttttgtttttttaaatgttcattgaatctctttggtgctggttctcgccgttgattcataaccatgaatgat

SEQ ID NO: 49607 - DNA, 277 bp, Glycine max
  Clone ID: PAT_MRT3847_15802C.1
gaccatgagaatttttatatttaaaataagacggcccccctcggagatgaacccaatccgcacaacgggacacgcactgtcactaccatccatcaacactctgcacctcacaatgatatagttaaggaaactcaatgcatcgacgaacactccattctggggacgccaaccgatgactcttagacccatatcacccaccttgcttagaacgaaactaccgtactgtatcaccctagataaagcaaaatccttatgaatgaataccgctaccacaaag

SEQ ID NO: 49608 - DNA, 265 bp, Glycine max
  Clone ID: PAT_MRT3847_15803C.1
ccttaattataactttcagaccatttataagcctggggagcaaacaccttcacaattaccactttaacataaacaccatactatcaaataaaaaaaacccaatgactatccatcttcgatatttaataacactgtctatctattaaaatccttttttatcatttacatgtctggcactccctactactataaacacgaatggttttacactcttatttttaacaattccaataccatcaacttcgatcaatttcacaattttttt

SEQ ID NO: 49609 - DNA, 575 bp, Glycine max
  Clone ID: PAT_MRT3847_15804C.1
tgtacatgtctaaatgaagttaaccgattttcagcaaacactgcaactgaggtgttgtgactgcatgatgagtgatgttctataatttttatccttggtattgctgtcattaggtaaaagctcggtctagccagcaacatcagaagtttcctttagttgaggtagtgacaagatgaggcagctgatcaaatgaacgtgaggaggccatatcaaataataataaaaataagatttataataataagtcattcatcacaactttttgttatgcatagaaatactccaacaaagaagaatttaaacataaatgaatacacatgtgaatttgagtctggatagcaaattcatcttcaccttttattccaggggttttaccctagtgaatgcactggaaacctttcaatatgttctataattttacatatgatattgtacattaatttggttgatgagtatattaatttatttgaaagcatatatataacttccactcagatattaagtatatttggtaatgcaagacatttttactttttatattgatataaaaaaacttctaaattgcagtttgatct

SEQ ID NO: 49610 - DNA, 277 bp, Glycine max
  unsure (1)..(277): unsure at all n locations
  Clone ID: PAT_MRT3847_15805C.1
tcaatgcnagaattgganganntaatgtggagctcatcaatangctaccanactttgagggtgaaggttcancttatgttcataggggctgatctcaancatccagcttcccgggacatcaaangnccatcaattgctnctgtagttgccactnttaattggcctgcngcaaatcgctaagcagcacgngtatnngcncnangtnntcgngttnagaaaanntgacnttcgggagaattgctatgacnntnattcgtattacgatnggctgaacaca

SEQ ID NO: 49611 - DNA, 369 bp, Glycine max
  Clone ID: PAT_MRT3847_15806C.1
cgggactttcattcgtccgtttcggatattcacagacaccgacacaaatcagcctgtgtaagctttgaactaaatatggcggacttgccggaatggccaaagcaagatatgaaacgaatgtcttatgttccctaccgtgttggtgaccttgattgtaccattaatgatatacacagaatgtttatgaatgaagcctttcgagtgcttagagaactttccacaggagaaatatgctaatgctttccttggatttggccctgacaaatcccatcttgcttgtcgaatatacaaatatattattgggctacctcgcatgacatccgcgactgcttttgacattttgcaattgctaactcagacaattataaa

SEQ ID NO: 49612 - DNA, 763 bp, Glycine max
  Clone ID: PAT_MRT3847_15807C.1
ccggtccggattcccgggtcgacccacgcgtccgatttgaacgtaaatcatttagagaaagatattaaattgaaattaaccagaaggaccagaaggttgtacgttcaaaattgcaaaacttgccttgttacttcttggtgccactttgtcaaattgggcacagtgtaaatgactattttgttcatgaatgtgtaaaacccagtgaggtcgcaccgccgtcgcagagtcgcaggaccaccaggccccgtcgaacgccgctctaggccgcgtcgaacatcgcaggtccccaccggagccgtcgaaggcattgcggcaggccgccgtcgtcgtccctttgaggctttgacccagtttcaaaagcccttaaagtatttcttccctttcgtaagacacttctcagttctctctttctcctctttcgcacattgcttctgacccgtttgcaaccgccggacgttcacgctgcaccaccgctgctgctgtacgccaccgtcgccgattgcgcctctgttttgcctcttttgtgtgttagtggtttgttctttgttctcttcaatcggtttgttctcacagccttgatcaatggaaggcaagacaaggggttgttcttcaagtgaagatagtgatggtgagatctatttgcaaaatgcaagtgatgaagaggagcttggctcttcatctggttctatgcccaagttgcagttcaagaacgtgaaatccaaaggctgttggaatgaagaaatgggaatgggagaagtcattg

SEQ ID NO: 49613 - DNA, 264 bp, Glycine max
  unsure (1)..(264): unsure at all n locations
  Clone ID: PAT_MRT3847_15808C.1
caaagtgaggcctctcaaaaaacanacaacagtnacatcaaaatgccccttctccttcntcttattctctnnataccccanccccacttgcttagcttcannnnnnnnnnnnnnnnnnnnnnnnaacaattacttgcaagtcttgagttttctcctccctgttctctggttttggaattgagacaggctttatttataattttaaaaacttgtttccctccctcccttatttttgggttttntcaattgttcttgtcatcttgt

SEQ ID NO: 49614 - DNA, 450 bp, Glycine max
  Clone ID: PAT_MRT3847_15809C.1
aattcggctcgagtacggctgcgagaagacgacagaagggcaattcccttatgttatcaaacataaaaagggaaaaggtaatattgtagccgatgctctttcttggcgtcatgcattactttctatgcttgaaacaaaattgattggtcttgaatgtttgaaaagcatgtatgaaaatgatgaaaattttggagaaatttttaaaaattgtgaaaaattttcagaaaatggtttctttagacatgaaggctttcttttcaaagaaaacaaattgtgtgtgcctaaatgttctactagaaatttgcttgtttgtgaagcacatgaaggaggtttaatggggcattttggggtccaaaagactctagaaacattacaagaacatttttattggccttatatgaaaaaggatgtgcagaaattttgtgaacattgcattgtatgtaaaaaggc

SEQ ID NO: 49615 - DNA, 175 bp, Glycine max
  unsure (1)..(175): unsure at all n locations
  Clone ID: PAT_MRT3847_1580C.1
tttttaaaaaaattttttaanatacattatgaaacaatatgctgtcacttttgcaaggtcgaaaccacacatatcacaaatgggatgcttctttcgcttgatcacaaactgaggcacacctttattaaaggagggctaaacttgactattttattcactatacaatggtaatttt

SEQ ID NO: 49616 - DNA, 844 bp, Glycine max
  Clone ID: PAT_MRT3847_15810C.1
gtaagatatacatcacttttattaaacctttcatttttgttgtagttcaaatactctgtttgtttagctaatacactgtatttacataaactatttgtgtttagttggtcttgccttgactactgatacttattagaaggcaaatataggagtcactcacttttgtgcctgattgtgcacatagttggttatctttttcaagtgcaggaaaagaatagaaatgctaacatttgctgagtgatctttgtaaatcttgccaggtaagtctgttgcttgagtcatcctacttccaatcactcctctttttaagtcatatctgaactcttgctgctatgcatgataagctagagctagagtgaggaaccatcatccatctaatttaaatgtcagctatgtcattttttctcccttgtgtatgtacactacttcctttttccctcatatattttcttgtgtcaatgaagagaggcatcctatgagcttggtttcaagtgattgaacttattggggctcatggtatttgttatggttaaggagtatatgagtggcaactgtttagtattttacaggctagtttctgccaatttatggtgaattcccaagccttgatgatctgaagcatatatttcctcctctccttcagaaataattgccagtggcgattctcctcatttggccaaattgtattgtggctggtagtcatgcttctctttttgtgcatgcctgttcatggcgttctagttcacctgggctgtagccttcatctatcatgcaattttgggtggtatttggaacactaacatagatagtatagctcatgctctggacatgaagtttcaagcta

SEQ ID NO: 49617 - DNA, 179 bp, Glycine max
  Clone ID: PAT_MRT3847_15811C.1
acccctgcctcatagccggagcttctgccccagagtcacatttcttgctatcgcagatcaatccttcatggcccacatagcccttgccctttgaactcattctaccttccttaaaaacacggcgtccgcaaattcacatcactcattcccttgcattacacgccacacagcaatgggca

SEQ ID NO: 49618 - DNA, 557 bp, Glycine max
  Clone ID: PAT_MRT3847_15812C.1
gatcaacctcatctgtcattgataaaaaagactcttattaaggtaaagatttttttgttgtcctatgcttatgttgataattatagggggtgttctcggatcggttttggtcaaattcaagatccaacccaactaaatttgatcggtttggtttttataatttttttttaaactaaacccaactcaaaccattcatgaacggtttgattcggtttaaatcaaaaggttaccaatttaaatttgatttttttttcttagaactattattttatattataattcatccaaatattcaatacaattaacacaatagtatgaaatgtctgaaagtaataaaattgattcatttaatatcattaacataatattctaaaatagactaatacaaattaaaataaaatattcttcaacgaaatttactataatagtttgaatcataattatttccaacaaattaatttattgtaataagttttgttgcaaccaaatttgtgacaactagatttgtttcaatcaaatttgctaaaataaataaataaaatatgatcaattaatat

SEQ ID NO: 49619 - DNA, 549 bp, Glycine max
  Clone ID: PAT_MRT3847_15813C.1
caattttagaagttactccatgtcatcattaccgcaaaccatgagcactccatctgctcctgtcaaagcagttagttctaagccaaattttgaccttaaggattgggatcaaatctcatctcagaaatatttttggaaaaagatggggtttgaaggacttctatctttccgaggtgtttcactggaacaagagagatttcatgtttgttgtggattagaaggcctatatacaccaggaagaaggtggagaaggaaacttaaaataatacagccattagacattcattcttttgctgctgacgtcaattcagatgatcttctgtgtgttcagataaagaatgttgctcctatacatgctccagacattgtgatatttatagataccataactattgttcttgaggagtttacaaaaaatggatcactgtcgtcattgccgatttcatgtattgaagctggaaatgatcattctttaccaaatctagctctcaggagaggtgaagagcattcttttattcttaaaccagcaacttctatatggaagggtca

SEQ ID NO: 49620 - DNA, 608 bp, Glycine max
  Clone ID: PAT_MRT3847_15814C.1
gtccttaccgaaaactagaggccagggtctcggagtgtttgggtttgtttatcttaaacaccacaaacacagaacagaggtgtagagaagaaagctaaaaaatatggcggcagagtcatcactgagggtggcgactcccactctttgcaacctcaatgggtctcagagacgaccaaccaccaccactctctctccgcttcgcttcatgggttttcgtcctcgaccctcctctcactctctcacctcctcttccctttcacacttcttcgggagcacaagaattcactccaattcttcttcttcttattcttccatttcacgccaacatgctccgagaagaaacttctctgttttcgccatgtctgctgatgacgcaaagcgcagtgttccattgaaggattatcgcaacatcggtatcatggctcacatagatgctggaaagactactacaacagaacgaattttgttctatactggaaggaactacaaaattggagaggtgcatgagggaacagcaaccatggactgtatggaacaagaacaagagagggggattaccattacttctgctgcaaccactacattttggaacaagcaccggatcaaca

SEQ ID NO: 49621 - DNA, 2753 bp, Glycine max
  Clone ID: PAT_MRT3847_15815C.1
gtccttaccgaaaactagaggccagggtctgtagtgtgcgggtgggtttgtttatctcaaacacagaacagaggtgtagagaagaaagctctcaaaagtatggcggcggagtcatcactgagggtggcgactcccactatttgcaacctcaatggttctcagagaagaccaaccactctctctccgcttcgcttcatgggttttagccctcgaccctctcactctctcacttcctcttccctttcacacttcttcgggagcacaagaattaactccaattcttcctccatttcacgccaacatgctccaagaagaaacttttccgttttcgccatgtccggcgatgatgcaaagcggagtgttccattgaaggattaccgcaacatcggcatcatggctcacatagatgctggaaagactactacaacggaacgcattttgtactatactggaaggaactacaaaattggagaggtgcatgagggaacagcaactatggactggatggaacaagaacaagagagggggattaccattacttctgctgcaaccactacattctggaacaagcaccggatcaacattattgatactcctggtcacgttgacttcaccttagaagtggagcgtgctcttagggtgttggatggagctatatgcttgtttgacagtgttgctggtgtggagccacaatcagaaactgtgtggaggcaggctgataaatacggtgtcccgcgaatttgttttgtcaataaaatggaccgtcttggagcaaacttttatcgaacaagagacatgatagtaacgaatttgggtgctaaaccacttgtaattcagttaccaattggttcagaggataactttaagggagttatagaccttgttaggaataaggctatagtttggtctggagaagagctgggtgccaagtttgatattgtagatgttccagaagatcttcaagagcaggctcaggaataccgagcccagatgatagaaaccatagttgagttcgatgaccaggctatggagaactacctggaaggaattgaaccggatgaagaaactataaaaaaattaataaggaagggaaccatatcagccagttttgtgccagtgatgtgtggctcagctttcaaaaacaagggagtccaaccattgctcgatgcggtagtggattatctaccatcaccacttgacttgccagcaatgaagggcagtgaccctgaaaacccagaagaaacaatagagagggtagcaagtgatgatgaaccatttgctggactggcttttaagatcatgagtgatccatttgtaggctcccttacgtttgtcagggtgtatgctgggaagctaagtgctgggtcttacgtactcaatgcaaacaaagggaaaaaggagagaattggtagacttttagaaatgcatgcaaacagcagagaggatgttaaagtagctttagctggtgatattattgcacttgcaggtttgaaagatactattacaggtgaaacattgtgtgaccctgataatccaattgtgcttgagcggatggacttcccagatcctgttattaaggttgctattgaaccaaaaactaaagctgatgttgacaagatggcaactggtttaatcaagcttgcacaggaagacccttctttccacttctcccgtgatgaagagataaaccagacagtgattgaaggaatgggagaattacatcttgaaatcattgttgatcggcttaaaagagaatttaaggtggaagctaatgttggtgccccccaagtaaactacagggaaagcatttccaaaactgcagaagtgaagtatgtgcacaagaaacaatcaggtggacaaggtcagtttgcagatatcaccgtccggtttgaacccatggacccaggtagtggatatgagttcaagagtgaaatcaaaggaggtgctgtaccaaaggaatacattcctggtgtgatgaaaggattggaagagtgtatgagcaatggtgtgcttgctggctttccggtcgttgatgtacgagcagtactcacagatggttcttaccacgatgtagattcaagtgtgttggctttccagttggcagcaagaggagcttttagggaaggaataagaaaagctggaccaaggatgcttgagcctataatgaaggttgaagttgttactcctgaagaacatctaggtgatgtaattggtgatctcaactcaagaagaggacagatcaacagttttggtgacaaacctggtggccttaaggtggttgatgccctggtacctcttgctgagatgttccagtatgtcagcacactcagagggatgacaaagggccgtgcatcctacacaatgcaattagccatgtttgatgtggtgcctcagcacattcagaaccaacttgccacaaaagagcaagaagttgccgcttaatgtatttgcttggtctcctaacaaggaactttttacctttgatagttgtattatgtccattgtcaaatagttgggtttgtttttggtattttttttattgtaattttccctttaccgatacaaggttagccaacaaaagaattttcagaagaaaaataggaaacgatttttcttcccaagttggagataataatgcatttttgttttagggggaaggcgcggaaacttggatttacaaaataatattgagaaccaaaaattatttacctatctttagtttttaatacaatatttgtccacatgatgatgtt

SEQ ID NO: 49622 - DNA, 454 bp, Glycine max
  unsure (1)..(454): unsure at all n locations
  Clone ID: PAT_MRT3847_15816C.1
cgaaaaaaacaacaaaaggggtcttctctgcttaattgactctatttctgtagcgggtagagtcttagcgcagcgatttctagatgaacggaagataggcaaggaaattgttcacatcaagattgaggctattggccatgttgactctacaaagtccactcccactgggcgcctgatctacaagctcggcagcattgacaagcgtgctattgtgagatatcagaatgaagctgctcagatgaacaagaggtatttcacgtatgcctggatgcttgataagattaaggccgagcgtgaaagaggaatcacaatctatattgccttgtggaagtttgaaaacaccaagtactattgcacacgcatcgatgcccctggacacagggatttgatcaagaacatgatcagtgggacataccaagctgactgngctggatttattatttgttccactact

SEQ ID NO: 49623 - DNA, 291 bp, Glycine max
  Clone ID: PAT_MRT3847_15817C.1
cacgcgtcaagcaacgcgtccgcccacgcgtccgataaaatcgaagtcccttaggtcttcatcttctgttctgatccatgtatggcttcataacgcatcttgaacgatctcaaggatttgcaaaacgatcctcctacctcatgctgtgcaggccctatggctgaggacatgtctcactggcaagccacaatcatgggacctgctgatcacccataatcatgtggtgtattcctagtttcaattcattttcctcctgatcatcccttcaagccaaccaaagttgcttttccg

SEQ ID NO: 49624 - DNA, 224 bp, Glycine max
  Clone ID: PAT_MRT3847_15818C.1
atcttaaaattgtgagaaattaggattacccaatttgcacatgtatttacatatttaaagaaaaaattatacccaataaaagtttaaaacaatatcgttttgaccacattacacgaatttttattattaaatgggacgaccatctttcttgtgtttataacacttactattcctaaattacaccatttattttttatcaaatacttaaatgttaaaacaatttc

SEQ ID NO: 49625 - DNA, 247 bp, Glycine max
  Clone ID: PAT_MRT3847_15819C.1
accactcgttcgactgtgaataatctgaggcgactaatgtcacatacttttatatgatttctcagagggatgtgttcgaacagactatatgcagtctatgatatgccccagtatctcgctaatacaatgcgcgttgttcaatcccaaatactggctccggtcaatattacacactcattagcatctgtcttcattgacttcgcccattatgataccaacactatccacttcaactatactcgttact

SEQ ID NO: 49626 - DNA, 375 bp, Glycine max
  Clone ID: PAT_MRT3847_1581C.1
tggaggtacaatcagtgtttaccacttgtgttgcgtcaccccttttgattccggggagtgctacagtatggatgagatctagtgacattcatgctgatggagtataaggtctgtccaactggatgatcttggtttcacctcagtaagatcccaaatcatcggaaatttacagggtcatgatcaagtcacaggttgttggtgcattgagatcgattgtgagttgttcatgtggagttccaactctgcgacgtgctaaatgcgatagcgcatcacaattctcatgtgtgggtagttctccagactacgtgtgcattgcggaatttgctcgctcatatgtatactgccacggtgcatgagatcttcaagtgagctgca

SEQ ID NO: 49627 - DNA, 901 bp, Glycine max
  Clone ID: PAT_MRT3847_15820C.1
gtatatcagtaaaaactaacattctaacaattaatatttgttgatgaaaaaggaaaaacaaaaaaattccatcagcttcttcagctttaatatgtgagagttatacaaggccttttcaaacaacaataaattacagtagtactctatcataagagagtacagcaaagtagttctcttcttttttctttggagtttggactttgatctttcctcacagacacctcatatgggggttttcaaaaaacaataaacaaataaacaaatcatattttcacatcacgttgatgttgatttatttcccaagcggagctctagatcaagctcctcatcatggtgggggcggccatgaccatgatgggttgaaaagtcgtttgtggggagttcttgttccactttcccaaaataagaagaagagaaaccatttttattcctccctaccgcaggaggagcagtcggggccacagagaaatcaaaggaagtagaagttgttcatctaggcaccctcattggagggtactgacgggaatgaaaagaagaaaataagaaagcagcggacgatgagagatgttgagaaaagagggtgtgttagaaaaagaggagatggggttgatgttgctattattgctattgttgttgttgtggggtactactgaagcttggtggaggcgagcgcggtcgcggcggtgaacgttcatgtggccgccaagggcttgtgctgaacggaactcccttctacagaagctgcagtagtagaatctaggaggccaggtggtgcccatcatgttacttgtgtcttctgcgaaggctctgacctcccaggactcatcttgatcttcatggtcccttggattccacatccaacaggttgttgatgatgagggtgtaggaagatgagaggtgg

SEQ ID NO: 49628 - DNA, 403 bp, Glycine max
  unsure (1)..(403): unsure at all n locations
  Clone ID: PAT_MRT3847_15821C.1
gttggaggccgatcctaatcactttttttccatatagagaattcattgtctttcgcccaatgctagnnnnctacagctcgcgtgacactgaacttctttaaaaatgatcaatcgtcatgttatgatgatgatgagtattcaaaaccatgctgagatctctgcatgtgcacaccctgaatgcctactgcatgcagctgcgaaaatgttaggccgaatacatgccactcaaattgtaagagctgcttgtgcacacgctcacatgcaggacagtatcgttgtcttgacaccaacgacttttgatacataccttgcaagtccacagatgacttgaacaaccaacaactctctcaaaatgtcgaagccccattaggctctgtttgctatgttccgggggcccttcacc

SEQ ID NO: 49629 - DNA, 395 bp, Glycine max
  Clone ID: PAT_MRT3847_15822C.1
aaataaataaattaattgaagattcaaaataataaattaagggggggaaattttaatacatcgggatagtcgtttttttttcctttccagctaccagataataaattgatgtaacaaatgtatatgctcctcgttcaataattgcaagatgttttaaaatagtccgtactattttattttgtacaaaatgaatcttaatatttaataattatccatacaaaatgataaagacacaagtaattaatatattgaagttaaagtaatacttgaatttaatttttgatgaaaataatttttgatcagattctatctatttcctgactgaattctaaattagtcagagttaattttctctaatataaactagatcatttagacaaaaattaagcagcaca

SEQ ID NO: 49630 - DNA, 779 bp, Glycine max
  Clone ID: PAT_MRT3847_15823C.1
actcccaaatcctctccagtaaatgcctccaaaccagaaaggcccgcaggaacctcaaaccttggtcgtgtatttgggagtaatgcccgtgtttcaagcagatggattccttcactacgccgaatttcttctgccaaatagtagaggaacattagactgtaatgaaaagcaagatacactgacatgacaagcttcctgcacatgacactattaccaaatgtattggcagatacattgttgtggagtgaggtggatgctctcaattttaagatttggaaagagggaaagtaagggagtatgaacgattttgaagaacgaggtatgctgtggatgtctacacacgaggttcagggtaatttggttggtgggccttaaaatgtgagagtttggcaggttttttctctcctaataatgatgaatcaaacatgtatgagtgaggggaagccacaatcattcttattgtacccgtctttttttttcctattcatcttttgtttttcaaacattcagtatacaaattcggttcttttcctttgtacagtttgttttgcatacaatataatcacattgtaccccaatcccaacaagggaattattcacaagtcaatcctattcatagctatttgaaactaatcggatccatttttgttcttgttgaaaaaaaaaaaaaaaaaaaaataaaaaaaaaaacaaaaaaaaaaaaaaaaaacgaaaaataataaaaaaaaaaagaaaaaattaaaaaaaggggcgcccccccattagggggctgccccccc

SEQ ID NO: 49631 - DNA, 347 bp, Glycine max
  unsure (1)..(347): unsure at all n locations
  Clone ID: PAT_MRT3847_15824C.1
taagtggtanaaatggagtgaaattgtgggttgatgagaaatnnaagtatgantacaattnnaanangtgngttggtggggagtggaggnantanantnaggttgtttggaaaaattntgtgngtnttggatgtggaaaagtaaggtgtganaatggaggnantttnattanttgnaantatgttttttttggnaantatgttggnnaaagaanntantaagtagttgnagtgtagnagttagnaaggtannanttnagattgntggnttatatattaagaaataaatnttaaaattatggatttagntangtgaagaatataaattnatggtgtatatgatatttt

SEQ ID NO: 49632 - DNA, 576 bp, Glycine max
  Clone ID: PAT_MRT3847_15825C.1
gcctgttctgatattgctgcgttctttgtgcaccggtgaaaatggagcaagttaatgcgttgaaggataaaggcaatgcagccctacagcagggaaactatactgaggccattaaattttattctgatgccatagcactcgaccctaccaaccacgtgctatttagtaatcgctctgcagcatatgccaaatatgagcagtttgaattaacatacgctgactctgagaaaactgtgacactgaagcctgattgggggaagggttattctaggaaaggaagtgcattggcatacctgggtaggactgatgaagcgattgaagcctatgaggaccggttaataatagaccctaccaatgcccaacttgcagaggggctcaaagaagtgaacgccaagaacccacctctgcctgatgctggtttaaatgcagacctatgaaggtcacctgatctctttgcgaagctgcagagcaacccacagacaagagctttgttgtatgatcctgagtatttgaagatctgtactaagcttcacacggatccagcagctcagctagacatgtatgatgatcctagaa

SEQ ID NO: 49633 - DNA, 650 bp, Glycine max
  unsure (1)..(650): unsure at all n locations
  Clone ID: PAT_MRT3847_15826C.1
gatccttagagcggccgcttntntnntttttttttttttttttggagtttatcaatcttaacatgtatcaataacacggtgaacattagaagaaaatgttgcaaatattggcaaggagagtcccatataacataagaactaaaattttgatgacaagatgaaagccaataatgttaaatgtgtactaaccagagaaagtttacaaattaacaatgcaaaaacacacacacaaaaaaaaaaaaacataatcacaaatattatttatgatatgattcatttggagcctcaattcaaagcatgccatcaacacaagatggcaaccttttgaagaaattactaggcatcgagggtagcttgcttctgaacctggggtgcctgagccagaaaatgccagcaactgaagccacaaccttgaaaggttttacatacaatgccccagcaacaacaaggcaaaaaatcacaaataggcttgtggctctagggtctttccaactaagcaatgcatgaaaccaacccccttacctttttatatctccaaccacagtttgtatcctcccagccacactcctaagcctatcatacctcattctgatcacatcttgagcctttgaggtgggaaaagtataaaactcctcattaagttcatttgg

SEQ ID NO: 49634 - DNA, 725 bp, Glycine max
  Clone ID: PAT_MRT3847_15827C.1
acgaggtttgttcagtttgggtttggagtttctaccatgcttgcaaggtgtttgaggttattccctcctcatttgtctctcttaaccctttgttgtgcagctccattgtctcctgtccttctattcatctgttgtgtggtctgctgtttaatatcgctgtccccagggttcgatctggtcaagaaccctactttaggtcatttgttgatcctgttgtccagcaactgcttccttgtctttgtccttgaagcaattgctgtccccagggttcaatctggtcaagaacctctactattaaaaaaaaaaggtcattaagtttctatccatggtggttaagcattcaaaaattgtgttttgcttctgtcttgagtggttaagcaccatgtttagcttttgctcttgatggttaagctttggtttgcttctaccttttaggtggttaagtgtgtttgcttctgttaagtggttaagcattgtgttgtggcttctgcttaatggttcagcatattccaattgtctttgaatgtttttcagtcattttcaatctgctgccaacgtatttctggcatgtttcatcgtctatttttctacttatattgttcatcccaagctggaagtgttgactccaccttccatctcgtgagggggagtgtgttgtctcctaatcagtactaatcactttgaagtctagccctgcagcaagtgcagcttttgtttctgggaat

SEQ ID NO: 49635 - DNA, 270 bp, Glycine max
  unsure (1)..(270): unsure at all n locations
  Clone ID: PAT_MRT3847_15828C.1
aaacttctaattttagggggggcttnagggggtggggttangggagaattncggaagcaaggggttnagacatctgcgaagtggtgctaggagcatttctaacttgagtaacaaattatgagatttttttcttcaggggggggggggaaaaaaaaaaaaaaaaaaaaaaaaaggaggaaaaaaaaaaggggggggggaaaagnaagggggggggcgggttaaagaggccagccttgggggcgcgggctttcgaataaataaccctttttt

SEQ ID NO: 49636 - DNA, 432 bp, Glycine max
  Clone ID: PAT_MRT3847_15829C.1
aaccacccatgatttattttccccaaggggaaaagccttgtcctcaaccaacacccatgatttcaggttttagcgaaaacggccccaacccctcatgacctttaaaaaaaaaattaaagaaattagtattttcagttcagtagttacctacccaaaaaaaaaggtaaccgaggtttaatattcccacataaaaatatatgcaacactgatccaaaaaaggtttaaaaattcccattttttaaactccatgccataaggaggacttccctttaccttctttgttcccacttttttccagttggaaaacaaaactgccccattaaactaaacaaaggactttttaattgctcttctggaaccctcatcggcatctggaaatatttcgcggaaaaattggttcaaggcagaatcgccataaagcttttaatcttt

SEQ ID NO: 49637 - DNA, 365 bp, Glycine max
  Clone ID: PAT_MRT3847_1582C.1
tccacgtgtccgacgactgcaaaacgactccagcacatgcaccacaaacgacgacgcggcggaggttatatcagcgcgcaagcgtcacctagattatcacaactctcaaccctagcattcaactttaatggagatccacccttggcattaataaaagctctttacttcgcgatgtatctgacatgtttcttgagaaaccaccagtactgtatgtatacaatggctccaccaaatcatacaccttaaactccctcaaaagctcctacggtgaaatgcatctcggccacaggggcttgcacaatgaacaccgtccgtacataagggaacggggcatgctagagtttattaagtacctttacacaaag

SEQ ID NO: 49638 - DNA, 489 bp, Glycine max
  Clone ID: PAT_MRT3847_15830C.1
tacggctgcgagaagacgacagaaggggagagaatcatggatatacctaaacaaacacttggtagtttggccatggtaatattactctttgctgggattattttggtgtaccactggaactcttccttctccaacgaattcgttctgacggtaaaggaaccactttgcaagcaatcaaatcttaccactcccaatattgaagcaaatggagatggccttgacactgctttggccaaagcctccatgggaaacaaaacagtgataattgctgtagtaaataaggcctatgttgatcaagatgtagagagtgacaccactatgcttgatatatttcttggtagtttttggcttggagagggaacaaggtctctcattgatcaccttctcttagtagcggttgatcaaacagcctatgatcgatgtcaatttctgaagttgaattgcttcaaattggaaacagatggggttgattttaaaagtgagaaaata

SEQ ID NO: 49639 - DNA, 355 bp, Glycine max
  Clone ID: PAT_MRT3847_15831C.1
ggctcgagtgctcgagcaaagtagtcgctcagagcaggagaagacaagagcaagtaggccccagtgatcactggttattctaattgccttgttggatgatattcttcatgattctattcaactattttttattgcatcaaaccttgcttgctacatgcctttacttcttggacaaccctgtttgtattcttattggctatagctcaatgtagttgcaactatatttggaagcttttgcctactcaacgtgaatttttatctgagcatgattgtattgttttgtgatggactctgaattacattgttgcttgtctatatggcttaatttttgccacttatcaattggactttactt

SEQ ID NO: 49640 - DNA, 173 bp, Glycine max
  Clone ID: PAT_MRT3847_15832C.1
ctcatgctcgagtcctgttatatctcagcgcgtagagcatggtcttatttggtctataaaaccactagtggtcatcattactatgtcaaggatctttcccactactacttcggatccttcaagatcgagcttgccgtcattcagatagacgacctcactgacttgccgaccga

SEQ ID NO: 49641 - DNA, 304 bp, Glycine max
  Clone ID: PAT_MRT3847_15833C.1
ccctaataagccatactactaccattctttttcaccaccatcaccttcttcaccaaggaggccatattacaaccactctccgcccccacctttaccttctccaccttactagaagccatactactatcactcaccacccctttcacaccaccttcacctattctattctattaccactcaccacctctaccaccactatacaatataccatactactctccttcaccatctttctatgattccatactagtacctaatcatctccattaccaattcactccctctacacttttcatctatttta

SEQ ID NO: 49642 - DNA, 215 bp, Glycine max
  Clone ID: PAT_MRT3847_15834C.1
aattcgggtcgagacggctgcgagaagacgacagaagggatataacctttttttgccaaccgaaataatatattggttaattggtattgacaccatgcaatcggattttgccggccatacagagtctttaaaggagcacaatgaactctatagagtgaaattttgatactatgccggacgatggacataactatttacatgtgtgaatttattga

SEQ ID NO: 49643 - DNA, 366 bp, Glycine max
  Clone ID: PAT_MRT3847_15835C.1
gtcctcgcacaaagactagcacccttcttcaggagttttatgtgaaaagctgatcccatcacacataggctgctgacacaattgacccaagtgtacacgcaagacttcaataaagtgcttacaccaactcacaaattatgatgtaacaaacgaataattctccaactcagatttagaatccaccaaattccatgtgtgagatgcactcatcctaaaacagaggtgggagaagccctgcattacgcacggtattgagatggagcaaactacatgtaacgacgagacctgtgcagattacagtcatgggacgaaacaatccatggacaggccatcgtctgctctgagtagtaccatgggcggcctact

SEQ ID NO: 49644 - DNA, 241 bp, Glycine max
  Clone ID: PAT_MRT3847_15836C.1
attgacttctgtttcaaacttgctcaggagcaatctgtgatcactctgcgaggaacttctgtaggcctaatagattgtctcaacatcaccttcgctaatgttccatttgcttgtgtaaaagatttgagattggatacaacacctccttacaactcaccactttaatgtccaagtcaacactcacttatttataaccaccactacctaatgtgtggcgatccaactctacctcaatgaggtt

SEQ ID NO: 49645 - DNA, 359 bp, Glycine max
  Clone ID: PAT_MRT3847_15837C.1
ccacgcgtccgcggtggtgctggatttggtggtggaattggtgggggccactagattgaatatggtaaccacgagtcattcaaattgttttactttccatatgtttctgttaaaacggcagttaattaatgcgtataatattatttcggtttaagttatagtggttgctacttgctactcttctatcagatgatgctatgctatatatataggtcttcttgttagaattaattatgcatgggaaacaaagctttgtagcctgtaatgtctgcatgtctctattaatttttggcaataatataatattgtttttagtggggtgcaaaaaaaaaaaaaaaaaaactcaagtaaaaaaaaaa

SEQ ID NO: 49646 - DNA, 479 bp, Glycine max
  Clone ID: PAT_MRT3847_15838C.1
aaaacacaaaccgaacttattttaaagggacttttttacagacccattaaacataaaagttcttaaaatgtttgggaaacacatccaacattacaaaacgagcttaaaaccccccacggaaacggaggacaaggggaagggttgattccttctgaatgttgaaacaagagagggcccttccatcctaaagctgtttgccaaaaaaaataaccctttggtggcccggggggaagccttccttggcccgaattttgggctctacattttgaaaggggggaaaacacccccccccctggggggtaatttgccccacccgaaaaatcctaaacaaaaatttccctcccaccacgaaaacccaacaccaaggggaaactctcccccttctggatgttgaaggaagcaagggtgcgtccgtccttaagctgtttcccggaaaaaataagcctgtgctgggccggggggatcccctccttgccctg

SEQ ID NO: 49647 - DNA, 2156 bp, Glycine max
  Clone ID: PAT_MRT3847_15839C.1
ggctcgaggtgagctgcctgaaagtaaacagaaaaactctcagcgccgttctttcatgggattcaggaggaaaagtcagtccaatgatgaaagcatggataatgaactgattgaggatgtcagctctgagagtgaggatgataaagggcctaatagtttggaattagatgacaaagaaaagcagagggaaaagcgaaaaggtcttgatcttgctaccacgcttgaacgtatcgagaaaaactttgtcattactgatccaaggcttccagacaatcctataatctttgcatcggatagcttcttagagcttacagaatatagccgtgaagaaatcttgggaaggaactgcaggtttctgcaaggacctgaaactgatccggcaactgtgagaaaaattagagaggcaattgacaatcaaacggaagttaccgtgcaactgatcaattatacaaagagtgaagttctggaacctgtttcatttgcaacctatgcgtgaccagaagggagaagtgcagtattttattggtgttcaacttgatggtagtcaacatgtagagcctcttcacaactgcatcgcagaagatactgcaaaggagggagaacagttggtcaaacaaacggcagaaaatgttgatgaggcggtaagagattttccggatgctaacaagaaaccagatgatttatggacaaatcattcaaaagcagttcacccgaaacctcataggaaggatgaccctgcatggaaagctattcaaaaggtcctagaaagtggagaacagataggcttaaagcatttcaggccaattaaaccattggggtcaggagatactggcagtgtgcatctggtggagctacgtggaactggtcaatattttgcgatgaaagctatggataagggtgttatgctcaatcgtaataaggtgcatagagcttgcgcagagagagaaattcttgacaagttggaccacccttttctacctgcattatatgcttccttccagaccaaaacacacgtttgtttgattactgattattgtcctgggggagaactattcctgcttcttgatcggcagccgactaaggttctcaaggaagatgccgtgagattttatgcagcagaggtagtgatcgtattggagtaccttcattgccaaggaataatatatcgagatttgaagccagaaaatgtgttactccagagcaatgggcatgtgtccctaacagattttgatttgtcatgtttaacatctagcaagccacagcttataattccagctaccaattcaaagaagaagaaaaagaagaaacagaaaagtcaagaggttccaatgtttatggcagaaccaatgagagcatcaaattcttttgttggcacggaagagtacattgctccggaaattataactggttcaggtcacacaagtgctgtggattggtgggctctaggtattctaatatatgaaatgctttatgggtatacgccattccgggggaaaacaagacaaaaaacatttgcaaatattcttcacaaggaccttaaatttcccaaaagtaaaccggtaagtctccagggaaagcagctaatttactggttgttgcagagagatcctaaagacagattgggttcacgtgaaggagcaaatgaaattaaacgtcatcctttcttccggggtgtcaattgggcactagttcgttgcatgaaacctcctgagcttgatgctcctctcttaccggaaactgaagaagaaaaagaagccaaagatatacatcctgggctagaggatctgcagacaaatattttctaaaatatcgagaaacacatgatgaattctttgcgattttgaacaattaatggaattttaatcccttgcttcagcggtgcaaagtttgatcatgttcattgtaatttatgaatggaagacctactatatttttctagatttgatgctacttaagctgcctggccttccaatggggtattagggattgggaccatcaaggcaattagtctagtgtggaaatttgtgtatatttttagaataatgttgagtcatttaagacatgccttgtaacatcaaaattaaatctgtattgttaaaccattttttggaaaataaaatacttttagtgtgactcaaaaaaaaaaaaaaaaaaaa

SEQ ID NO: 49648 - DNA, 181 bp, Glycine max
  Clone ID: PAT_MRT3847_1583C.1
ggctcgagctcgaactattgaatgctcgacttctgttcttactaaatttgatgatcatctacctaggacgcggccatggagcacgcatttctgcagctgcactacatcgggagacgcataaggcccagtcgacgctacggagctgttgtcacagatctctgcaggacagccatcgtcacta

SEQ ID NO: 49649 - DNA, 319 bp, Glycine max
  Clone ID: PAT_MRT3847_15840C.1
gttttaagctgtttttgtttgggaactataccaagtttattcttttagtgcggagttatgtgccctggccaggttttccacatcctccaggacggtacacccggatctgcccattcgggcaacacgcaaattctcggcaacggcttctacacctactttgccttcatacaagccgtcaacttctttgcggggtttgggaccgtctccagcaccgacgaactcaacatgcgcgagctcgccgtcttcttcggccagacctcccactagactaccgttggcacgacaggtgccgtcgaccagtttcagtggggttactgtt

SEQ ID NO: 49650 - DNA, 390 bp, Glycine max
  Clone ID: PAT_MRT3847_15841C.1
cttaagaaccccaaaaatcaaaagggccggcaaacaaaatgggcaaaccaaccaaaaaggggaggctattctacaactatggccccaccccaaaaaaaacccacatcaattgagggggtcaaaatgttctaaaaaggggcaaatgccttttcttggaacgccgccgctggggccacaaggggtggtgcggccttgggggtcaacacctcaaggggtttacccaaaaccaagtccattgttgggccggatcttatgcgggaggccggactaaccaccgggggcaacccccccgagaaaaaaaggccccccccttaaaaggggggcggggcccataaatatattggtgccccccgcaaattaatgaaacccaccaaacaataaaaccccccc

SEQ ID NO: 49651 - DNA, 127 bp, Glycine max
  Clone ID: PAT_MRT3847_15842C.1
caccattctattggggccagaaatagctacagaattccaattttataacccctgcgaatgatgcttataatgggactacactattttttatgtggggaggacacaatccaaattccaatttaatttc

SEQ ID NO: 49652 - DNA, 394 bp, Glycine max
  Clone ID: PAT_MRT3847_15843C.1
aacggggcttaattttttacaaatttttggtctgttatatattttttctgtttatttatattatggccccaaaacccgggggggtaaaaaaaatagttggcagaggggaaaaggaataccacccttgtccaaaaagggggaacaggggggtttgccccccacaattaaaacccccaattggggaaccaaaagttgccctatgggggggatgactgcaggatttgagaaaaagatgggaacctatgatccaacccctaggggggaaaaacgccactttttttggccccctaaaaaggcaatccctggtgggaccaaagccgcgaaattccttgtatctgggggaaattcctgaaaccggtgtcccggagcaagctccattccttcgccatttcag

SEQ ID NO: 49653 - DNA, 290 bp, Glycine max
  Clone ID: PAT_MRT3847_15844C.1
gttagtgattcgattgagctactcaagaccaagtttttcaattttgggcttacagtgaaagaccttgttcttgttagtggtgctcatacggtggggacctcattgtgcttctttatgaccagaagactgttcaactcgtttttttgtggtgagggatctcacccatcattgattcattactttctgcattggcttatggcaatttggcttctgattgtataatgttattagtcgcctagctattgttgtaggtagtgagctgaattttgacataaacatttttgatttac

SEQ ID NO: 49654 - DNA, 336 bp, Glycine max
  Clone ID: PAT_MRT3847_15845C.1
cgggtcgagctcaaaccacataagggtgggaccgctgctagaagaccacagatgggcaggctgcgcacttaaatggcgggacttcactgttaggcaatgggcgagattcactcatattgtggggcaaagatcgcaagctatattgctattcttggaatgttcacactgaggacgctgtatcctgctgcatttgggcttacttcgcacaagattgattttgggtcatagaaattagtagagcaacctatgctgttcatcaagatgatactttggcctatcatgttttctcagggctggaaacttgaaaattctgcacttcagagacagatcgtctat

SEQ ID NO: 49655 - DNA, 183 bp, Glycine max
  Clone ID: PAT_MRT3847_15846C.1
caaaatttcagaaaaaatagaaataaaacctgatatttttagaaacgtcaaaaaaatatcatatctgtaaactctttttttaaagttaaacaaaaatttattctcaataattgaaataaacactactagaaagttggtattctacgacgtggttttgacaattgttttgcaaaaaccatcgtt

SEQ ID NO: 49656 - DNA, 488 bp, Glycine max
  Clone ID: PAT_MRT3847_15847C.1
gaagagatcacccgttatgcttagttgcagatgatagtgtgtttttacctcttcttgtggcacagctttcagaagcatcacatgtaatgtcattacttccggggcttaaggaaagaggcctacaatatttgcaagcggctgcccatgcaaatggtttgtcacgtaattgcatagaagttcttgaaaaaagggtgaaacagttaaccatgcatgatatacaccagaaaaaggttgtattttcctgattccaattgcttggtggatttactttgtatttgattagaaacctatatcatagatcactttgcttatgtctatgaagcataaatctgaaatttaaatgactttgcagatgaatggtgaggcttggaagccatgaaattgaacagattaattaagcagatattttttttactttgtttcctatacttttactatggaactttgttacttatattgaactcgtgaagaattattcaccttagtaa

SEQ ID NO: 49657 - DNA, 103 bp, Glycine max
  Clone ID: PAT_MRT3847_15848C.1
atcaccacctgcttcttccccagctgccgctcccaagtacatgtacaaatcacctccacctccaggttacatatatgcgtgcccacctacacctatctacaag

SEQ ID NO: 49658 - DNA, 789 bp, Glycine max
  Clone ID: PAT_MRT3847_15849C.1
ccctgggtgagccacctccacctacaccaagaatttaaagtgtgacaaagaaagcaagcatagaaatagaatgaaagatggtgggtcttagtgtagtcctggaagcccagaagagttgcatcaacaaaaagacacctcaagtcattaacaaaaccaccatgctgatgcttagcagcatccacaacaaaccctcccctcaaccttcttctctttttcagccacccacttttcttgaccaatgctttctttgtgggaagagactcttgccagggaaagacatctacatgtacaaaggggacagggcattttgtagcgtggattgcaggtgcaagcagattttcagcgacgaggaagaagctattcagaaagagaagtgttctttggctgccatgaggcccacatcgtctagttcttccacctcaacggcacgtcatcaccggaaaggaacaagaaaccgagggggtggtgcttatttttagaggaagaaagaaaaagaaaaagaagagatcatcagaaaatgggaggattgtaatttttggcgaccacattccagttttacccatggtttcttttgttaatgacatcacagccccttgtcctttttgcttcctagtatgaagccaaaatgtcctttcggctttttattttttggggtccaacttataactgtacgaaatttgagacctgagcattttctctatggtggttgttgcaatgctttcgctttaaaattgctcaggacccacagagaaatacttgtttttttaatttgtagtagttgttgttgac

SEQ ID NO: 49659 - DNA, 136 bp, Glycine max
  Clone ID: PAT_MRT3847_1584C.1
agaaagtagcaaagatgacaggtttgtttagtctaaggaaggggcaaaagacaaaggggccagttttgttaatgcctaagccttcattggacttcaatactataaacattccttgtataggcactgctacactcac

SEQ ID NO: 49660 - DNA, 610 bp, Glycine max
  Clone ID: PAT_MRT3847_15850C.1
tttttgtttattgtggcaaaggcaaaaaatcatcattatcagagagcatagctcaatatatagattttagtacaccattgaaaatcacacaatagatttcacaaagtaatgctacctgcaaagtgaaactaaagccagcaatgcaatggtgtcccacaccaatagtttatttttaccaaaaatggcaatagaaaattactataagccctcctgaaatgcatgagcacgagaaatagctggcggattggcttccaagatttgagaggcacccaacatgcgatcttttccttcttttggttcaatttttttcaaaatatcaccatttgatacaaattgctgcttatcaagcttgatagctaatgtagctcttattataggacttttgagggcctcatttggggcatcaattctaatggtctttggaaccaaaacacacttttctgatttctcttcatcagtgcaaactgtatctctagtgtgttttccaagtgttggtgagccattgcctgagcagcaactgttattagtcgaggaagtcggcgaaaggcaagcattggatcctattgacactgccccagttccagcattccaaagtggcgttccactccag

SEQ ID NO: 49661 - DNA, 251 bp, Glycine max
  Clone ID: PAT_MRT3847_15852C.1
cgagccaaatgacacatcccagtcgaacagtgttcatgaacgcacttctactgatagcctcatttctatgctactgctgctacactatcactactcctactgcagctactactagtgataactgagacagtggatatcgatccacattggcgaggccgggattggagacggtgacgagttgtttgtcgccggcgttgtcggatacgatagcaggggccatgggaagatgcccagttagaacgccatgggtg

SEQ ID NO: 49662 - DNA, 446 bp, Glycine max
  Clone ID: PAT_MRT3847_15853C.1
cttcatttgaaaggaaacccctactccctcactcactccgcggcagccgccctcaccgccggcgcaaccatctgaaaccgggggccctgtgtcgcagtggtagcactgtcacagtcgttgagaacgggtcattgtgaaaggcctcctccacctgagccctgagctcttcgttatagccattttgcaaagcaaacattcttgtccaatatttctcaggaaaatttcatttagtgttcatctacaatggccagatgggatgcaatcctatctcttccagtacaaaatcctcccacattggaaatttcttctgctgagctagtgtggtcaaaagtggaaggttggcatgataaattagatagagtagctctaatcccatatgctagagttgatgattttgtgaggggtgaatcaaataacaaagaatgtcctacaagatttcatgttga

SEQ ID NO: 49663 - DNA, 323 bp, Glycine max
  Clone ID: PAT_MRT3847_15854C.1
cgggatccaagaaaacctttttatggaagcgggaaaattttggacccaactttttttatacagggttttccttgttaaaaaaaaccccctaaaacaaactaaatggggccctgggttcccaagctccccctcggggggaaaacccaacccttgccctatatttttttggcatataaaaaaaggtgccgcttcatttgccaaaccatttgggcttgtgccaaaaaatgcgccccaaaaaaaaaaaaaccccccgggaaggaaagaaaaacttttttcccccctttccaataatattaaaaaaaaatttaacccccctttccccc

SEQ ID NO: 49664 - DNA, 210 bp, Glycine max
  unsure (1)..(210): unsure at all n locations
  Clone ID: PAT_MRT3847_15855C.1
cccatacgnccgcccgacacaacctctacactggggagaccgttgtccccaaacgacgccggcttccccccccacacgcaaacgccggccgagaacaaaccaaaaaaagaaaagaaaagcagccaccgccagcgccgaaccgaagccggagcggctgaaaccaaaggaacgggcggcgcggacggacggaccgggcaaggacatgccgaa

SEQ ID NO: 49665 - DNA, 1246 bp, Glycine max
  Clone ID: PAT_MRT3847_15856C.1
gcacgaggaacagcgatgattctacgagtgagcccctcttgcatatcaaacttggagaaacggattggcatgcagcttgatcaagctactctggaaggtcgcttgatgccaaatttctcatattcaatggagactctttacaatgttgactgtgtgctcggaattcttgaccatttccttgccatggatcaggttactggctgtgcctctccatgctcaattgatgatggtcaattgattgggtctccttcactaacaccaatcaccatggtagcaaagcttattgatggttatttggcagaggttgccccagatattaatttaaaacttcccaagtttcaagcccttgccgctgctgttccagagtatgccaggcctttggatgatggtttatatcgtgccatagatatttatttgaagtctcacccatggttggtggagtcagagagagagcaactatgtaggctgatggattgccagaagctctcattagaagcatgcactcatgctgcgcagaatgaaaggctacccatcagaataattgtccaagttctatttttcgagcagctccagcttcggacttcaatcgccggttgctttctagtttcggacaatctcgatggatcaaggcagttgagaagtggttttgttggatctacagagggtggctgggcgtcggccgtgaaggaaaaccaggttttgaaagtgggaatggataacatgaggatgcgggtgtctgagcttgagaaggagtgctcaaacatgaggcaggagattgagaaactgggtcgcacaaagggatcaagcgcttggggaaccgtgtctaagaaacttgggtttaagttaaagtctcagatgtgtagtgctcaagaagggtcagttagcaaccagaacaacgcaaataataatgttgagaagttgaaggaaagacatgtaaagcacaagaaaggttcttctattagtgacaaagcatcagtctcttcaattgttcattcgtagtgtctaaatgttaattcactcacaaggtcttttctctcgtgttactgtgtcacatattgactaatcaatttctttgcccgttactcaagcaaagtataactcagatggaacaagagtctctgtattgtgtaaaaccgtagatttagcttcttttttttccctttcctttgtcccactacatctgcatataaaaatttccatgcacattatgtctcctacttgtccaaaatattcatttgtttggatt

SEQ ID NO: 49666 - DNA, 258 bp, Glycine max
  Clone ID: PAT_MRT3847_15857C.1
ggaaattataacaattgggtttttacttaccctcgcaaaagtaatgaacattataaaagcacaaccttatagaaaccgacaaaacacaaataaaattatgtacaatatcatataaaaggacccataactccgttatttttcacaagatacattattgtttttgaacggaacgaacaaaatacagctgcaaataaccatttatgcatacaaagcctttacttttgatcggcaaaaaaaatttgtaaagatctgtttttt

SEQ ID NO: 49667 - DNA, 488 bp, Glycine max
  Clone ID: PAT_MRT3847_15858C.1
cttcagggggctcacatataatttataaagacaaacccaaaacagcactttctttgactaccagtcgaccacacccgcgcttatgcggttaagtctaatgagattacctacagtcccactcatatttccgacactgtatcttctaatatcctgagaactgaaaaagagcaccgcgttacaaacaaaacaatgtcgttattattatcccgtcctaaccaccatcacccggacatgatggtaattgaaaaaccaacacacccaatgaatcattcctgacctcatcatcagacttcttcctcagatcaggatgcttttcaaagtacccatctgccgtcatggttctaaactttgtcttcagcttttgtactccaacaatttccttttccaagcgctcagactccttcagagatgtctcctctgcttctttaagcacaatcaaaagggcatcatatttaggcttatttcgaggagttactgtttcaacaaac

SEQ ID NO: 49668 - DNA, 278 bp, Glycine max
  Clone ID: PAT_MRT3847_15859C.1
tccacgcgtccgagcgagccaatttgttgcaatggatgcgcatcctagcttgtaaggtatctagagactgctcttaaacgccttcgatgtcaaactgtagtagtgccctgcatttctaggtcgtaggtaccggatggagcgaaaatataatgaacagccatatagagaccagttctgcttctgcgtttaattgacacagaaagaagccggatgtcacctttacagtgcaaatacaaattaaatcagacggtaaaatcactgagaatgctgaaggtcct

SEQ ID NO: 49669 - DNA, 416 bp, Glycine max
  Clone ID: PAT_MRT3847_1585C.1
aatgaaacaaaagtacacaaccctagtactaaatgtgagtgagtaaatcccaatcttaatggttgttgtccaaggctccaaggtccatctcccacacccttcctccctctctccctctccccaccctctcccaacaacctccatcctctttgaaccctcctccctttctcttgccctcacccactctgactcctccctctctctctacccttccttctccccccaaaccctaaccctagccctaaccatcccctcctcttccaaaaccacccataccctacctgctcttcctcctctgtgggtcccaccgtcatatttatagtctcctccccacatagagccggcatcctccttcgcctctaccggcgtcggcgcgaaaccccttccttcgcccgtgtcactgacgtccgctgctc

SEQ ID NO: 49670 - DNA, 318 bp, Glycine max
  Clone ID: PAT_MRT3847_15860C.1
aaactctgagtgcatattagttttacaagcacacatgttaaagacaagtggtgaataaacctgaaccttgcttggttgtgctatagccgcacagtatgctgatttcattgacagaccaaagaaatcagagtctgaaaaacatatatctagtagtggctcattctcgtgtagaatatgataaaattatagcttctttaggattattaaccccacacatactattacaagtttcttgggggatggggaagaggctgttaatggatacagcttaactttataaggtactctagtttgaagtatatgtaagatttatcaaat

SEQ ID NO: 49671 - DNA, 374 bp, Glycine max
  Clone ID: PAT_MRT3847_15861C.1
ggccggaataccgcgtcgaccccgcgtccgcagactttgggcgccccgaagagagagcgcagagtccgctctgcctcctgagctagaagcaagaaagacctgctacagaaacgtaccactaaggaccaatccaaacctcttatactaagttaacctcttcctttttcttcatgcaacctaaccatctcacactttgccactctgctcgacaggcaaaaatgacgaggccaaactctttcacgactaccctaccccattccctaacacctaaacctacccctccgatcgtgcctcacagcgttaagcacaaatgctgggacaaggccgaccgagtcaaaagacacgaccccaatcgctaccacaagaacgccctc

SEQ ID NO: 49672 - DNA, 154 bp, Glycine max
  unsure (1)..(154): unsure at all n locations
  Clone ID: PAT_MRT3847_15862C.1
ggaaagtgtaagancatgggnaaagagaagagaggtagaagcttcatcnnccttcnccgnnagctgcggcngtgcttggnattgcggcgaacctagntatcaccgnaatcaagtaccagaaggcaaaaaatgctaagangaaagnttttggggt

SEQ ID NO: 49673 - DNA, 266 bp, Glycine max
  Clone ID: PAT_MRT3847_15863C.1
cccacgcgtccgttttaaaagaaacaaatcaagtaaactaacaaagacgcaaggcaggtaagacaaagccacggcttctctgggggtccgtctccaaggttatccagcttatgtacagggccataagaccggtgatccgactattagtttctacctatcctactgatcagctgcatggtctacacgctgcaacacgttaaagtggctgtaccataaatccaactgcctggaaggatataaagtgcaaacgcgatgccttgatagca

SEQ ID NO: 49674 - DNA, 145 bp, Glycine max
  Clone ID: PAT_MRT3847_15864C.1
ggcgtcgcaacacatcatcaaggagctcgaggatttgcagaaggaccctgctacttcctgcaacgcaggtcccgtggcgaaggacatgattcactggcatgcaacaatcataggacctactgataacccataataccgggggggt

SEQ ID NO: 49675 - DNA, 719 bp, Glycine max
  unsure (1)..(719): unsure at all n locations
  Clone ID: PAT_MRT3847_15865C.1
cacgcgtccgcgcgaattgacgagtgaaaacagagaaaggaagatggagaagcagaacgaagaagaagaagagcaaaagaagaagaagaagagttcggtggtgataagaataccttcttatcaggaagtggttgaaagttcgcaggcgaaatccactccttcgtctctcttcgttccctcccaaaccttttccgaagctttcgccttcgtcaaatcctccgacttctactctcctcctccgaaatcgagggaaactggtcaatcggacgctccatcttcaacatcgacaccatctcccgctactgctgcagcttcgtcaacaataccttcctctcaaaatcgcaattcaattcttgtcagccacagacagaagggaaatcccttgctaaaacacattaggaacgttagatgggcatttgctgatgttgtttgtgactacatgcttggccaaagctcctgtgctctctatctcagtcttcggtatcatcttctgcatccagactacttgtactatagaataagggagttgcagaagaatttcaagcttcgtgtggttttatgccatgttgatgtggaagatgtaataaagcctcttcttgaagttacaaaaacagctatgcttcatgactgtacactcctttgtggatggagcctggaggaatgtggccgttacttggagaccatanaagtctatgaaaacaagcctgcagacattattc

SEQ ID NO: 49676 - DNA, 259 bp, Glycine max
  Clone ID: PAT_MRT3847_15866C.1
agctgagtctgggcgcctgaagtctaatgcagaatcatatgctccacttgaagatgcccacctcattaaccgagcaggatgatctgctctggcagcgatagatgatatgagagctgagggatatgaaccatcaaaagagatgctagagcaggtcagacagccatgcacacgagagatggactatgcaagagatgccagagagcactcactgaataatgccttgaatatccagcagggtgcagataaccgacgggacata

SEQ ID NO: 49677 - DNA, 342 bp, Glycine max
  Clone ID: PAT_MRT3847_15867C.1
tggcttggaacctttgggctgatttatgcgcttgtcaagaaggagaagtaaacggtccttctaacgactctccttttagtcgccattatcgctaattgcgttggcgttggtacggccgtcttacctatcggttctaagcttacggtcggtccttttattagaaagattaataacgataccattcttaccgtcagtaatggcggaagagcgtaacgtacgtaggcgcggttattagccggtaagaagaagcccgagatctcccttcattcgttagattccgacgacgtataaccggtaaaagaagcagaacattcctccaagaagggacggaccttccgtccg

SEQ ID NO: 49678 - DNA, 360 bp, Glycine max
  Clone ID: PAT_MRT3847_15868C.1
tacggctgcgagaagacgacagaagggggaataccatgcagagtggattaatatatggaaaaacaaacataatgatgttttagctgggcaatgggttgaaggaatagtgacacatacaccagtgtacatggaatggtataggaaaaacactactttgttcttgtctgttgcacaacaactacatgatccacgcacaacatttacccaaaatgttgcagggtcaaggggggaacaaaaacattttgaaattccgcatcctcagcaatgtattctactccttcacctactcatcaaacttttgaccacgctggcgagtcattcaccgcaaacaccccatgatgggttaaccgtttaatttgg

SEQ ID NO: 49679 - DNA, 728 bp, Glycine max
  unsure (1)..(728): unsure at all n locations
  Clone ID: PAT_MRT3847_15869C.1
tttttataaagaaatgatcaaatattaattaaaactaataagatgataatggagaatcgttgctggataaaatctttaggctatacactactagagggcatatgaatttaataaaccctgtgcatgtccggtaattttggttatatatacttagagaagatatcacagagcattaattcactccattagcattagtttacctggttgcattgccttcggacatcaccctgcacatctgtgagaacattggtagaagaaagtttaacaaatgccgatgagaaagccttgaagaagtagttctgatccatagcaaaccgcatgacaaagggtgctgttcgcggatctctagaaatgctggagtcaataccaaacaagcctctccccatcataatgtcccggtaatacctggttgtcaaatataactggggtncatgtcgttaggcacaaatgtganggtttgtcaaaggaatctcagttgggcatgctagtcttagagaggcttccaacgcaaaatccatcttgtcccctagccgtggatcatacaatctaccaacaatgttgaangcagtgtccaatccctagtgtatgtgcgcctaccaatagttacaatcaataacaaatcaatagttaacagttttaaacaccttatagtgtcacctctttaagggtgacatgcattacctaaaatggaacagactcttcgatgttcattcctatagacatgaaaa

SEQ ID NO: 49680 - DNA, 321 bp, Glycine max
  Clone ID: PAT_MRT3847_1586C.1
cccacgcgtccgttcttcttcttcttcttgaatctctctaagctaaggtacgagatatggggaattgccaagctgtggatggtgcagtgctcgtgatccaacacccttgtgggaagatagagaggttgtattggcctgtctctgcaagtgaggtcatgaggactaatactggccactatgtttctttgatcataccatcgcctgtgccacctcaggatcagattcaagagaagaaaactgtgcgtttcacacgcgttaagctgctccggcctaatgagactctcaaccttggccatgcttacatgctcatcaccactcatg

SEQ ID NO: 49681 - DNA, 1161 bp, Glycine max
  Clone ID: PAT_MRT3847_15870C.1
ttggctttgtggcaaatgaggaaaccttatatgatggaaaaagacaaaatgaacaacaacattaagagcaagctaaggaagggattgtggtcacctgaggaagatgaaaaactcctaaggtacatgatcactaagggacaagggtgttggagtgacattgctaggaatgctggccttcaaaggtgcggcaagagttgccggcttcgttggattaactacttgagacctgatctcaaacgtggtgcattttcaccccaagaggaagaactcatcattcatttgcactctattcttggcaacagatggtctcagattgcggcacgtctccctggtcgcacagacaatgagatcaagaatttctggaactccactctgaagaaaaggttgaaaatgaacaacaatattaacgccacttcatcaccaaacaatagctactcatcatcagagcctagagatgtcaatgtcatgggtgggatcatgcccatgaacgagcatgacctcatgaccatgtgcatggactcctcctcatcaacatcatcatcatgcatgcaatccatgcatacaaccaaccgagccgtaactgaccaatttgatccctttcccttgttgtccaacaaccgttacgacatgaccggcgcaaccgatttccttgacaacatggctgcatgcttaacccaagttggcatggtagatcatgatcatggggttgttcatgatggttatgggacattggagcctaacaaaacgggtttagaaagtgacttttcccttcctccactagaaagtagaagcattgacgacaatagtagtaccccaattgatcatgtgaaaagccataacaacaacaaccacttcaagaatagttgcttcaataacactgatcatcaccatcatatccaatgctccaacaacgtagttgtagaggatttgtttgggtttggaaatcatggacatggagaaagctttagaatggaagaatgggactttgagggtttgattcaagatattccctatttttcttcccttgatttccaagtttaagtatgtgtttggatcacgttatcgcaatcgataaacgctacaatttgtagcttctgcattgacatgacgcgttgatacagtttcaaacacactttaaatgttggccattcttttgaaaaa

SEQ ID NO: 49682 - DNA, 616 bp, Glycine max
  unsure (1)..(616): unsure at all n locations
  Clone ID: PAT_MRT3847_15871C.1
attcattctggcagagtattttctcaatgttcatgttgaactgaacagggatgaattgagggttgacctttcatcacagcacaacacaataagagagtgaaattggaaaaatgccaatctgaaaggactctctctctctctctgatttgttcttcgttcgatggcgtgtgaggaagtggctcattcgaggcctctgttcctcacgatctacactattgtcatcgttggcatcgtcttttcctcactctacgtcttctccgccattcgccacccctccgccattccttctacttggtccctttcaaatgaggatgttcgtcttacagaacaaacactcaacggttctcagtcggaaactgtgcatattgtgccttctgttcctcaggaggcacgaaaaatgaggacaaggcctattttgagtgttcctccacgcaataaaaagatgccatctttgaatgcattcagattgaccaaagaattggttcagcaaagggtgaaagataatattataattntgacctttggtaactatgcgtttatggactctattctgacttgggttgaacagttgaatgatcntggagtttctaattatcttgttggtgccatggatatc

SEQ ID NO: 49683 - DNA, 787 bp, Glycine max
  Clone ID: PAT_MRT3847_15872C.1
ggctcgaggtagttttggacagtctcataaaacccttgttacgttgcattaatatctatagttagtcacaacacttcattagttttcaatatgttttcaacggctactgcagacggtgttccgacgccgtacaattctacggtggcgacgatgctggggcggcggcggattccgatacacacgacgttctactgggggcacaaggtggacatactgttccggtgctggcccggggacagcgccgccatgtacgcggtggcgctgctcctcgtgttcttcatggcggtgctggtggagtggctctcgttcaccaacatagtgaagctcaagcccgggggctcaaacgacgtcgttggggggctcctcaagacggggctatacggcgtgcgttccgggctctcttatatggtgatgctggccgtcatgtcgtttaatgggggtgtgtttgtcgttgcaatttgcggccacgtcatcgggttcttgattttcgggacgcgggctataaggaagaaatcggatgggttggactcatcgaaaccgtagggtgtgtccggtttggaggtttgagaggataccgttggatactatgaataacgtggatcgtgaggctgtgcttttttctgaattcttgagcaaaataaacgcaatgaaagagttgaaaacggcgtggttttgcctctgcaatggtaaactgccaagaaaaagaaattgtgatggtgtttttggatgttagaataacggagccaactttgggtctgtttgcgttattttataattccgtttcatg

SEQ ID NO: 49684 - DNA, 190 bp, Glycine max
  unsure (1)..(190): unsure at all n locations
  Clone ID: PAT_MRT3847_15873C.1
gaacaaaaccctaaaacatggagtcccacggcggnggacccctccgtgaccngcagcttncagtccncttgctccctncnactcngcntccgccttcgccacctcctccatgccanaagcgcaagtccncagtctgaggaccangcgcctancnttccctccgtcctcctanctccgccgacacccgnga

SEQ ID NO: 49685 - DNA, 335 bp, Glycine max
  Clone ID: PAT_MRT3847_15874C.1
agacatccaatatgatatagtttgtattgataactttaagcagatgcaagcctctttatctttacccaaaggcaactagttcaaacctcaactttgactagccaaagggaagcaaatacgcctcaggttggatttaatatgcaacaagccaaagaaactgttctctaggtttaatagtttaatttggtacaacctgcataatatattatatactagaagttcagacttacttgatcagcattttttttagattcttcaatatgttttgacaattcttgaacacgcttctcatataattccatattaggagttttagaattattagaaatgtctcc

SEQ ID NO: 49686 - DNA, 457 bp, Glycine max
  Clone ID: PAT_MRT3847_15875C.1
tttcaattttttattgggccaccaatctaggtgtacaggagaagaaaaaaatgacatacttgagtatacaaaaccacgcttagcaaaatggactgcaaacataaggagattagagatggtgttgtgactcttgtgagtcattcaagggaatgtgaatatcaaaaaagatgagggggcactatgaggatgggtgtgcactttttaggaaaaggtttggggtgtggattctgccactagggcaaaggagctttcttctccgacatcttttctttttctgaatttcctttctatggttttttttttttcaaatctcgtattatcagttctgattctggattttctataattctctagtatatatctaagttcctatcaagtatactttcactaacaaataaaacaattcccctaaaagactgggaggaatatgtctctgaaattgaactgacattgaaaa

SEQ ID NO: 49687 - DNA, 683 bp, Glycine max
  unsure (1)..(683): unsure at all n locations
  Clone ID: PAT_MRT3847_15876C.1
cgtcgtttcatttaacaacaatcaatcttttccctctttctcttaattcccaatattcttcacattcacttctcttctgccatgtgaacaaacatcaaacatagcaagcacaaaacaaaatcgcagttccatccatagcactgcctcaattcttcccccaaaaaaatgagccagtgtgttcccagttgggatgtcgaagacaacccaccaccctcaagagtctcacttcgctccaactctaattcaactgcccctgatgttcccatgttggactacgaggttgctgagctgacatgggaaaatgggcaactttctatgcatggcttagggctaccgcgtgtgccggtaaaacccccaacagccgtcacgaataagtacacatgggagaagcctcgcgcaagtggcaccttggagtccatagtgaaccaagtcacgagctttcctcaccgaggaaagccgacaccattaaacggcggtgggggcggcggcgtttacgggaacttcagggtgccgtggttcgaccctcatgccactgccaccaccacgaacaccgtgacgatggacgcattggtgccctgctcgaaccgggagcagagcaagcagggcattggagtcggtccccggcggcacgtgcatgngtggngtgctccacgcccgtgtggggtcatgctgcgggggggaag

SEQ ID NO: 49688 - DNA, 128 bp, Glycine max
  Clone ID: PAT_MRT3847_15877C.1
tgaaatttgttttgaaactgtaattctggaaaacaatgggaaaaattggtttactataatcaatatcacctgcccataacaattttcaacgatagccttgaattagtggaatttgggaccccctataa

SEQ ID NO: 49689 - DNA, 234 bp, Glycine max
  Clone ID: PAT_MRT3847_15878C.1
attctcttcagtttaaagttacatagtttgtcaatgtgttacttaatctacaatggctgcttcaacagtggctctctcttcatcatcagtggctggtcaagctatcaagcttactcccctccaaccctgagctgtgtgttggacgggttagcatgcggaaaacagcctccaaaactgtttcctcaggaagcccatggtacggacgagaccgtgtcacatacttgggcccatgct

SEQ ID NO: 49690 - DNA, 767 bp, Glycine max
  Clone ID: PAT_MRT3847_15879C.1
cagaaacgatctgtcatatcattaattatagttgcaaagatttctctcttctggtaaatactttaaactgctttttaaacaattcacaccatgattcactatagttgtaaatataagtgaacaaacattaaatccacagtacaacagtaaaagggtacacatttaagcaaacattgacttgtggagaaggtttcataattcacacggtatctaacaaactagaaacagctgcctagactaagagaaggctagagttttccactctcctagcaagtcattttctagtagtaaccaaatgctttccctttgagaaaattaaagactgactactcaaataccaaaatacttccatcccatgagcatgaagcaataacattaggtataacagggtggaaggcaacatctatgcatgcctggtcatgggcctgattttcttcacaactgataatcataaatgtagatagaacaatctgaagagccagaagcgagttttttcccgtccaagctgaaattgcacttgattgggaacccagagaccacatggccctcatattgcttatatttgttgagtctgtaaggtggggtggtagtaaagattacaacataattcccatttgattgagaaacaaaaattgaatcaaattggtggcgactcacacagggacacgtataagcttccacataaacatcctttgggcacttcaggcaagcaacaacattgccctgcttccccatcaagtgttgtggctctcgttattctccctttg

SEQ ID NO: 49691 - DNA, 986 bp, Glycine max
  unsure (1)..(986): unsure at all n locations
  Clone ID: PAT_MRT3847_1587C.1
ctgatctctctgagtattcttgttatcctagacatgttggaggcttcctatgcctttagttttacagcagctaggggcaaaagagcaactgacggacggtcccttctaacctatattgagcttatgggttctttgtttagtatggctaatacaaaggccaatcaaagtgagtctagtgcaacctcaccaaatgagacctctaagaggcaaagaatgtcacctgcctctgttgaagaatgtccaagacttattcctaatatcccggatgagttatcccttcagattattgctagacttcctagaatttgttactaccatgtaaggctggtgtctaggaggtggaaaacaactataacgagtttggaattatataaagtaagaaaagagcttggtacaactgaagaatggctatatctgttggttaggattggacaaaataaactcttatggcatgctctagacccccgttctcgaatatggcagagattgcctattatgcccagagttgtcgatgaagaagattcccaaaaggtttcttctaggctttggatgtggaacatggtcgaaggtatcagaattgctgaaattattagaggtctgcttggacagaaggatgtattggatgacatgcccttttgtggttgtgcttttggagctgttgatggatgtctttatattctaggtggattctctaaagcttcaactatgaaatgtgtatggcgatttgatccgatacaaaactcatggaagaaggtgaattctatgtctacaggtagggcatattgtaagacaggtgtcttgaatacatgctttatgttgttggaggggttagtcaaggtcaagctggattgattcctcttcaatctgctgaagtttatgaccccttctccgatacatggtccgatgtaccttagttgccgttctcaagagccggagtccttcccacagctttattggctgacatgttanagcctattgccacttgg

SEQ ID NO: 49692 - DNA, 717 bp, Glycine max
  unsure (1)..(717): unsure at all n locations
  Clone ID: PAT_MRT3847_15880C.1
agataactaattatgcaaaataaacctnnntagtattttatctaatgtcaactcttttattttcaattgttctttaaattttatttttttcaaacaacctgataacgcgtcagtgcttttcacacctatactatcttcttaaatttgaagatctcattttccatttgtttttacaatgagtcacaactcacaaattaatttgaacttacaagctcctataattaaactatctaaatctcttacaactaacacattcctatcatctcatcaactagagctgaacacataaacctcttcagtatattttttttaatattaaaaatgagaaaataatgagtataaatagtatctatactataattcaattacaaattaacatgtatgataaatttattaactttataaataattatcttaaaattatttgtatctaaatattttttatttggttaacaatgcattgaaagtactgcataaaaaaaattaaactttttaaaaaatgagttttattgacaaatgaaaaaagtcacgagcaaaaatgacctgaatcagtgtgttctcgaccagtacgacaccttcttggatatggatattgtttggagcctcnnngaacaggtcttttgaggttaatgttagaatcaggatccccaagatcattgtacacatcnnnatcatatattctatcnnngctcttgcgttctccttctccattccctc

SEQ ID NO: 49693 - DNA, 246 bp, Glycine max
  Clone ID: PAT_MRT3847_15881C.1
aatagataacgcatttgcagcagaattctgtgccataaattatacattagagaccttgctgacaatattcatattaattaatacatgcaaaatttgcatctcaccatttattttaccagcttggctacatcaaaaaagcatatgaaaattttgcatgtgttaaataatatggaatattgccagctaggtctcttgcgaaacatacactgttgagcatgtggcggaatatgcgatagccccccaccg

SEQ ID NO: 49694 - DNA, 315 bp, Glycine max
  Clone ID: PAT_MRT3847_15882C.1
acaaactatctggctgcctttaattaaaaggctggatggacactttaaatattgttaaagtaaccatgactaccacacattcctacactggaaaccatatgcttttggattctttacacctttacttgataagatccatttcttctgcactgaacattgttccaaccatcactgtatcttccaatgctgtttctctagtcgttccacatcttaaggtcaagcttaatttaatatctctccttgtgcctacacccaatgtttcattttattacctttttttgaatcttgataataaagatcttactgcttaagatt

SEQ ID NO: 49695 - DNA, 430 bp, Glycine max
  Clone ID: PAT_MRT3847_15883C.1
cccactcgtccgcggacgcgtgggtgctaggacttggactgtcaagtgtaacccagagtatgatggaatgatcttggttctctctcgctccctctctctctctttgtctctctttcacacacacacacacagagggatgtagatcctctgaagtgagcttgtttctaaagcgaagggtgtatcgatccttgatttatgttaaagtggatggtgagcttatccaactaaaatttgaaggtggatacacccttaattgcttactttacatataaacttgccttagagaagctttttcccacacccacatgtgcacacatacaaatatgcatttttaatgacttctaaatctcttgctggtgtccatttgttggttaaaggtggtctgcatactaaattatcatgtaggggatatttacttatttttcatgga

SEQ ID NO: 49696 - DNA, 494 bp, Glycine max
  Clone ID: PAT_MRT3847_15884C.1
tctttttttgatttgttatatccttttttttgctataacatgggttttgaggggttgttcttttcttgtaagtagaccacttccgtttttatctattggtgagttttggggccggccccaaacccgcccctatttataggccccagccaaaagggccccagttcaaaactagggggcatagatgggacccctacacaaggaaagggggtttttataaaaagggcagcgccacccccaaatacggttgcacccctggggaaccaggggacgcgggccaaaacccccaaacaagaaagggggggcggctcccctcgaagggggggcgaagaattttgctgcgttggggcaacgtccatgaaaaagggggccgggagagggaacgcctaggggagacgacccggacacccttaatgaaaaggggccacgcccaaaaagattgggggggggggggggaaacgaacccccgccgatacgggttgagggggggggggggg

SEQ ID NO: 49697 - DNA, 617 bp, Glycine max
  Clone ID: PAT_MRT3847_15885C.1
gcacgagattggtttcattgaaaatattttaaaggttcattattattagtgtgtagatattagaagacaaatgtagctcatgcagcatattctcaatgttattcagagggttaaaagagtgatcttttagttttccatgcaaactcctcttggtcatgtgctatgaaccctttggtaaccaccagccagatactgtttgaatcttgacttgagccaaaaaaatcataatcacacttttaaaaggtacatcgcaaatatttatgcagacctacctcattttgggggttattttatcccataacccaagaaatcaagtgttcacggcattatatgtcctgattgtcctctattggcaccctcccttcaactacctcttccagatgaaatgaaagaactccaatctaaattaattcagtaaaacaacttttgacaactgttattaaataaagctattcaaaattgcatgttccattggggatccagttgtcctaagaagttggatattatttcaatgacatctcaaatatatactagagtaactctcaactctacaacaaactattcaaaagtttgaaagtgagaaagatgacatccaatggcactaaaaaaaaaattga

SEQ ID NO: 49698 - DNA, 570 bp, Glycine max
  Clone ID: PAT_MRT3847_15886C.1
tttttttttttttttttttttttttttttttttttttttttttttttttttttggaaacccaaacttcaatttgaatggcttatttaagttccgggaattttagcaaaccagggcaaatttgtttccccccaactgaccttaaagggtaacataaaaacagggttttttccctcaaagggcaaaagtaaaaaaggaaccaaggttaaaaacaatcattttttgacccaaggggccccacaccaaaagggggttcctccactcggggctggagaaaaagttatttccttttcaacataaaacccgatgaaaaaggggaccttgggactggggtccttggtttcctttttccctaaacgggcctttggaggggggaaagggccaacttttatttgaatggtctcaaaaacaaaagccagtattttttttttaaaaaaaagtctgccttcaaatgttaaccggccaagggggccaaaaaaaaccacattttaaaaccttttgtgggcgggaccaaacctctagaaaggtggggaaggaaaaattccccccccttttaaattgtttttcctccg

SEQ ID NO: 49699 - DNA, 155 bp, Glycine max
  unsure (1)..(155): unsure at all n locations
  Clone ID: PAT_MRT3847_15887C.1
ccggcggcgacccacgcgnnccgctncacggnngctggcgcctncnttgtgcgcgcttactacgntcgtcacgggttctttttggttggctgcgacgaccaccaccaccgccaccgncacgcccaggaggaggagatgccgcctctgcgcccccc

SEQ ID NO: 49700 - DNA, 1355 bp, Glycine max
  unsure (1)..(1355): unsure at all n locations
  Clone ID: PAT_MRT3847_15888C.1
gctcgagcacttgctgaaaaattcctttttcatcttatatgtctatatttggctttagtttaggtatgaagcaggtattgtgattagaaatatgtgcttgaaaaatcatgctttgggtgatgtcctacagattttgaacatgttgattaccattaaaaaatggattgtgcatcaacaatctggctggcaaccacttaacatcactcttactgaggtcaattctgattcagaggacatagcatgcccatagcttcaaaaggcatgcagtgaaaatgaaagagttactgaatatattaaaaggcagttggaccaggaaactaggaatgatctaaataaatctctttttctaatgcgaatcaaaggtaggtagtaaataatgaactgtagtatgatcagtaccttgaatgctacatcttactagcgtggttattggtagggttcttcagttctgcccaagggagaaatgaaattagcttttggacaaaatatgaaacttgaaacatgaaaaactctaaagtctcttccggttgccgaggttacaaattctcaaccactatggtctgttatacatcatactatcatagtggatctatcttggaaacaatatgcccttctgcttattttgttactcacattttgcttggagattgacttattgaactaaactccttggatcctttgacttaagcctcctaatagcatccaggatattggccaactatgcattgctggaagtatcttgagtttcacacaagttaggtgatgtgttgtttgtatatcacctgagaaatggtctaccaaatcatattgttcaaggattatgtcgaatgcaatccagaaactgttgtatagcctattgtttattggttatatcttcaaaatgttgccgtaactaccagacagactacattaaattgctcaggattggaggaaactgtactcttaagtttatccttgaagctcatgatttactatattgacccatgcacaaggcatgtttctggtggattttcgatggagtttttggaaataatgaatgatcgtgaaaccaaaggtggcaattctactatatttcttgtgttgatggtgcttatagagctgtgatttttaatgtttattatttatttagagttggcttttggaatgttattgtcgaagttgaaatgggaatttgggtcattcagtcggcaattggtctctggtcctgctgtcttgtattttcttttaatgctagtaactttgtgtacaaatagtctatcttatctttttgaatgtgttttctgtaatgtaaattgtttaatgttagtatagtcacagttttttccaaccnnnnnnnnnnnnnnnccancaacaac

SEQ ID NO: 49701 - DNA, 456 bp, Glycine max
  unsure (1)..(456): unsure at all n locations
  Clone ID: PAT_MRT3847_15889C.1
ancncanngcagnaaccntccancantcatnnatncngaanngtgcncagcctaagtnatgagtgccccccagcagnacaaacncggactacatagaganaganacctaacagnnagagnacgcgcatnaatnacagnannnnggtacacngantacagcggcgacaaagtnagcaaancgatananngngnagngatanatccacangtacagancnatgntagcgttntcnntnanagnagananncgagaanacaacaggagtgatnnactnnnagagtnncgnnnanncatagnggtcnnnnagagnacngcanagntnnganntngtnnnaactnngcannnggnnnacggnnnnnantngnnagggcccnanctgtcantgnnagaannnnnncganacagcnacnnnggnaaggannngnnnnaagnncgacatccannnnggaggatc

SEQ ID NO: 49702 - DNA, 293 bp, Glycine max
  Clone ID: PAT_MRT3847_1588C.1
ctcacgcgtgcgaacgaaaaaaaaaagaagagcaattttccctcaccaaagaagaagaagcgggctatggccgatcaacttaccgttgatcagatttacaaggtcaaggaagccttcggtttgttcgacaaggacggcgatggggcgttctatgtctctctctctcaagttatgcgtataagagctgatttgatttatagcgtcgaggtttttgcagatcggagatcctttttgtgataatggaataggaaaattagatgaattctgattctatatcacaatgctttttttgt

SEQ ID NO: 49703 - DNA, 394 bp, Glycine max
  Clone ID: PAT_MRT3847_15890C.1
agaacccttgggcggacccttgggcggacccttggttttaccctgaaaaccccgccggggccccccggggggccacccttgggtttacccaggaaattagagccgggcccaggaggggaaccccttttccctgtgggaaagggttttccgcccgggattccacacggcatacagcccgcccggaaaaaaaaaaacccggggcccctacagaaaaaattaacccccataaattgagggggccccacgggggggccccaaggggggaaaccccccaaaccaggggggttgacgaaccggcccccccccaaggaaaaaaacttggcggcccgggcgcaaaagggaactcccccccccccggggaaaggggctttattttttggcccccaaggggttt

SEQ ID NO: 49704 - DNA, 288 bp, Glycine max
  unsure (1)..(288): unsure at all n locations
  Clone ID: PAT_MRT3847_15891C.1
cggctcgagctcgagccgagccatcactatctactgtcacatggagagctttcattgaacaaataccatctactagacgccttgtgtcggtggttactcatcctctaccttctcttacattgatcattgactgaactctttctctattttcttacaaaccctaatctgtttttttcgggggggggagnncaannnacacggncntnaccnaaaaaaaaactnntaggggggggtgtggggggatcaattaaataacaaaaaaatggctcaatnntattctaacatgct

SEQ ID NO: 49705 - DNA, 189 bp, Glycine max
  Clone ID: PAT_MRT3847_15892C.1
agaaaagagacacagggcaccgttttgagtaaatgagattcagtggaacacccagcagcttatacgcaacgcaacattattatctacagtttatgattcgtcacgtaagacagaagaaggtgttagggtgtcacctgagaacaaaatgttggggatgcttctctcttctcaaataaaaaccctattctt

SEQ ID NO: 49706 - DNA, 248 bp, Glycine max
  Clone ID: PAT_MRT3847_15893C.1
acgcttccgcttatgtgtttttgctttcaaccaatggaaccgaggggctttcacaactgccagtaatgttattattacaccgcttagctttagctttaaacctaaagctatagtcgtacatagaaaggccatagtcctgactgatttggttgtgaactaccaacaaatacacagccttatctggcgcaatgccaatatcgttgcatctctcttgaagtgctaatgaaatgtgcaaattatctatatat

SEQ ID NO: 49707 - DNA, 236 bp, Glycine max
  Clone ID: PAT_MRT3847_15894C.1
tttgtcgcgggggcggacgcgggggcggacgcgtggtattttctgggaagttggaagagatatattctcaaaactgaagctgaacacatggatggttgtgatccatcaggattaattattctacaaaaagagcggtcttggcttgcgcaaggatgcgaagtaggggagcgagttggcccacttgcctgaaacttcaatcacattggtactgaatcgggcgacacttatatggaaag

SEQ ID NO: 49708 - DNA, 232 bp, Glycine max
  Clone ID: PAT_MRT3847_15895C.1
gggcctcctctaccacttgcgggacgacaccgtcaccggaccaagggcttatgacggtctcggcaaggtctccaaaacaccacagcttcactttccgacctagctcctgcaacgaaacggacgacggcagctgatgagatcgaacggagaccaatcacccgatgaagccactagagtgacgcatactatcatgatcgtgaaaccgcccggacaccagagtggatcgcctccg

SEQ ID NO: 49709 - DNA, 264 bp, Glycine max
  Clone ID: PAT_MRT3847_15896C.1
tggatgattcttaccctctctatgactcttcaacctgccctcacattcgtaaggaatttgattgcttgaaatatggtcgtcctgatcaacaatacctcaaatacagatggcaacccaacgaatgcgacttaccaagatttgtgggaaagatttcttgacaaaacttaaggggaagcagatcatgtttataggagattcagtcagtctcaaccaatggcaatcacttatatgcttgcttcgttcttctgtgccctcaactgaaat

SEQ ID NO: 49710 - DNA, 374 bp, Glycine max
  Clone ID: PAT_MRT3847_15897C.1
gggatctagggcagtaaacacctttgttacacttatttgtcaacaactctctttgagaaaggatgatcgttttggtatgggtgggacattttttaatgcaaatctgtatcctcaacgttctatgggtggtgttccagatcctcttcgccccaagcctgatcagttgtccctctcacaacaacgtgtctatgatgactttgttcagcttccctggcaaagccagtctatcccgagctcacattctatgtctcctgatgttgttgctcaatcttgcactgttcttactgacaccaatgattctgtatcacgacatagttaccctgtataccctttcaccacaagttatgaaggagtatctcgaccattatatgata

SEQ ID NO: 49711 - DNA, 173 bp, Glycine max
  Clone ID: PAT_MRT3847_15898C.1
agatattcaacccataaaaatgctttcttcactggtcactctgcagaaatgcatgccgatatattcttgcattgtttttccacaacatttattgccctagaagatgaataaaaagcctaaagctaaatcatggtccctttttttaacaggggggatgccagggaattaattta

SEQ ID NO: 49712 - DNA, 195 bp, Glycine max
  Clone ID: PAT_MRT3847_15899C.1
agatttccttttgcttcttaccaataacaaacctccctggaagcttctctctgtgggcttccataggaaagatctccgccctgtatatgatggaacttgctcctctttccttttctgattaatataattatttatatttaactggagagagagagacatataaagagagtcatccttcttcatacatttaatacc

SEQ ID NO: 49713 - DNA, 313 bp, Glycine max
  Clone ID: PAT_MRT3847_1589C.1
aagcacacccacgcatttctagaacaggaggatcacggctgcacagagttctacatgactaattcttcatgtctagatagtatcatggactaagcttgagcttaaatcaccaatttgcatagcttattgcgccaaagcacttgggttggtgacaagaagagcaccaccagagtgatgaccaagggggagacacagcccagatggccaagccagtcgaaccgacggtgtaaacataaccggtgggagaccagaccttgaggtggtaaataggactgtaaccagcgacattagcaccccattggtctacaaactg

SEQ ID NO: 49714 - DNA, 346 bp, Glycine max
  Clone ID: PAT_MRT3847_158C.1
cctgccgcgtcgtagctcggattgctttgggcggaggcctcgataaagcggcaccatcgctgaggctttggtccacggcactcgccaccccaccatcccctggagtgactcagaaacacaggggtttccactgtagatctggagtccagccctaggccttttttatgcgagggtggttatgagggagtattttgaggaaccatgtttaaaaggatgggctgaagtgcgtgccttgtaaacaataatcttgggcgcgaccttgatagcccttacctgtgctgctgaggacccctgatcgattgtccaaatagactggaccgcaacaccctatgtccccttcccttgc

SEQ ID NO: 49715 - DNA, 603 bp, Glycine max
  Clone ID: PAT_MRT3847_15900C.1
atgggttttgggcattttgggaggcaagcaagcccatcttccaacaagcaaattgtttcccctacagcagcacttggcacaaagcagcgacggagtgaagctccgtacaagggtgttcaagccacagaagaagcagatgggaacttggggattgttctgctgcacccgtattctattttgggtggctgccaggctctcctcaatggttacaccgctttcacctttgacatgagaggcgttgccaagtccaccggcttctcccaagttaaggatgttgttgctgtctgcaactgcctttccaacactttctctcttcccaggattttgttgcttggttcttccgcaggtgcacctatagcagggtctgccgttgatcagattgaacaagtcattggttatccatcctacagtcaccaaaaccacttcattatgggaacacaagatggattcaccagtgtaaagcagctgaggaacaagcttaattctgcagcaggacgtgtagaaacacatttaatcgatggggtaggccatttccagatggaagggcctggttatgatgctgagatggtggatctcatcatcaagtttattgcatcactataa

SEQ ID NO: 49716 - DNA, 615 bp, Glycine max
  unsure (1)..(615): unsure at all n locations
  Clone ID: PAT_MRT3847_15901C.1
cagagaactcacactggaatcgttcaccgtcgaaggcagcgacggagtgaagctccgtacaagggtgttcaagccagatgctggaacagaagcggatgggaagttggggatcgttctggtgcacccgtattctattttgggtggctgccagggtctcctcaaaggaatcgcttctggcttggctctaatggttacaccgccctccctttgacatgagaggcgttggcaagtccaccggcagggcttctctcaccggctcctccgaagttaaggatgtcgttgctgtctgcaactggctttccaacactttctctcttcccaggattttgttgcttggttcttccgctggcttgagtttacatggacttgtggtgttaatccacatgcttcttgtctgtgatagtttcccccagttcattcacgagctgctttaggagatgtagtaattcgcaccatgtgttgcatcaatgttcaagcctgaaagagttgtcatatatttgagttatttcttttattacaggtgcacctatagcagggtctgccgttgatcagattgaacaagtcattggttatgtaagcataggntatccatttgnaatgactgcctcaatcctt

SEQ ID NO: 49717 - DNA, 621 bp, Glycine max
  Clone ID: PAT_MRT3847_15902C.1
tcattcagttggcactacacggaactcgatgacagagacctcgagatccgaggtaggactctgttttttgtcatcgtactcttctccattattctcctcgtcactgttctcttcatctacacgcgctgggtttgccgctaccagggacgcctccccaccaccgcgttcaccgccgcagccgcccacgcgccgccgctcgcgcagcctcagggaatggacccagcttccatcaagaaattgcccataatcctccaccacgcgccgtcggaccgcgaggaaagcgcgtgggacgaaacggagtgctgcatctgcctcggcgagttcagagacggcgagaaagtgaaggttttgccggcgtgtgaccactatttccactgtgattgtgttgacaagtggctcactcatcactctagttgccctctttgcagagcttctctcaaggttgaatcttccttccctggggttcggaaaggtcatataattttcctcaacgccacttgttggataaaagtcctcaaagacgttgctcttctgagtcatccctgtgtttggtctactaattggatatgtggtcctgcttcttaggttatgttgttccttggatatacaagcagcattcat

SEQ ID NO: 49718 - DNA, 2167 bp, Glycine max
  Clone ID: PAT_MRT3847_15903C.1
cccacgcgtccgcaaccaaattgtttcccctgcacacttggcacaaagtgattaataagactgattgattcattgctgtggttgtgggtgtgatgtcagagaactacacactggaatcgttcaccgtcgaaggcagcgacggagtgaagctccgtacaagggtgttcaagccagatgctggaacagaagcggatgggaagttggggatcgttctggtgcacccgtattctattttgggtggctgccagggtctcctcaaaggaatcgcttctggcttggctctcaatggttacaccgctgtcacctttgacatgagaggcgttggcaagtccaccggcagggcttctctcaccggcttctccgaagttaaggatgtcgttgctgtctgcaactggctttccaacactttctctcttcccaggattttgttgcttggttcttccgctggtatccttcactctcagatctatcacttttcttgtctcaatctttttactgtttaacatcatcccatccgctttttttacctacaaatctctcaagtatcattaaattactagagtattcttttaaattttgtctgtgaaaaaaggtcttttttttttatttatttctaacaaaaattgtctctcttttttaataatctttgaactggccttattgtttcagtatatcaaatgtctgaattgcttgattagctcctggccgccatggttcataaacaaattttgagctttctgtctccctgattacattttggtattccggccagccttatgtcaaatttaaaggatgccttagttactagttgcattgctgataagtttagtttgagacctttaatcttaatgccttccaagtttgaaagttgtttcatgtttggataaacactccatgtgaattaaaaattgcaatgacagctctatctactgtccggttttaaccttgtaggagttgaaaggaagtatatatcttttgttcttggattcgatatagactgatttgcagatcaacttgtttcccattttgagtgttgaaatgatatccaactaattatgcaggcttgagtttacatggacttgtggtgttaatccacatgcttcttgtctgtgatagtttcccccagttcattcacgagctgctttaggagatgtagtaattcgcaccatgtgttgcatcaatgttcaagcctgaaagagttgtcatatatttgagttatttcttttattacaggtgcacctatagcagggtctgccgttgatcagattgaacaagtcattggttatgtaagcataggttatccatttggaatgactgcctcaatcctttttggacgacaccacaaagccatcctacagtcaccaaaaccaaaactcttcattatgggaacacaagatggattcaccagtgtaaagcagctgaggaacaagcttaattctgcagcaggacgtgtagaaacacatttaatcgatggggtaggccacttccagatggaagggcctggttatgatgctgagatggtggatctcatcatcaagtttattgcatcactatgaagacaaataactgattgtgctgagtgtgatttgactctactattgggaattgggattagtttgtgtacaaaatcttgttgaatctgcgattgcaatgtttatttgtgccccctacgcctatgccaccttctaaaatgaaagaaatcagttacccacatagtaagcatttctgctgattggataatgagagagaaggggaattacaagccggtgccggtggtgtaaaaaatgggggagtttacttgactgcgttgctgcagaagcctgtgtccagatgagggtgctttcacgcaaaaaagtttgatatatgctataagaacgataagcaggtcggtgtatcctgatttccttgctcaaaaggtgtttatggggtgcgtaatgaggcaattttcatgcccactttgatggatcatagaatcaactcgttgaaacaaagataggaggaagtcaatgtcaggtgtatatccatggggacttggggaaactggtggaggaaaatagtttttggtgatcgttttttgtatcctatttgattaaattatgttattccagttaattgttttgaaataaatttaagatacgccattggctgggtggctttatataattct

SEQ ID NO: 49719 - DNA, 1622 bp, Glycine max
  Clone ID: PAT_MRT3847_15904C.1
cgggacaattactactacgggacggatatctcggctcttgcctcgatgaagaacgtagcgaaatgcgatacttggtgtgaattgcagaatcccgtgaaccatcgagtctttgaacgcaagttgcgcccgaagccattaggccgagggcacgcctgcctgggtgtcacacacttcacaaattgccagtgcctactaatagcaattgcaaccaaacagtgtctcatgatactgtttgttctgatgccccaccgtcgaagccctcctccgccactcgccgccatcgtagctctcccttctcacaccgtggaatcaaatcacgatgtcgagcccagattctcgatcattcagttggcactacacggaactcgatgacagagacctcgagatccgaggtaggactctgttttttgtcatcgtactcttctccattattctcctcgtcactgttctcttcatctacacgcgctgggtttgccgctaccagggacgcctccccaccaccgcgttcaccgccgcagccgcccacgcgccgccgctcgcgcagcctcagggaatggacccagcttccatcaagaaattgcccataatcctccaccacgcgccgtcggaccgcgaggaaagcgcgtgggacgaaacggagtgctgcatctgcctcggcgagttcagagacggcgagaaagtgaaggttttgccggcgtgtgaccactatttccactgtgattgtgttgacaagtggctcactcatcactctagttgccctctttgcagagcttctctcaaggttgaatcttccttccctaagattttgattcaggaaccaccccttagaattgacttccagttctaggtttttttctttttttctttttttacgagagaaaattttattcgaatcgaataagatttttatcggcaaaaaaactcttgtgtttaatgcaaatgtatatgcagaattggaatttgaaaccaatgattaatctgaaacaaagtttgtttctttttattttggtcttaatcttacattccaatattgttgaaaaatcatacccgtcagcaagtttctcgatcgactcatcatgacttcaagtctctgggtgttcatacactagatggtaaatacatgtaaaaggaactcgtgtcagatgtctgctcatggatatatagaattttgaatttttttattggactgttacagtgtttgggttgttgtggagaatatttttagacagtagcacatggcaaaggagggagagaatgtggagtatgtccgtgatagtgttaaattatgatatgttcccacgttggatgatagacgaccctggggttcggaaaggtcatataattttcctcaacgccacttgttggataaaagtcctcaaagacgttgctcttctgagtcatccctgtgtttggtctactaattggatatgtggtcctgcttcttaggttctataattggatttaatcaagattttttttattagagattgagaccccaaaaagataatgggtgctcttaagttacggagctgcttgctcgttgccttaggtactgcccaatcagcttctttaatatattttgctataaaatatgaatatggaaggaattccatattacgatt

SEQ ID NO: 49720 - DNA, 805 bp, Glycine max
  Clone ID: PAT_MRT3847_15905C.1
gcccggtgcagcggcgtgctcggacctcgcgtgctcgggatggccggctacctgcgggctgtgagctcgctctgcagagcctcgggctcagcgcggacctgggcaccggcagcactgactgtccccagctggccggagcagccgcggcgccactatgctgagaagaggatcaaggtggagaagccggtagtggagatggacggtgacgagatgacccggatcatctggcagttcatcaaggagaagctcatcctgcctcacgtggatgttcagctcaagtattttgaccttgggcttccaaaccgtgaccagaccaatgaccaggtcaccattgactctgctctggccacccagaagtacagtgtggctgtcaagtgtgccacaatcacccctgatgaggcccgtgtggaagagttcaagctgaagaaaatgtggaagagccctaacggaacgatccggaacatccttgggggaaccgtcttcagagagccaatcatctgcaaaaacatcccccgccttgtccctggctggaccaagcccatcaccattggcaggcacgcccatggcgaccagtacaaggccacagattttgtggtagatcgagctggcacgttcaagttggtcttcaccccaaaggatggcagcagtgccaaggagtgggaggtgtataacttccctgccggaggcgttgggatgggggatgtacaacaccgacgagtccatttcgggcttcgcgcacagctgcttccagtactctatccagaagaaatggccgctctacttgagcaccaagaacaccattctg

SEQ ID NO: 49721 - DNA, 125 bp, Glycine max
  Clone ID: PAT_MRT3847_15906C.1
gcaaaattcgcagcaaccgagctgctcttgaggacggaaacaataccgtatctaggtttcgctgtagctgaattgccatggtatctacagcgatagccttgtttgccttcattctcgccgtcaac

SEQ ID NO: 49722 - DNA, 511 bp, Glycine max
  unsure (1)..(511): unsure at all n locations
  Clone ID: PAT_MRT3847_15907C.1
tttcatttcgtgtgtttcataaattgttgtaaaaaaaactcgtgccagatgtctgctaataatggatatatacaattttgtattttttatgggttgtcgtggagaatattttagacggtagcacatgcgagaggggaagagaatgtggagtttgtctgtgatagtgttaaattatgatatgttcccacgttggatgatagacgaccaggggttcggaaaggtcatataattttgctcaacgccacttgttggataaaagtcctcaaagacgttgctcttctgagtcatcccagtgtttggtctactaattggatatgtggtcctgcttcttaggttctactctataattggatttaatcaagatttttttatttgagattgagaccccaaaaagattattcaagaaaatgggtgctcttaagttacggagctgcttgctcgtggccttangtactgcccaatcagctttttttttttggataaaataagaatatgattatggaggttcaca

SEQ ID NO: 49723 - DNA, 884 bp, Glycine max
  Clone ID: PAT_MRT3847_15908C.1
actcctcattttgccagtgcctactaatagcaacagcaaccaaacagtgtctcatgatactgtttttgtttctgatgccccaacgtcgcagccttcctccgccgccacccgccgccgtcttagctctcccttctcataccttggaatcaaatcacgatgtcgaacccagacactcgatcattcaattggcactacacggaactcgatgacagagacctagagatccgaggtaggacactgtttttcgtcatcgtactcttctccattattcttcttgtcaccgttctcttcatctacacgcgctgggtttgccgctaccagggacgactccccaccaccgcgttctccgccgcagccgtccacgcgccgccgctagcgccgcctcagggactggaccccgcctccatcaagaaacttcccataatcctccaccacgcgcctgcggaccgcgacgaaagcgtgtgggacgaaacggagtgctgcatctgtctcggcgagttcagagacggtgagaaagttaaggttttgccggcgtgtgaccattattttcactgtgattgtgttgataagtggctcactcatcactctagttgccctctctgcagagcttctctcaaggttgaatcttccttccctaagattttgattcaggaaccaccccttagaattgacttccagttctagcttcttcttcttcttctttttttttttttacaagagacgatcgtatttatttgagtccattgagattattaagggcagaaaaactcttgtatttaatgcaaatatacatgcagaattggaatttgaaacaaatgattaatctgaaacgaagtttgtttctttttaaaaaaaaaaaaaaaaaaaaaaaaaaaaaaaaaaaa

SEQ ID NO: 49724 - DNA, 328 bp, Glycine max
  Clone ID: PAT_MRT3847_15909C.1
gccttcgtccttttttttttttttatatgatttttggtgttattttttgattttttttaacacataacacattttcatatgtacattacgcaggagttgggccactctccacataaaaacaaaggatggcaaaggtccatgactccacacatgctccacctagatgtaaagggtttacattttttcatacaaaatccaatgactgttgtttctaaaaggaataaaaaacattggctgatcctgttaatgaaaggaaaccaaagcccacaaacattggcttgattaatgttgacgatgttgctcccaacttgatttagcatgaaccgtt

SEQ ID NO: 49725 - DNA, 305 bp, Glycine max
  unsure (1)..(305): unsure at all n locations
  Clone ID: PAT_MRT3847_1590C.1
taccgaattgntagcccaagcgggagcccgcgccagagcgggagagcgcgggcgccgaagaccccgacaagaccaacggcagggagggcacggaggcccgacacgnagccaagggagaggcaaacgccggnggcggcgcnaccgggnggaaacggaagcgnggccgaccggccaagggaagccgcganccgaaagggaggaccccacccaggaggcacaaaaaggaagaagaggaggaccgcnccacaagccacgacggaggaagccgngngcaangagaacgccgcagaggccccacagcggaa

SEQ ID NO: 49726 - DNA, 251 bp, Glycine max
  Clone ID: PAT_MRT3847_15910C.1
gccaaacacggggattggattatatatgctagagggctcctttgcggatctctaacaagcatgagacaaaaaagctcttgaacttgcagataattaacactatcatgaataaaacacctgatttaccctcggacattgaaagatctctctcatattaacatttgttagagattgtgccccaaactgaggaataaactatgggctgaattctttctaatctgcagggcggaatcacatatatttttttttaa

SEQ ID NO: 49727 - DNA, 171 bp, Glycine max
  Clone ID: PAT_MRT3847_15911C.1
agacgatttatgacgccttcagagagccaatgtgtcttcatagtttcatacctagcaaaatttctacgcgggcttgatggtaactgactgggatcaggagtcatcctaagagaaattgatgtacgagtctatagaagactcggacaatcattacctcatctgctactaact

SEQ ID NO: 49728 - DNA, 189 bp, Glycine max
  Clone ID: PAT_MRT3847_15912C.1
gtgtatgtggagaagcaacactctcacccttggaagcatcaacaatatccacttcctccttaaccaaagtaatttcagatttcctttgttgaggagtactttcaacttcctccctaaccaaagtaatttcagatttcctttgttgaggagtactttcagcattcaaattaccacatgtagtttcgacca

SEQ ID NO: 49729 - DNA, 244 bp, Glycine max
  unsure (1)..(244): unsure at all n locations
  Clone ID: PAT_MRT3847_15913C.1
gcactcataacaggattcgcatcaatagaaaaagttgaaatggaagcaaatagtggagcaagcgaacccaattcgaatgcaaccataaccataaacgtgaagttcagtggcgtctctatacccatctcaatctcacccaactcaaccatcaaagacctcaagtcccttcttttaccttccaccaatgtcctcctngtggccaaaaactcatcttcaaaggaaaggttttggaagaccccatgac

SEQ ID NO: 49730 - DNA, 1369 bp, Glycine max
  Clone ID: PAT_MRT3847_15914C.1
cccacgcgtccgtacggctgcgagaagtccgcccacgcgtccgcccacgcgtccgcccacgcgtcctacggctgcgagaagacgacagaaggggaccgcgcaccacactgagaggaagagggagtgagagagagtgttcttcgtttgctaccttctctcggaaaatggttacgttcaggtttcaccagtaccaggtggtcgggagggctctcccaacggaagcagatcagcatccgaagatctaccgaatgaagctctgggccaccaacgaggttcgcgccaagtctaagttctggtattttttgaggaagctgaagaaggtaaagaagagcaatggtcaagttcttgctatcaacgagatttttgagaagaacccaaccaagattaagaactacgggatatggttgcggtatcagagtaggactggttaccacaacatgtacaaggagtaccgtgacaccactctaaacggttcagttgaggcaatgtacaatgagatggcttctcgccacagggtcaggagcccatgcatccaaattatcaagactgcaaccatcccagctaagctttgcaagagggagagcaccaagcaattccacaactccaaaatcaagttcccattggtcttccagaaagttagaccacctaccaggaagctgaagaccacatacaaggccaaaaagcccaatttgtttatgtaatgtggttgatgaatgtatcagaaatacttaagggtgtcttccaggcgttttcagtagaaacgtactcgttggttttttacttcctgatttttgtttgaggtttttttattgggtttatctttatgtttctgttggatattatcttgatcattatgataattgagtagtagaattgaaccaatttatatatatggccgtcaatccagatcttatttgtcttcaaaccagcctacagggtaggcatgcctttgcagacttctcttctactcaatttccctcgcgaattcaagggttcttttgacttcactgatgggcatgttaagcctgtgaagggaaaggaaacttaactggatgaaaggctgcaatattagaatcggaccgagtaccttcattgtaagtccattattatgcccaggaacttgtttccggagaggaaagaggtgtagaattggacaatataattcgttcattgtggcatcacttggtatcgtgaatggtatggatatagggagtgggagtccaaaaactgataaattcatttgatctacacttacgatgcaacaactgtcaccgaagcaaaattactgctgaaagaggcacttcaagcagaggttggcttgcctgttgacaggaatatccctctgataggcttcattggtaggcttgaa

SEQ ID NO: 49731 - DNA, 768 bp, Glycine max
  Clone ID: PAT_MRT3847_15915C.1
gtcacacaaggattggataaaaagttggcttttgttgcaatcacaaaaacaacacattctgctatctaattgcatccaccttttacacccttaacatttttttttctattaaggtgtcagtaatgctgttgctaggttacaaaccatacgaagatatacagaacaagatcatggcaaaagtttcaaaggttgatttatctagcaaagttcattgatagtgaagtataataacatagacaagaacacaattaatggctggaatgcttcctggagttgaatgtgctagaaggagaaggtttcgtcgatgttcggattcaaattcaacttctttgggatcacatgcatccacaaggcgttcttctttctgtttgtatgctagtaaccatgatcaatgtcgccttttctcatcctcttccctggtttttacccaatacccctaaattgaatgcctttttgatttctatacatgtttttcatctccactgttgatgggtgtgtgctaattttcttcctggatttgaatggaaatagcaaaaaagcatgttataccaggcacaccctgctgagaatatgcgaggagtggccagagaagccaaactgtgcaattgtgagtcttggttggatgaatcatgaattcaagaattttggcttaatgacttgcattttgagagaccaatagtttgacatttgaattttgaaaccactgttgtatctcttagaattgtgggttgagtttaattctatcctccgaaattagcttgtaaggag

SEQ ID NO: 49732 - DNA, 2901 bp, Glycine max
  Clone ID: PAT_MRT3847_15916C.1
ctttccctttctctctttttttccttcatcaatggctggcaggaagatggagagagagtgttctccttttgctatcttctcttcagaaaaagggtaccgttcaggttctgagagggaagggggagtgaggagagagtgtcctatcgtttgctaccttctcccagaaatggttaactgttcagggtttcacccagctaccagcgtggtcagggtagggctctgtgaggaagagagagggagattctttgtttgctaccttctctcggaaaaatggttacgttcaggtttcaccagtaccaggtggttgggagggctcttcccacggaagcagatcagcaccccaagatctaccgaatgaagctctgggccaccaacgaggttcgcgccaagtccaagttctggtattttctgaggaaactgaaaaaggtgaagaagagcaatggccaagtgcttgccatcaacgagatttttgagaagaacccaaccaaaattaagaactatggtatatggttgcggtatcagagtaggactggttaccacaacatgtacaaggagtaccgtgacaccactctaaacggtgcagttgaggcaatgtacaatgaaatggcttctcgtcacagggtcaggagcccttgcatccaaattatcaagactgcgaccatcccagctaagctttgcaagagggagagcaccaagcaatttcacaattccaaaatcaagttcccattggtctacaagaaagttagaccacctaccagaaagctgaagaccacatacaaggccaaaaagcccaacttgtttatgtaacgtggttgatgaatgagttacaaatacttggtgtctatcaggcgtttttagtagagacgtacccgttggttttttactgccagattttgtttgaggttcttttagactattttcattgggtttatctttatgtttctgttggatattatcttttgatcattttgataattgagtagaattgaacaaaatttatatatatggctgttaaccaagatggtaataattcagcctcaaaagattaacccagaattcagatgagatggctgaattacttggatgccccttgcctccgcgtaagctgaagcctggtagataatgcaaggacatagaatctgggctgtggggagaggagagggagaaacctgactgcatcaaaagttccaacttgaagttcactgggaaacttagccttgatgctagtaaagcaagcaccagggtgtccctaaatacatgtgaatggttcagcgatttttgtccagttcgtgcacaccataataaccaatcactggcccatcaagcctacttctatgttgccatgaaattcaaggacctttatgcatccctcacagggaaaaaactctttgtggcacaagccagggcaagggaccgagtaactgttgatgaggcattcaagtacataaaagagatcctgaaatgggatgaagagaaggaggagaatttctatggtccacctgaggattcattttacagcacagacataagctcctctccctttatcagacaagagtgaatgagtgtccataaaaaaatatattattatttggctgttgaaaagggttaaaaatgtaacgtgctggccagcttgtgttctgtgatcctatatgtattttaaatgttaagtgaaagttattgatggttttggtagagttctgtagaggcgattcctagtaggaatggacaacgtagaatgtgaagctgttgatccagttgatgtggaaaagttagcaactactgtaaagagagcccttggaacctatggtaccccagccatgacacaaatgatccagaactgcatggcccaagacttttcatggaagggaccagccaaacaatgggaaaaggtgctgttgagcctagaggttgcaggcagtgagcctggaattgatggtgatgagattgctcctcttgcaaaggaaaacgtcgccaatccttgagcataaccattgataacctgtttttgaatatggccatcattgtcaagaacgttatctaatacttgccagcatttgattatagacatagccacctacacatagttggatcaacaatttctaacgaaggaatggaactttaatttcaagcaaagcataaagctaacaaacatggaggtttttcatatgcaaggtcttgcaatccgtgaaatttgaagcatcttagtggtaaaatgcagcataagtggcctttcaaaaaaaaatatgcagcataagtgaataaatgtcaatccaaatgtatgcttccaaatcataggaaggagcatgcatggcatttttttttcttatctgattgaaagcaaggaacttttcgagtctaatggtgaggcacccttgcttcaaagacacccctttggtgctagtccttaacaagtatgatatcttcgaggaaaagattagcagggtgtccctaaatacatgtgaatggttcagcgatttttgtcccgtgcacgcacatcataataaccagtcactggcccatcaagcttacttctatgttgccatgaaattcaaggacctttatgcatccctcacaggtaaaaaactctttgtggcacaagcaagggcaagggaccgagtaactgttgatgaggcattcaagtacataagagaggtcctcaaatgggatgaagagaaggaagagaatttctatggtccacctgaagattcattttacagcacagacataagctcctctccctttgtcagacaagagtgagtgagtgtccataaaaaaaatgttattatttggctgttgaaaagggtggaaaatgtaacatgctggccagcttgtgttctgtgatcttttatgtattctgaaatgttacgtgaaagttattgatggttttggtagagttcttta

SEQ ID NO: 49733 - DNA, 206 bp, Glycine max
  Clone ID: PAT_MRT3847_15917C.1
gccgccagaaaacaaccgacagagactctcacacactttcataaaaatttacctcacaggttctgaggtctaagctaagtgctgcttatattcctttatctcccgccgcctatttaaaacttccctacccagatattaataccaccccgtatcctactggcgtaccagtttcccatttagtgattcacatcataccttggcgtttt

SEQ ID NO: 49734 - DNA, 902 bp, Glycine max
  Clone ID: PAT_MRT3847_15918C.1
ctccgagtttgactacatataatagcttgatgtatatgtacagccgttctgaaaacttccaaaaatcagaagaaatcttgagggaagttctggagaaaggtatgaaacctgatagaatttcatacaatactgttatttatgcatattgcagaaatggtaggatgaaggaagcttctcggatattttctgaaatgaaagattctgcacttgttcctgatgttgtaacttacaacacatttattgcaacttatgctgctgactcgatgtttgctgaggctattgacgtagttcgatacatgatcaagcaaggatgtaagccagaccagaatacttataactccattgttgattggtattgtaagctcgaccagcggcatgaggccaacagttttgttaaaaaccttagtaatcttgacccacatgtttctaaagaggaggaaagtaggttgctagagagaatagcaaaaatgtggtcataagttgtttcatgacactcttcttcctccttggttgccccgttatatgatattttgggtatggagattggcattcaccgtatgtagttataaatggtggtgttcctttaatggtggtgttcctttaatggggtttatctgcagaaaaaggcagcagtaaatgtctccgcatggatgcttgcaggtgcggctgtacagagagatggggaaaatgaagaatagtaactagtaagaggagtggggttggtttagaatgtcggtaccatgtagaataaactatatagcagcgtcatcaagaaaaaaaacatgtgtagtgtagggaaggtttttacttttagtataaattcactttgtaacactatttcgtctttgatttttaatgtagtgcgtcgtcggtagcaaaaaaatgacttgaatgtttttgtt

SEQ ID NO: 49735 - DNA, 353 bp, Glycine max
  Clone ID: PAT_MRT3847_15919C.1
gtaaattaatttctcgtatcgaaaatcatttccaccaccacaatttttttttatttccgtttactaaagattagtaattgtttggtttgtgtgtagattttgattcgattcgattcgattcagtcgaggttttaagcagcagcaagatgtctgggcgtggaaagggaggaaagggattgggaaaaggaggagcaaaacgacatcgtaaggtgctccgcgacaacattcagggaattacgaagccagcgattcgtcgtttggctcgcaggggtggcgtgaagcgtatcagcggtttgatctacgaggagactcgcggtgttctcaagatcttcctggagaatgtcaaccgtgac

SEQ ID NO: 49736 - DNA, 649 bp, Glycine max
  Clone ID: PAT_MRT3847_1591C.1
ttttgggttttttttttttttttttttttggaggaaaggaatcttaaatattgataaaacaaatatttcataatttatttgaagagtttcataaacttattattcgttatgttagtagacacaatctttgttgtctatggttgtcacaggaagaaggaaatgaaagtgaaaatggaaaaaaaagaagaagaaaaagaaataagataaaaaatataaattgtttggtagaaaagaaatagaataaaatataaaaaaatttaattaacatgattcagttacatttgataaaactaactgaaaaattaactcaaagttagagaacttattaaaaattgaaaaaattatcttatcgaatgataaaattatcttataatagttaaaaaatataaattacataaatgataaaaataatataattttaccttaaatagaaaaaattaaaaaaatatatttaaaaataaaaagagaataaatataaaaaatttaaaactaaaagttatcattttaaaaaatcttactgcaaataacataaaataattaaaagttactaaaaaaaatcgtttattaaacaagtaaaaaaatttcaattagtgaaaaaaattaaaccagatgaaatatcttttaacacactcttattaatcgggaaaaa

SEQ ID NO: 49737 - DNA, 432 bp, Glycine max
  Clone ID: PAT_MRT3847_15921C.1
tctaaaaaaaaaaaaaaaaaaaaaaaaaaaaaaaaaataacaataaaaaaaaaaactaacttaaacacgaaagcgtaaaaaataaaaaaattttctataaataaatactatataaaaataactatcaaacataaatacaacttcataacaaactaaaacccttcctttacccaaatttatagcctttcactacattcacctatcttcagcttaagatacctcatattgccccgcacttatacccctttcctacatttaaacctactaaatatacttttgaacacctcatttctcatcccattatacccgaatgcatttattcactaactcacttttaacaatccaattaccagcgtctatatcctccgatctcattcctttcttccctttctttttcaacacgttactcgtcttttcccgtaaatccctaat

SEQ ID NO: 49738 - DNA, 463 bp, Glycine max
  Clone ID: PAT_MRT3847_15922C.1
cggaatcggctcgaggagaaacgctgtgtagttcccatcagagatacctctgctctcgtcggaggtaccctccgttgacgcttcgagaggatgactccttatcgtttcctcctctcattcttcatatttctccttcaattcatcgcctttgcatcttcttccacccactccaatctcacccacattttgcaggatgttctgaaggcggtgtcggcgaaacagaagtgggattcttccaataacgacgacgtgagagtaaccaagttcgatgtcggaaaggttatgttcggcacctccctcagctacgagttccgaatcagattcggcaccgataataatgataacttcaccctcaaattcgtagaccaagttgccacgtggaacaagttcagaacgccatttaccgatttaccccctctcgttcaccgggctcggtccttcccactccttcataccctcaaat

SEQ ID NO: 49739 - DNA, 461 bp, Glycine max
  unsure (1)..(461): unsure at all n locations
  Clone ID: PAT_MRT3847_15923C.1
antgcgttcgtaattacattgtttttgcttnccctgaactggcgtaaaccaaagccctctggctttgggccttcgctaggggtccggggattcaccttnnaaaatgaaccccggccccgggcccttctttttttttttttttacccaaaggcggggaataaaatttttaagaccccccccccaaagggcccaaaaaggttggggggttttttgggcggggccccccccaaaaaaaagggggggaaagggaaaaggccccccctccccaaaattgggcccttgggaggcccaaaacccccccccccttttttttggttgggggggggggggggcccaaaaaaaccgccccccccagtggagaagcccatttttgtggggaaaaccccccctcttggggcccccaaggggcccccccctttttggaagggttaaaaaaccccgaagagccccctcaattgggg

SEQ ID NO: 49740 - DNA, 258 bp, Glycine max
  Clone ID: PAT_MRT3847_15924C.1
tcgaatccagagcagctaagataataaaatatagttgcttgcgggccggtcgtcagttcagactagctggtcagtgggggtaagagagtgttccgttagtgttctcacagtctcagtgcgaccttgcttggtcaacaatttggagagtttgcttctacacggaaacgaagactttcgagaacaaatattaaaccgggaagaaaaaaggggaaaaaaagtaaataaagtgcgcatatggcacgaaaaggaaatccgatt

SEQ ID NO: 49741 - DNA, 357 bp, Glycine max
  unsure (1)..(357): unsure at all n locations
  Clone ID: PAT_MRT3847_15925C.1
attcccggggggacccacgcgtngcgcccacgactcacaccatccgagacaggaggggaaccctaaaaccaccttcttcttcttcttcttcttcttcacgggtgaggcccaatccctaaaacaagggtaattccacaatgaagttcgagatagaggacataaccgtgtacttcccctacgacaacatctacccggggcaatactcctacatgggggaactcaagcgcgccctcnacgccaaggggcactggctcctanaaatgcccaccggcacgggaaaaaccatcggactcctctccttgatcacaagctacggtctttccaaaccccattcccccctcaaggtcctctactgga

SEQ ID NO: 49742 - DNA, 382 bp, Glycine max
  Clone ID: PAT_MRT3847_15926C.1
gaaggaacacaaatactggcacccagtgatctcctctacaacattcatggtagtgctgtcaccatccttcatttgatgataaggatgttttagcttagacgcatattatcatccgtcttctcagaaataccacttaaaagattagttcattacccatattggtacaggagaaaatggtgtggccctccgtacttatgccaatactattgttgaggccttctatgaccttgaaaggcccctaaatggacttacgatttctctagcttaatcaaggtctatggaacgacgctgacataatggagtacccacaagataaggtcaatgacctcttcgctaaaagcaatgctctaaaagaaaattgcaagataagcgcccccgctgg

SEQ ID NO: 49743 - DNA, 320 bp, Glycine max
  unsure (1)..(320): unsure at all n locations
  Clone ID: PAT_MRT3847_15927C.1
aaaaccgaggtgaaacaacaaaattaatttaaagataaaacaatatttgaattaacacattcatctctgacaaactatggtattcaagaagtatggaagggacccaaaaaaaactcattttattgccactaaagagtgggaatcacaaaaaatatatacaggacacgtcaatggaaaattgggctcacatctaaaaaaaaaaaatgctaattaaaagcgggcggcaggggagctnngncggnaaaaacctgccctttaccaaccacagcatttttaaacatgttatctaaagaagctccttggccccggtcttgttggaa

SEQ ID NO: 49744 - DNA, 765 bp, Glycine max
  Clone ID: PAT_MRT3847_15928C.1
cgcgcgtctcactcactcactcactctgtggaccttagacattgccctctcttgcctcactccaaacggcgcacatcaccggcgcggcggcgatctccttcaccggcggcttttttttttttttacaactcaaattttgcgttcgcttcacttcctctggaaatctctttctattcgctgatttcattgttgttgtttaaccaccacagcgatggcaacgattttgaggagcagcggaggaagattgggcagcgttttagggttcttcaataggctcattcattcgctgccccaatctcctcctttatctgcgaccattgattttagttccccaactttctcttcttcttttgggggctctatggagcttatggctgtcccaaaacgcaaggtttctccccataaaagaggaataaggaatggaccaaaagctcttaaacctattcctgtcattgtcctctgcaagagttgtggtcgtgctaggcttccacacttcttctgttgcggtgggaaaccaaatcaaggtaatactggtgaacagaaaggtagtacaagctaatcaagctgtttgcgatgcaccagatgttggttcatgtgcaggaccactcgtaagactaggtctgtttggtagaaatgttttatttccttgtttcttaagcaatgccattattgaatccgaggtcttttgctttaatgataaatggagtggttggtgggtaaaatactaaaatttatggattttggagatgatatttacttccattg

SEQ ID NO: 49745 - DNA, 475 bp, Glycine max
  Clone ID: PAT_MRT3847_15929C.1
aaaagagaactccataagcgccatccagatgcacggaaccatcgtcgtcggcgccgtagtcgtcaccgtccgcccaatcagtgtcttctacgccaccaccggcgccggactggctctcgacatcgtcctcatttacggtcccttaataacgttgtgtccacttaactagcattcccagaagcatcccgctatttactagctcctagggggtatcaccgagcctcttggatacgcaggaggatggaggtgcgccttgactagcgagaaagctattcgggaagctgccatattgacttccgtgggggggatcggcctgactctctacacatcttgggctgcaaggagaggccatgaaatcaacttccggggcgcctacatgtcaggggcggcgctaggccccatggccttggaaccgattcagggcccggctacactgtggaaattgaacgagaggaactatgggtgcctggcaagc

SEQ ID NO: 49746 - DNA, 278 bp, Glycine max
  Clone ID: PAT_MRT3847_1592C.1
aaactcggcttgagggtcgactcatactcaaacatattccaatatacctaattcccacaaatgcttagacccccaacatattcagggttggctattaaccaagaacgaggattcccatggctttttaccttccacattatacctgataaacctcttaatactgctattttatcacgcactataccaggactctacaaaaattaaccttaaagacatatattttcgctgtatatgcaagaggctctcttaaaaaaaattttgccactgaatgaattatt

SEQ ID NO: 49747 - DNA, 277 bp, Glycine max
  Clone ID: PAT_MRT3847_15930C.1
ccaagaccaccagattcacctgacgatgatttcaccaaccaatggcctttggagctctccgagtacttgaattttgatgatgatcaatggccagacgattacccggaatcatttgtttcggggcatgtcttcagccataacaatcaagccaatgaagttggtaactttggaggaagtagcacccactttgaagagtcttctagcagagacgttggcaatgaacgtgagaagaaggaagtcagagatagagttgcattcaaaacaaagtcagaggtag

SEQ ID NO: 49748 - DNA, 518 bp, Glycine max
  Clone ID: PAT_MRT3847_15931C.1
ggctcgagctttttcactcggggccattgacttgagcatattcagtgcgtcgtaaagcaaaaagatactaatggctaaagtcatgtttggtttggtctgcagcttcctcgtattatgctgtttcacaatcaacactagcgccttctcaccttctggatggaccaatgcccatgccactttttatggaggtagcgatgcctcggggaccatgggaggagcttgtgggtatgggaatctgtattcgacagggtacggaactgatacagcggcattaagtactgccatatttaacgatggagcttcatgtggggagtgttacaaaatcatatgcgattatcaaacagatcccagatggtgcttgaaaggagcatcagtaaccataactgccacaaacttctgccctcccaattttgctcttcccaacaacaacggaggatggtgcaacccacctctcaaacatttcgacatggctcaacccgcatgggaaaagattggtatctatcgaggagggatcgtgc

SEQ ID NO: 49749 - DNA, 326 bp, Glycine max
  Clone ID: PAT_MRT3847_15932C.1
taccggtttgaattcccgggtcgacccacgctcgccacctcgtacgcagagcacagagggtccgtttacttatgtcgctgatgacaattcttatttgggattattttacacatattattaaattataatggatttacctatgcctaattcgataataaaatttattgataacccttcattgtaccatatttatacaatattcacacttcgagaaaaagcatcactattacaaatggagcactaatctaagaattatcgaacttaagattatataagcttccactgaatgatcctatatcgagtatatcttatacttagcctatcac

SEQ ID NO: 49750 - DNA, 329 bp, Glycine max
  unsure (1)..(329): unsure at all n locations
  Clone ID: PAT_MRT3847_15933C.1
ctagtgtttttgaatagctctgtattttgctgagggtgccttctcgtcttttgcataatcctctctcgcttgatgaattcttttattagatgtttggccacgtgttaaagcctgcttcttttaattgttgatgtctgtataattccagttccatttnnnttatacttaaaagtagaaactggatgaaatatctattacaattaatgtgttgaaggttggaaatgcatttctagatatatgctacttacttactttctctctgtttccntaattaatatcnttgggattagcttaagnatcatctgtgagtaaatggaggtcattgctaa

SEQ ID NO: 49751 - DNA, 439 bp, Glycine max
  Clone ID: PAT_MRT3847_15934C.1
cagcaccacatttcatttcagaaagtgccaaatgtttagcaaatcaaattccttttggttggaaagcctgttttataagttttgattcttatacttttactcttttgttttaagaaaaaaaaaagggggaggttcccccccgggcccttttttttggtcccccggaaaaacaaaaaaaaacactggccctttaacggggaaaacgaaaggttcccccaccccccccaaaatggaaaaaatagaggcctttgccggaaaccaaaaaaaaaagggggaattttttgggggggggggggccccttaaaaaaaaaaaagggggggggctttctttgggggccctgcttaaaggttaaaaaacaatggccctttttgaagagctacccggggttttatatctttttttggcccccccggggccccccccctcaaaaattttctc

SEQ ID NO: 49752 - DNA, 524 bp, Glycine max
  Clone ID: PAT_MRT3847_15935C.1
tttgattttaccaccaattattgaaagaattttttgagacagttgatccttcatcatctgagaaagcattttatgctttgaagagaatgcacccaaagaaaagaaaaattgttgatcgtcgcgcctcaaaaagtcggaagataaggtataatgttcccgaaaagatagtaaattttatggccccactacctgccaatgttcctcccatggctccgaagttgtttgagaatctgtttggattgaagacacaaagatcatctgctgcagcctcataatcatgttggcagacagaaatattggtctcacagttttgcccttactcttcatatgttgtacactaatttgatttctacatgatgctgattattgaggaatttgatattttttcctcatgagacaattttgctgtaaatctattcagatgccaatataatagattatagttctgaatttgcttcaacatttcagttttgaaatgcatgtttgctaccatattttgttttataaaaccagcctcttccatg

SEQ ID NO: 49753 - DNA, 1914 bp, Glycine max
  Clone ID: PAT_MRT3847_15936C.1
tcggccgacgcgtccgcactgcctggcttccctaggttttcttctcagttcacacttcgcttttcgcggcaccggacccgcgccacctcttcagtcttcattcttctcacttcacgaatcacgaccgaaccgtgaaaaacgttcccagcctcccaccgtgccacctcttcaggtgtaaaaatggggttatctgccaagaaatctagaaaaagaggaaaaagggacagtgattcagatgaatacgataatatggagtatgaagaggtggaggatgattacgatgatgatggtgaggaggaggatgaagaggaagaacatggagaggaagtaacagatgatgaagatgggacaggagagcatggtgaatggaagaatgatgagatggaacagcttgagaaagaatatagagatcttcatcaccaggagctagatactttgaagaacttgaagcatcataaggatgaagatcttcataagggtcaagctgtgaaaagccagaaggccctctggtacaaaattcttgagcttagattcttacttcagaagccattctcgagctccaatagtttgccacaggaatcaatcaagtctttgttctgtgaaacagatgagacagttagagtagtatattcagatctgctgacttcgtccaaagagactttggattctatattggaactgcaagaggctctttttgctaagaatccatcaattacccaagccacagttggttcagaagggttatcaaaagatttagaagtttctgagcatttggatgacaatcttgaccaggagtggtcacagatttcacagatgcacaagagtatagcttctttcagagacaagtcaatcaacaaatggcagcggatgacacaagtgactactggtgctgctgccattaagggaaaatttcatgcttttaatcaggatattagcaatcaagttgctgcttatatgagagatcctaatagaatgatcaagcagatgcggctgagaagatcagctgttaatatatttggatctgttccagaggttgacgataaacataaagaagctgaaacacgtactgatggtgatcctgaacttctggatgactctgaattttatcagcaattattgaaagaattttttgagacagttgatccttcatcgtctgagaaagcattttatgctttgaagagaatgcaaccaaagaaaagaaaaattgttgatcgtcgtgcctcaaaaagtcggaagataaggtataatgttcacgaaaagatagtaaattttatggccccactacctgccaatattcctcctatggctccgaagttgtttgagaatctgtttggattgaagacagaaagattatcatcatctgctgcagcctcgtaatcatggttggccgacagcaatatttggcctcacagttttgcccttactttacatatgttgtacactaatttgtcttttacatgatgttgattattgaggaatttgatattttttcctcacaagacaattttgctgtaaatttattcagatgacctcatttctccttaggtgtttgttcaacgaggagtgatacaggttcatgtatgatggtaaccgatgccctagtgcaatggtgctagtataatagattatagttatggattttcaaaatttcagttttgaaatgcatgtttgccagcctcttccgtgaattgttggtttgatatttgtcgcacagtgccagagtgaatttgagggtcaattttaaattaaaagtaatatgtggagttcgcacatttttttatataaaagaatcagagatcatcgtcatggataattgaaagtccattgatagaagtcaagaacaaaacccaaagccaaccaagggttaatatcagacgaaaagctcctcacttacctagagcttggttctcaaga

SEQ ID NO: 49754 - DNA, 293 bp, Glycine max
  Clone ID: PAT_MRT3847_15937C.1
cgcacattctaaattatttaatgcaacataactttatccctgagcttggttttaccaacggctgttgccgctacatctactgtcatctttcccatcacaccaagtttacctatgtcccaagcaggacctcaatcattaccccatggagagatgcacacaagaaggcgatagtgcagtacaacaatgtgctgcacaatgaaaggaatgttgccattataaatcatgacaacactgcagcttcagctaaggatgaaaaagagtccaagaaacaggatccatgcttggatcacaac

SEQ ID NO: 49755 - DNA, 229 bp, Glycine max
  Clone ID: PAT_MRT3847_15938C.1
cccccttccttagcttggaatttcgcttcagccgctggcaaaagaccacaaaagggggagagaaaaaaaaggttgaaccaaggaggggaaattaccggcaaaaggtgggacctgaggcacttcccccgaagctattttaaggggagacttctgaaagttgtttgagtaccctcaacccggaaaatacccccattggggaggggggaaacaaaccaaaggaccccttggc

SEQ ID NO: 49756 - DNA, 710 bp, Glycine max
  unsure (1)..(710): unsure at all n locations
  Clone ID: PAT_MRT3847_15939C.1
aaaataattgtaaatttttttatttttacatttttttttcattccactccacgataaataataattaacgtaatcttaaactttaaaatgactgataaatagaaataaaaatccaacaattaaaaaagaacaagggtgtaggaagtatcctcatgcgccaatcaccaatatcccctgcatataaagccctgaccaaattccgttgcactttttgaccttcccaaacccgaaaactgattgaaatggctctccaaagatgctgaaagtattgttgacattgaaggaagcatccaagaatggcattgaagccatagtaaattatctttagttggcagtcgatccttgaaagccctccaaagtaagaacgccactttgtttggtatccttcttagcctccacgccaatgagaaaatatcacttgggattaccataccatcatcttccaacaacagtttataagcccagtttgtagagtattttccagaattgcaattttgccaaacccatgaatccaactcattactaagtatctgtacagaatttaagagtatttgcaattgctcgagaagttcccactcanaagtctctcttctccaatttaacttccaaacccatctatccaacctccaacaacccatctcacaaaccacatcctctttttgattcgaaataaagtacaatctaggaaaaaattggccaaccaatttcca

SEQ ID NO: 49757 - DNA, 490 bp, Glycine max
  Clone ID: PAT_MRT3847_1593C.1
ttttcggatgtaccccctcctacccctgcacaaggaaatgtttagcatcatggtcagttttagtttctatggggctaaacagaaacaataccccattgaacacgaaggcaattatattcaggagcttaggatgaacaatgcaaatctttgggaatttgttgtattttcagcaatttgtacatgggagaaaatgatttgcatttactcaagacagggtcctattggttgtaccatacattacccagctcacttttcagctacaagggagaggtttaccacaaggggacagcgatctttatacacatttacaagggttaggttgcctcctgcttcttgaagttacatcccagttataaacatgattgagcacatctttaagttaaaacaaggatacaaatccatcaaagtggagttcacaataaatttcataaaaatggcagtgagtgaacaatgccttataaaacagccccttaattttgatttaatgggg

SEQ ID NO: 49758 - DNA, 384 bp, Glycine max
  Clone ID: PAT_MRT3847_15940C.1
gtttaatgacttagggcctttggccggaggggctatccaaaaaagatgaaaatgtgtcaatgtgaatctgctgaggcgctatctcattctcatacaaaggctatccttatagttggttatatgagcaacccaatagggaagacttatacatttcagacagcggagacgagcagcctccgacactgaaagccattacactcacgagcgatgacaagtctgtcataatagagctggatccaaaagcacaagcgctggcaggcaagatgttgcaagatgctctcttatactggctactactcgcatgctgacaccagccgttcttgaaaagctccacgaactccgtctacatgcgcaggtcaacatccatctccctgcgcaccgtcg

SEQ ID NO: 49759 - DNA, 131 bp, Glycine max
  Clone ID: PAT_MRT3847_15941C.1
ctcgagccgctatcctatctctttgcatattcttgcttatcatcagcggcttctctcttgcctccagaattgaaaagttcttccgctgcccataggctttgacacccttttccaatctctagtttttgtat

SEQ ID NO: 49760 - DNA, 264 bp, Glycine max
  Clone ID: PAT_MRT3847_15942C.1
ctcgaggcgcgccgttgacacttgtctactcctcatggagaaagccctgtaagcctatggatacttatcacgctttcttgacaatagcgaccactcacttgcggctgggcatatttatctaattgttcaagatattgaaaaactcattgaggaaacaggaacacaaactcattcttaaaataattaatattatgaatgttagttatcaaaatattttgaacaacatttgcgagaaacagaaacttcaatttttttttttttttt

SEQ ID NO: 49761 - DNA, 327 bp, Glycine max
  Clone ID: PAT_MRT3847_15943C.1
ttcttgagaagtccaagtattcatttacgtcgggacaaacgattgtgcgattgagactggctggaaaaggccagggccctgctctcggaagcgatgcggcaacgacgcactcttgcttcggggtgtgacgtcacgatcgagttgacataatggaccccgatcagggttggagacctacctcagcctacggggctgtcaccggtacaaaacagttgatcagacgatcggctaacaaccacctctgctgtgaacccagtaacagtgtttttgatgctaagccattggataggaagactcttgtctgatgcatcggtacgacgtgacatg

SEQ ID NO: 49762 - DNA, 492 bp, Glycine max
  Clone ID: PAT_MRT3847_15944C.1
gggttgaaattcagaactgcacaaacgagacttgatctcaaaaaatgagaaaaggaaaacaaaatcacatttgaaggatgctgctcttctcttcactgttgtatgttcttttcaagaatagctattaaattcagcgatcaatgccttcaattttgtcttccacttctgaatacaactgcctgagcttttcaatattatcttctgaagtttcccccattctcagctttctgcctctcaatcaacctatctaccactattttggcactctgcatcgctgcagttgtaggaatagcttgtgggtccagggcatgaatattctttcctgttggcaagacttttggatttcttattgggtcaccaccaggccctggctccacatatttaccttccaaggcttgttttaaacttcccacttcattatcagccacaaccaacttcaaacattctcccaggaacacaaacaaggttctaagtttttccctatcagctcgg

SEQ ID NO: 49763 - DNA, 579 bp, Glycine max
  Clone ID: PAT_MRT3847_15945C.1
ccacgcgtccggctatgactcggtcttctactccgttatcttcttctttagctgcttgtgtggttgtttgtgctctcacctgaaaatgtctcgctgaaggggtaactgtggttgcggaagcgcctgcaagagcggcaacggctgcggaggctgcaagatgtgcccagacttgagctacacctagtcaaccaccaccgaaaccttgatcatgacattggcaccagtaaaggctcaattcaagagtgatgaaatgagtgctcccgctgagaacgatggttgcaaatgtggatctaactgcacctgcaaccgctgcacttgcaagtgaagtggcaaagagctaaagctacaagcaaaaatggcccttaaaaataatgataaaaactatatgtaaaaccaaaacttcaaaaatatctacaatgtattatgttgcactctggggttcagtgtctaaacaaacaccctaacaataaagcggacatttaattgccttgagcaagcccaagagcaatggacttgtgatgggactggtaatgtcatggttaacgtcatggtatacatatatatatatataaatgtatg

SEQ ID NO: 49764 - DNA, 390 bp, Glycine max
  Clone ID: PAT_MRT3847_15946C.1
gcaaagacacaggccgtggggcacaaattgtgagttcaattatcagcacggctaaacaatgtaatcttgacaaggatgtgacactcccaaatgagggtgaggagatccctcttaaagagcgtgaccttgtggttggaaaggtgtattccaagatcatggagattgagtctcgtctgttaccttgtgggcttcatgtcattggtgagcctccctcagccttggaagctgttgctacactggtcaacattgcacttgtattgtggggtactgataatattaaaacatatggtgaatccctggctcaagtgttgtggatgattggtgtggaaccagtggctgatacctttggtagggtaaaccgggtggaacctgtaagtcttgaagagcttg

SEQ ID NO: 49765 - DNA, 1762 bp, Glycine max
  Clone ID: PAT_MRT3847_15947C.1
cccacgcgtccgcccacgcgtccgcccacgcgtccggtcctcttttctcttctccctttttctctctgtctctctctctcggtctctcgctcttcttctcatcaagcacagagttacagactcaccgatcttccgattctctttcgtcttggtttatgagctcgaaggagagacccactcttggtggcacgcggattaagacccgcaaacgaaatattgctgcgccgctggaccctgcagcattctcggatgcagtggtccagatttatttggataatgctggtgatctggaacttattgctaagagtattgaatcttcagaccttaacttttcaagatacggtgacaccttttttgaggttgctttcactgggggtcgtacacaacctggaactaccaagcctgatgagggggaccgccacccatactctataatagagtgtgagcctaagcgtgaagtcattttaccatctgtaatctacatacaaaagattttgcggcgaaggccatttctcatcaagaaccttgaaaatgttatgcggaaattccttcagtccttggaacttttcgaggaaaatgagaggaaaaagttggcaatcttcacagcacttgctttctctcagaagctgtctggtctcccaccagaaactgtgttccaaccacttcttaaagataaccttgtggccaaagggctagttctgtcatttatgactgacttctttaaggagtatctgattgacaacagccttgatgatcttatttcaattctaaaacggggaaaagtagaggaggatcttttggacattttcccccctacaaaaagatccattgaagctttctctgagcatttcaccaaggaaggattggtggccttggtggagtataatgaaaagaaaatttttgaggtgaaacttaaggaaatgaagtcttctttaacagcacagataacagaggaggctgatacatctgaagtcattgagactgtgaagctgcgagttagagatgctaaattgccggaaattgaggtggtgcggatcttgtgggatgttttaatggatgctgttcagtggtctggaaaaaatcagcaacagaatgcaaatgcagcccttcgtcaggtaaaaacttgggcagaattgttgaatacattctgcaccagcgggaaacttgagctggagctgatgtacaaagtacagatgcaatgctatgaggatgctaaactgatgaagctgttccctgagattattagatctctttatgaccaggatgtgctggctgaagataccattcttcattggttccgaaaaggaacaaactccaagggcaggtatgaaatcttttctagacacttgtcctactacaataaaacttcatctccttggggtgtctggaatctatcctttcactatacatatgttacttactgctgcttatttggaactggtacaggcaaacctttgtgaaggcgctcgaaccctttgttaattggctggaggaggctgaagaggaggagtaagtctggtggaggttcagggctagggctgaagaaattatcttgtcttgcagcccttgtaccattagctaagatattggcttgtagtctcataagttcagttctgcctagtactaattatctatttaatttgtgtttgtgtttgactccttcatcttgctctcgggacatatcacggtgcctgtgttttccgcacgccacattgatatgttatacgagtgcattattgtattttgagtgattatttcaata

SEQ ID NO: 49766 - DNA, 4580 bp, Glycine max
  Clone ID: PAT_MRT3847_15948C.1
gaaaaataacacacatttgaaactcaaactgaaatgggtgcatagctttggggcaaaaactacacaaaactcctcattgcccccaagttttttctttcaaagcaattttgcacttttttgctttcattgtcttcaatttgtagtaagaggaaattgttgtttcctacttagcttgattattattatcaatggcttctttagtatcttcacaatttacactaccaagttctaaacctgaccagcttcattctcttgctcagaagcatctttttctccactctttccttcccaagaaggccaattacaatggtagcagctcaaaatcctctctgagagtgaaatgtgctgccattggcaatggtctattcacccaaaccacccaagaagttcgtagaattgttccagagaatgaccagaacttgccaacagttaaaattgtgtatgtggtccttgaggctcagtaccaatcatccctcactgctgcagtgatagctctcaacagcaagaggaagcatgcttcctatgaggttgttggttacttggttgaggagcttcgggacgcggcgacgtacaagaccttctgcaaggacttggaggatgccaacatcttcattgggtccttgatttttgtggaggagcttgccctcaagataaaggttgcagtggagaaagaaagggaaaggcttgatgcagttttggtgtttccatcaatgcctgaagtgatgagactcaacaagttgggttccttcagcatgtcacagcttgggcagtcaaagagcccctttttccagctcttcaagagaaagaagcctcagtctgctggctttgctgacagcatgttgaagcttgtgaggacattgccaaaggttttaaagtatttgccaagtgataaggctcaggatgcaaggctctacatactgagtctgcagttttggcttggagggtctcctgataacttggagaatttcctgaaaatggtttctggatcttatattccggcgctgaaagagacgaagatcgagtattcggagccggttttgtacttggatgtggggatttggcaccctctggctccttgtatgtatgatgatgtgaaggagtatttgaattggtatggaaccagaagggatgcaaatgagaagctgaagagtccgaatgcaccggtcattggtttggttttgcagaggagtcacattgtgactggtgatgatggacactatgtggctgtgatcatggagctggaggctagaggggctaaggtcattcccatttttgccggcggacttgactcttcagggccagcggagaagttcttcattgatccgattacaaagaaaccgtttgtgaattctgtggtttccctcactggctttgctcttgttggaggccctgcaaggcaggaccatccaagggcggtcgaggctttgatgaaacttgatgttccttacattgttgccctgccactggtgttccagacaacagaagaatggctcaacagtactcttggtctgcatccaattcaggttgctcttcaagttgctctgccagagctagatggaggcatggagccaattgttttcgctggtcgagatcctaaaacaggaaaatctcatgctcttcataagagagtggaacagctctgcatcagggcaatcagatgggctgaattgaaaagaaaatcaaaggaagagaagaaactagcaatcactgtcttcagtttccctccagacaaaggaaacgtgggaactgctgcctatctcaatgtcttcgcctccatatactcagttatgaaagaactaaaaaaagatggttacaatgttgatggccttccggagacttcagaagctttgattgaagatgtacttcatgacaaagaagcccaattcagcagcccaaatctgaacattgcttacaaaatgaatgttcgcgagtaccaaaatttgactccctatgccacagcactggaggagaattggggaaaaccccctggcaatctgaatgcagatggagaaaatcttctggtatatgggaaacagtatggtaatgtcttcataggtgttcagcctacatttggctatgaaggggatccaatgaggctgcttttctccaaatctgcaagccctcatcatggatttgcagcatattattcctttgttgagaaaatcttcaaagctgatgctgtacttcattttgggacacatggttcccttgaattcatgcctggaaaacaggtggggatgagtgatgtatgttaccctgacagtctgattgggaatattccaaatgtatattactatgctgcaaacaacccttctgaggccaccattgccaagcgcaggagttatgcaaacaccattagctatctgactcctccagcggaaaatgctgggctatacaaaggtcttaagcagttaagtgagctcatctcctcatatcagtccctcaaagacaccggccgtggggcacaaattgtgagttcaattatcagcacagctaaacaatgcaatcttgacaaggatgtgactctgccagacgagggtgaggagatcccacctaaagagcgcgaccttgtggttggacaggtgtattccaagatcatggagatcgagtctcgtttgttaccttgtgggcttcatattattggtgagcctccctcagccttggaagcagttgctacactggtcaacattgctgcacttgatcgtcctgaagatggtatttcttctcttccatcaatattagctgacactgtaggaagagatatagaagatgtgtatagaggaagtaacaaaggaatattgaaggatgtagagcttcttagacaaataaccgaggcatcacgtggagcaatcactgcctttgtggagcgcactactaataataagggtcaagttgttgatgtagctgataagcttagttcaatccttggatttggcataaatgagccatggatacagtacttatcaaacaccaaattttaccgagctgatagggaaaaacttagaaccttgtttgtgttcctgggagaatgtttgaagttgattgtggctgataatgaagtgggaagtttaaaacaagccttggaaggtaaatatgtggagccagggcctggtggtgacccaataagaaatccaaaagtcttgccaacaggaaagaatattcatgccctggaccctcaatctattcctacaactgcagcgatgcagagtgccaaaatagtggtagataggttgattgagaggcagaaagctgagaatgggggaaaatatcctgagacaattgcacttgtattgtggggaactgataatattaaaacatatggtgaatccctggctcaagtcttgtggatgattggtgtggaaccagtggctgatacctttggcagggtaaaccgggtggaacctgtaagtcttgaagagcttggaaggcctaggattgatgttgttgttaattgctcaggagtgtttagagaccttttcatcaatcagatgaatcttctggatagagcagtgaagatggttgctgaattagatgaaccagcagagcaaaactatgtaaaaaagcatgcatcagaacaagctcaagcccttggagttgaagttcgagaggcagcaacaaggatcttctccaatgcttctggctcctactcctcaaacataaacttggctgtggagaattcttcatggaatgatgagaagcagctccaggacatgtatcttagcagaaagtcttttgcttttgattctgatgcccctggtgctggcatgactgagaaaagaaaagtcttcgagatggctctgagcacagcagatgccacattccaaaatcttgattcatcagaaatttccctcactgacgtcagtcattactttgactcagacccgactaatctggtacaaaatctaaggaaagatgggaagaagcctagtgcatacattgctgatacaaccacagccaatgctcaggtacgtacactttctgagacggttagacttgacgcaagaaccaagctgttgaatccaaagtggtatgaaggcatgttgtctactggatatgagggtgtacgcgagatcgagaagagactcaccaatacagtggggtggagtgcaacttcaggccaagttgataactgggtgtatgaagaagccaacacaactttcattcaagatgagcaaatgctgaacaagctcatgagcactaatccaaactccttcaggaaactggtgcagacattcttggaagccaatggacgtggttattgggaaacttcagaagataatattgagaagctcaggcagttgtattcagaagtggaagacaaaattgaaggcattgatcgctgaagttaatagctattattgaaaagagcacacaacagtgaagagaagagcagcatccttcaaatgtgatttttgttttccttttctcattttttgagatcaagtctcctttgtgcagttctgaactccaaccccggtgaacaaataaaggttcaagttcataattgattttttagaatatttttgtgaagggcaaactagaagaaaataaaatctaaaaaaaaaaaaaaaaagggcggc

SEQ ID NO: 49767 - DNA, 472 bp, Glycine max
  Clone ID: PAT_MRT3847_15949C.1
ccaggaaaaggggtcctgagtcaagcgaaggtttttttagaaatggcatacccaaggagaagggggggggaaatttacaatattcattaaatcccaaacgaaaccaaaaagctccaacccagtgggaaagggaaaagggggggggaataaaaaggaacccaaggcgctggttgaaaaaaaaaccgttaaccggttctttttacaaacccggcctggggaaaagggggagtcctttttaatttttcttaccctggggtgaggctttttggttttacctaaccgggatttggttgcattgaaaaaaagaaaatcttggcattgggatttcccttatttaaaaaagcgtaaaaaaatttccgccccgttttgggttggttggaaataccaacataattttttttgaaaaccccaattttttggctggggcccgaatttaaatttttttgccccccccaaccaaggccttcgttct

SEQ ID NO: 49768 - DNA, 339 bp, Glycine max
  unsure (1)..(339): unsure at all n locations
  Clone ID: PAT_MRT3847_1594C.1
acgggtggaatgagatggtgtatgatgagaagaactggattgggttgaacactgggagttttctgttgagaaattgtcagtggtctttggatattcttgatgcttgggctccaatggggcctaaggggaagataagagatgaagctgggaaagtgctcactagggagcttaagaataggcctgtttttgaagctgatgatcaatctgcaatggtttatttgttggcaactgggaaggagaaatggggtgacnaggtttaccttgagaatcactactacttgcatggttantggggatttggtgatcgtatgaggagatgatgagaatacacccgggctt

SEQ ID NO: 49769 - DNA, 712 bp, Glycine max
  Clone ID: PAT_MRT3847_15950C.1
agctggaattaaatctgctaccattgaagttgaaggtcgttatgcatatggatatttgtctggggagaaaggaacgcatcgcattgttcgtcaatcaccttttaatgccaaaggccttcgtcagacaagcttttctggtgttgaggtcatgcctcttcttccagatgaatctatgaatgttgaaattcctgaggaggacctggaaattagtttttcaagagcaggtggaaagggaggtcagaatgtgaacaaggttgaaactgcagttcggatcactcacattccaactggtgtcactgttcgctgcacagaggagagatcccaactggcaaataagatcagagctttaagccgtttgaaagccaagttgttggttatagctgaagagcaacgcgcatcagaaattaagcagattcggggggacgcagtcaaggctgaatgggggcaacaaatacggaactatgtattccatccgtacaaactagtaaaagatgtaagaacggggcatgaaacgacagatatcacctctgttatggatggcgagttggatcccttcatcaaatcttacctcaaacacaaatacaatatgtcactgtctacaagtggggttaactaattatatcttttgtagtcacgaatcgttcctacatactattagttggcctttgtatcctatactaatataaattaagtcgacaatctgttgttttgc

SEQ ID NO: 49770 - DNA, 205 bp, Glycine max
  Clone ID: PAT_MRT3847_15951C.1
cctacacgttagggcacgcacacgggttctgttacttttcatacgacatcgctatcgggctacggcccagtttgagggataggctgtgagaacaataccgccgaccacgccagcgactgctaacatcggtcgggacctcaataggaaaacctaagtggcacagcttacgtctatgaacgctacgagttcctctgttacaacagtc

SEQ ID NO: 49771 - DNA, 1373 bp, Glycine max
  Clone ID: PAT_MRT3847_15952C.1
gaaaaactatccaagaatcaaaactattgttaataaagttggaaccattacaaatgaatttcgtgtgccagagtttgaaattttagcaggagagcataatatgattacagaagtgaagcaatatggtgccacttttaggcttgattacagattggtttattggaactcgagattggaacatgaacacaaaaggttagtctcaatgttccaagctggacagaccatttgtgacatgtttactggtataggcccttttgccattcctgctgcacaaaaaggatgcatagtctatgcaaatgatttaaatccggatagcattcactatctgaggattaatgccaaaatcaataaggttgatgatcgcatttatgcatacaacatggatgctagaaaattcatctcccagatgatggaagttccaaataatgaagttacattagaaacctcacatgaagttcccattttggatacacgagacaatgctgaatcaaattctgaaaatgagttgctaactgttgataccaaagacctaggagatagcaataatagtgggttagaggatgtaaagggttcaacaaggcacactgctacatctgtaattgctggtaaaagatcttctactagttatcatgaagggaatggagaggctcatggaactgacattcttgaaggtggtaggagaaaaggaagcgcaaacaaaagaatgagaggctctgaaatctctgtcacaaaaacttgggaacatgttgatcacgtaataatgaacctacctgcatctgctgttcagtttctagatgcattcaggggattaatccagaagaaatattggaaaggatgtctaccatggattcactgctattgcttcattagggcaactgaaactcctgagactataatagctgtagcagaatctgctttggacgctcatatacaagactcaacatttcatagggttagggatgtggctccaaacaaggcaatgtattgtttaagcttcaggttgccagaagcatgccttaaagaagatagtcaataacattgtccttggtgatgctgaagggaagttagctttgtgtaatactaccttagttttcagggtttgacaggggtgcattgatggatccagacattcagtgccatgtgtcaaatttaacagaaggaataggccatgttcattgaaactatagagtgggattcattcttcttgagatggattttattcctctacttgtgtttcaaagcaaaaagtgcccagttgactgcgtttggtatattctttggaattatacacagtgaacaataatattattgtatcttgcagtgtatggattattccaccaacaactactctactaaaattgtgggccaagccc

SEQ ID NO: 49772 - DNA, 379 bp, Glycine max
  Clone ID: PAT_MRT3847_15953C.1
aattcggctcgagcaaactctacacatacaaagcccactggaatgagaactcgtgaggaacgaactatacagagtttgaatgccgtacttgcaacaccaggagccagcttaggcagctggctcagaaggtggcaacgaacgctaactagtgaacaccatacgaatagacctccactgacgcgtagtggataaacagcagcacctgcatcgtccagaagatcgacagaggcactgggatacatggtgcatgtatcaggacgggcaagacacccactagatcactctggtagctctcgcctgcaagaaagacgctactagtaacgcgtacaatgatacagatgctgtcatagatgagaacatttaggctcatgacaagacc

SEQ ID NO: 49773 - DNA, 376 bp, Glycine max
  unsure (1)..(376): unsure at all n locations
  Clone ID: PAT_MRT3847_15954C.1
cccttttaattttttcaaanaacacacaccacacacttgatttcttttttcgacagatgaccgggggtgcccccaaatcggaagagggcactgcacacgaagcccgaaaaaaaagcccccccccccaggggaggcgaaaaacccacagacaacaggtttgcagattaggggggggaaacggatcccctggggaaaggaaaacaggccaaaaaaccccccacaaaaaaagcagggattaaagggtttccgggaaatcccgggaagggggaaaaaaaaaagagaaagggtttactgcaaaaagatttttattctaaaaagggaaggcaaatggcctgaaaaaaccagggggcaccccacaccccacaggggccggggg

SEQ ID NO: 49774 - DNA, 135 bp, Glycine max
  unsure (1)..(135): unsure at all n locations
  Clone ID: PAT_MRT3847_15955C.1
aataatgnaggttttcttggaccacaaggagcgcaacaacactgagtacaagcnnngaagaccttttctngagtttaanagaaggctannnngcnaaaangnnagtatttaactgntccattttaagaagccnaa

SEQ ID NO: 49775 - DNA, 281 bp, Glycine max
  Clone ID: PAT_MRT3847_15956C.1
ctcgggccgaaccaacatgaccgagaccatgtccaccgactggcacctacaccacgagctaccaaagctgcgaatcgacgccgtggtcaaaaccgacgacgacctacgctccgacgccgaagacgaccgaagcgccgccttctgcggcggcacacaagccggggccggaaacgacggggccatgaccgtcgatgtgggcgtcaaagacaacgacgagagttgccgtactccgacgtcggaggagagcaaagttccggcgacgatgacgtgtccggcggcgc

SEQ ID NO: 49776 - DNA, 267 bp, Glycine max
  Clone ID: PAT_MRT3847_15957C.1
cccccaggaacaagggcgcagcaggggaataaagccacgaacgagcgaaccccacaccgaaggcacacacaagaaccggcgacaccacagcgaaacaacacaaagggaagcaagggcccccacccgaacgcaccacacccacacagacagaaaggagcaagccagaccggcgagaggcgcaggaaccaccgaacggagcacaggggaccaggaagcacaaagggcccgccaccgccagagcggcccccgaggagaaacgccccaagg

SEQ ID NO: 49777 - DNA, 310 bp, Glycine max
  Clone ID: PAT_MRT3847_15958C.1
ttggagctcaacccggtggactgttttccacccaagggtaatgcccacactaagtttttcccaaacaaaaccattgtcaagcttttaacaaggtttcctcctccaaatattaggattaatatttccatccttcactttcaccccggggaaacccccccccaaggacaatggcaactccttcacaaaaacattgggattttcgccattcacattcagcttcttcacaacgaccgggttattattttccaacggaccgacttttgacttttcaacctaacccttcccgacgggaggtgccgcaacaacccaa

SEQ ID NO: 49778 - DNA, 157 bp, Glycine max
  Clone ID: PAT_MRT3847_15959C.1
aaacatgtaaactaaggatgttctaattaagggcaacatttttctgttacattttttggacattattacacaagactagcaaataattcaaagtctatcctgtttctagggaaactacatctcccatttttttcggacccgtgggcggacccctggg

SEQ ID NO: 49779 - DNA, 313 bp, Glycine max
  Clone ID: PAT_MRT3847_1595C.1
gggtacctatctattgatccgatatggcgcgactggtgtgtgtccttttttccttgcatttcatggttatcatgtcaggttccttcccagcaaatagtgaaagtgtttacaaaagagcgtcctatgtatgtatccacactacccttcgcatgactgacccaacttcacttttatttacataacaacaaattgagtgaacacccgactgctatcaaaattgttgaggctaataccgcgtccatacctgagcttatgactatgtacatgatggatgaccctctaaccgaaggaccaagtacaactccaaagcttg

SEQ ID NO: 49780 - DNA, 203 bp, Glycine max
  unsure (1)..(203): unsure at all n locations
  Clone ID: PAT_MRT3847_15960C.1
ccgcgctcggacccacgcgggccgaacaacactttaatcattgcacaaaggggggggggggggggagcatcatnaactacaattncatggggggcgggcctccanacggggggggggggggacttnnataaaaaaaacaaaccccaaactggctctattcactctctcgccgccggcaagaaagtcatcatctttnggggtcc

SEQ ID NO: 49781 - DNA, 576 bp, Glycine max
  Clone ID: PAT_MRT3847_15961C.1
aatatctatttatgtgtatgcggtgtccaaaattttagacattaattgtgtcaaaaagtgtccgcataagactccgtgtttcataggctgaaacaaccaactttttcataagttaaaaatactcaaaatagagtgaaattaatgcttaccggcacacagcaccaccacccatatgataaaaagatttgtaaaggatacaccttgtcccttactcaactctttggcttgatccactttacaacctgggcagtcctcgtagtacttcctctccaacaatggttgtttgccattcttctctgtcatgtttgttagagaactccgccacacttgtttcactcaggtccctctaattcctacaccattttacatgcaccattcaaacccagaaaagattatcagaaaagatgtcaaagccactttgttctggagaaaaaacaatggttgttgaggaaacaaaaacaaacgtacacacaaccgaagaagaaactcttggactcggtcctatcctgggtttgagaatgaaaaaatgaacacgaacaacgcaaggtccccttctgtcgtcttctcgcagccgta

SEQ ID NO: 49782 - DNA, 215 bp, Glycine max
  Clone ID: PAT_MRT3847_15962C.1
attcccttctggacccactcatcctaagaatcaaataaagtactcatttctgtttctaaagcttaataatttctttatgtccgtatcatctataatttcgcagcatcatactaacaaattactcatatcatataataacatttcccattctctctcacaagccaaacatattcttctccttattactcaatctatctccctaattccctttcatc

SEQ ID NO: 49783 - DNA, 924 bp, Glycine max
  Clone ID: PAT_MRT3847_15963C.1
aaataaaaaaaattgttttcgtgtggaaacaaaaaaacaattcaaaaacaaacatatgatggtgaagccgagtagcgaaaagccagaggagcatagggattccaagtactacaaaggggtccgaaagagaaaatggggcaaatgggtatccgaaataagactacccaacagccgtcagaggatttggttgggatccttcgacacccccgagaaggccgcgcgtgccttcgacgccgcaatgttctgcttacgtggccgcaacgccaagttcaatttccccgacaacccacccgacatcgccggcggggaatccatgacgccgtcacagattcaggtcgccgccgcacaattcgccaacgctgggccccacgagggacattcgggtcgacccgaacattctcccatgcaatctctatcgccttctgtttcagaagggaccgttctaacggacagtgacgtcaccacacttaacggttcgctaacggatttgttcactcccgttgggtcgagtggttacgcatccgattacgggattttccccggtgttgatgatttcagtggcggtttttatgtgccggaaatgctgaactttaattatggagaagaaaacggggaagggttcatagttgatgagtctttcttgtggaatttttgaggggcaatcaaatccagtattaaccggcaaaaccggtcacggttgcggatagttttattgtttccggaaccgtggcaatgacccgggtttggattggttattttttagacgaccaaacctataaccaagaaactatgatatccatgcaactgtagcaccaaaagtaatgcaatttgtccagatagttgtgatttcttttttttaaacaagatatttgtaatttgtaaagctcttataacagatattgtgaaaaaaataatttctgattc

SEQ ID NO: 49784 - DNA, 1135 bp, Glycine max
  Clone ID: PAT_MRT3847_15964C.1
ctcgagccgctcctattaagttttcagttctcacaaattaaaaaataaaaatattatatatacatatatatatatatatatattctcttcgagtccgtcgaaaaagaaaacaatggcgaaacccagcagcgaaaagccagaggagcatagcgattccaagtactacaaaggggtccgaaagagaaaatggggcaaatgggtatccgaaataagactacccaacagccgtcagaggatttggttgggatcctacgacacccccgagaaggccgcgcgtgccttcgacgcggcaatgttctgcttacgtggccgcaacgccaagtttaatttccccgacaacccacccgacatcgccggcggaacgtccatgacgccgtcgcagattcagatcgccgccgcacaattcgccaacgcggggccccacgagggacattcgggtcgacccgaacatcctcccatggaatctccatcgccttctgtttcggaagggaccatccaaacggacagtgacgtccccactcttaacggttcagtaacggatttgttcacgcccgttgggtcgagtggttacgcatccgattacgggattttcccgggctttgatgatttcagtggcgatttttatgtgccggaaatgccgaacgttaattatggagaagaaaacggggaagggttcatagttgatgaatctttcttgtggaatttttgaggggcaatcaaatccagtattcaccaccggccaaatgggttatggttcaggactacgagagaggcgtaaccaagtttaagaataaagtttttttatttatacatcaaatagtttattaaaattattattattttatttaaaatttatttttaaatataattttataatatttttttttaggtatattaatactaaaaaataaaatttaaaactatttttttagctaaagtccttacatggattgtttgatccttaagtcgatcctgtcattgttatggttgcagatagttttattgattctggaaccgtggtaatgatccgggtttgaattcgttaatttttggacgaccaaacctatatgattaatgagtttctatgatattgatatcgatgctactgtcaagattattgtttcattcaataatg

SEQ ID NO: 49785 - DNA, 107 bp, Glycine max
  Clone ID: PAT_MRT3847_15965C.1
accgcgcgaccgggtcgtgcagctctcactttaataacagagacatcagatgaaatgacgcatgaagacttataatagactgctatacgtgcataatcgacggcaat

SEQ ID NO: 49786 - DNA, 1313 bp, Glycine max
  Clone ID: PAT_MRT3847_15966C.1
gctcggaattcccttcccagaataatgtctccaatggagtttcatagcattaccaagtttcacaatatcccacttgtgtcttcttctcttgtgattttatgtattgctaccactatactgaataaccctgcaatggccacaaagcaatattattgtgatttccctgccatctttaactttggtgcctcaaacgctgacactggtggcttggctgcttcattttttgttgctgcaccaaaatcaccaaatggagaaacctattttcatagacctgctggaaggttctctgatggtcgactcattattgatttcttagcacagagttttggactcccttatctgagtccatatcttgattcgctggggaccaacttctcccgtggcgcaagctttgcaacagcaggatccacaatcataccccaacaaagttttagatccagtcctttctcccttggagttcagtactcgcaattccaacgttttaaacccactacacagttcattagagagcaaggtggggtatttgcaacactgatgccaaaagaagagtattttcatgaagctttatacacatttgatataggccaaaatgatcttacagctggcttttttggtaacatgaccctacagcaatttaatgctactatacctgatataatcaaaagtttcacatcaaatataaagaacatatacaacatgggggccagatcattttggatacacaacacaggacccattggttgcctccctttaattttggccaattttccatctgctgaaagggatagctatgattgcgcaaaggcatataatgaggtggctcagtcttttaaccacaatttgaaggaagccttagctcaacttcgtacggagcttcctttggctgcaattacatatgtagatatctactctgctaagtacttgctattcaaaaacccaaagaaatatggctttgaactcccgcatgttgcttgttgtggctatggagggacgtacaacttcagccagagtgttggatgtggaggaaccatacaggtcaatggcacaaatattgttgtgggttcatgcgaaagaccatctgttagagtggtatgggatggaacccactacactgaagcagctaacaaggttgtctttgatttaatctcttctggggctttcacagatccgcccattcccttgaaaagggcatgtaagagaaatttcacataactttaatgagcttcatatgcttatcattgcagccatttatatttgaaataaagtgtaatatgtccctaattttattctataacaagtttctgtttttaaaa

SEQ ID NO: 49787 - DNA, 638 bp, Glycine max
  unsure (1)..(638): unsure at all n locations
  Clone ID: PAT_MRT3847_15967C.1
cacgcgtccgctttagcatgcaacttgggtgggagggagcgtcgaagaaagagagccacaacaatagaataaacactcacacggagacaagacaagaacaagatcgtgcaacagatatgaagaagcagcagcagcaggagaaacataagaagcaaatggtcaatgaagaatctaagaagaaggagcgtcacattgtgacgtggactcaagaggaagatgacatactgagggagcagattggtgtacatggaactgaaaattgggcaattattgcttctaaattcaaggacaaaacaacaagacagtgcagaagaagatggtacacttatttgaattccgatttcaagaaaggaggatggtcaccagaggaagacatgcttttatgtgaggctcaaaaaatatttggtaacaggtggacagaaataaatagggtggtttcaggcagaacggataacgctgtgtaaaactgtttctccacattgtgcaaaaagagagcaaaatatgaagcncttagtaaaagagaacagcacttcatacatcaattcaaataacaaaggatttttctccacacggggtgtgatacagatgtagcatcagaaactgcaattaagagatgagggaggtcacatatccctgat

SEQ ID NO: 49788 - DNA, 740 bp, Glycine max
  Clone ID: PAT_MRT3847_15968C.1
gggagcgtcaaagaaagagagccacagcaatagaataaacactcacacggagacaagaagaagatcatgcaagatatcaagaagcagcaggataagcagaagaagcaaatggtcaatgaagaatctaagaagaaggagcgtcacattgtgacgtggagtcaagaggtccttcttctctcactataaaattattttccttctgttttattttgtgaatttctccttctttggagtctaatgagtgttatgagggttgcaggaagatgacatactgagggagcagataggtgtacatggaactgagaattgggcaattattgcttctaagttcaaggacaaaacaacaagacagtgcagaagaagatggtacacttatttgaattctgatttcaagaaaggaggatggtcaccagaggaagacatgcttttatgtgaggctcaaaaaatatttggtaacaggtggacagaaatagcaaaggtggtttcaggcagaacggataacgctgtgaaaaaccgtttctgcacattgtgcaaaaagagagcaaaatatgaagccttagtaaaagagaacagcacttcatacatcaattcaaataacaaaaggatttttctccagcacgggtgtgatacaaatgtagcatcagaaactgcaattaagaagatgaggaggtcacatatccctgatgccgcagagaaaatcaactttgggagacagatcacataaacaaaatggggattca

SEQ ID NO: 49789 - DNA, 506 bp, Glycine max
  Clone ID: PAT_MRT3847_15969C.1
gtaaaacagcaggtataccttttggtggtgaaaatcttacatattcgctatattttattagaagcttagggaagatgctgtgtcatttttttacagtggaaaattggcaaatcaaatctcaattcataagtttagagtatgtgcatttttgtatgagcaggaagtttagttcagatgacattttgatatgtaattatgtaagaaagccttacttggccaattgactttgccatctacagcagattgtgtagtggtggtaatgttgtgtatgtatggtttgggagtgggatttatcagtcaagcagcctatggctctagattgtgttgtgtttttttttcccagttgacctcagcttcttggcatattgtgtaagagcaaggaaatcagttagaattttcttacataagcacaacggtgaaacaatttattctgtgcttattcattgtcctatttctacatttgttttgatatcttccactttgtatttttgtaatgcagtggcttg

SEQ ID NO: 49790 - DNA, 536 bp, Glycine max
  Clone ID: PAT_MRT3847_1596C.1
attctcttttggattttcaattcctgttactatctctctctctctgattgttttcatgacagtgaagtacttttgcatggtgatgaggatcaatattgattgtaatggctgctacagaaaagtgaagagagcccttcttgatatgccagagttggatacccatctcctagaaaagaatcagacaagggtaattgtgtgtggaaggttcattccacgggatgttgcaatcatgataaggaaaaaaactaaccgtagagtggagatattagacatacaagacctgagtgagagcaatgctgaaatggaagaccagaaaccaatgaccaataattggacacttctaactactcataatcaaatggaaacatgtctggcttgagagaaagaaagaatattgtctcatatttcatccatatatgtatccacaagtgagtatgtgacttggaccattttttttaagtattcctcactactaatcattgtaataattctagacattactaacttataattgcatctatttctgtgtttaataa

SEQ ID NO: 49791 - DNA, 108 bp, Glycine max
  Clone ID: PAT_MRT3847_15970C.1
agatatcaaggagatgcatcagtcaggggactgaaccatcagcagctctagcacggaccctggaatattcagatgtaccagttgcatgtttccatcttgatctacctg

SEQ ID NO: 49792 - DNA, 1120 bp, Glycine max
  Clone ID: PAT_MRT3847_15971C.1
agagccgatactccgccaagggtcttgtgtattgtaattgacgttgaactcgtcaaatacaatacactagagccgatactccgccaagggtcttgtgttctgaagacaacgggtgaggatactgtgaagtacacagataatggtgctccaattaaaaggcacagaaggaagatagtcacggtgcattccaagaaaatagctagcaagagattttggaatgagcatactgttcttttgaaggaccttggtggttttgttgaagaaattaacaatgtgactccagaagtatgtgaggtcctttgaatttgatagcaaattgatgccatgtacatagattggagttctaatagataggtgccacttccacagattttctgagaaacagggctctgtgaaaacagatgattaaggaattggctatctagttgaatttgtgagcaagcctgtgcctaagaaaagtttcgggatgatatagtctttgcctatggggttagtgtcgagtggaggcttgatacttaagaaaaaaacttaatctttttctaaggagagctaatacaataatttcagctattgtgtctttcttcacatccacttatgtgatgagatggaaagatttcttcccacaaagtgagttaaagtaccctccttcctttgatggacgagctgtgtgctatccatctaccgagattctacgggactacctttcatggagacaagtggattgtcacatcaacaatcaatataactcttgtttctggaagttagttgcatctggaaaaagcaaaagggaagcccagaacagtttaaaaggtggtcagttgcaaaagaaaattgaggaattggctattgactacaataaattaccagtcatgtaccgacaaggatcctcaatttatagggacaaggtagacaatgttctaattcatcaggagaatggagagtctcctgaaaattatggaaaggttattgtaggacattttgacatcattggaccaaccttttggttggaacacccaaacatccttgatgaatagttgtatgtgaagtgtagcattgagtctgttaatcacaattctattactttatttcttgccgctgaaattttttgttggtttggttt

SEQ ID NO: 49793 - DNA, 463 bp, Glycine max
  Clone ID: PAT_MRT3847_15972C.1
accagggggattgagtgatgaccaaagtcagaagcaatcactaccttctggccaaagtaaatatgaatttttcattcctacttcaagtaaatagatatacccacattgacttttgagcttaaaacaacaacgacagagtattatcttactaagtgagatcggctatataataaaaaaaatgctaaactcatacataggaagtcgtagctgaattagatgaagtgtggcaacattggaactggtcatgattagagttatagttatccaactcaactctatcatcaattaaacaaaatgttattttagttttaagagtgtgatgctcttgctacattcagtaaaacaactatattataccagttcaaaaaaaaaaaaaaaaaaaaaaaaaaaaaaaaaaaaaaaaaaaaaaaaaaaaaaaaaaaaaaaaaaaaaaaaaaaaaaaaaaaaaaaaaaaaaaaaaaaa

SEQ ID NO: 49794 - DNA, 219 bp, Glycine max
  Clone ID: PAT_MRT3847_15973C.1
cccacgcgtccgggggataccaaataactaatgtggatttgaaaaacccttgctgttatggatataggaaaaagaaatggctaggattgtgtgtggcaagttgccggtggtgttgcactaactcgtaaggcagtctttagctgatatcgctggcaagttggtaatcgaatcactatatgatgctaatgttagaatctggacattaaaaaagacacatag

SEQ ID NO: 49795 - DNA, 576 bp, Glycine max
  Clone ID: PAT_MRT3847_15974C.1
cattactgaatatgtgtcattcatatatcttttgtgcattatggcgttgcaaatctacatgattttctggtagcttatgcttttagcagtattactatttactagtacattgttcaataccaatttactttcatagaaaaccttattttttaattgtgcttttgcagctttgtgataacaggtgcaactgtgcaagtatcaattattagtgttaggacttaggaaagcaagtaaaaacgaaaaattgaaaaatcacaataaacagtaactaaaagtatgagatgaagtgaacaataataatattacactacaaaagtgctctattcttagtgatcaagacaagtatcactgtctataatattttaaataattctgaaatttggtttaatacttcaattgcaggacatggttcttcatattcccttttcaaaattagttttgctatatttttaaactaaaatttggaagttttgtatgtatgtatgtaacaccttgcatatgttgttcatgatacttatagttggcctttgtcaactactgtatctttcctatgctaactgtttgttttaatgctca

SEQ ID NO: 49796 - DNA, 133 bp, Glycine max
  Clone ID: PAT_MRT3847_15975C.1
ataaaggtggtcaatccaatagaaactaaaggtggtttgctggaaatatgtcacccgtcgtgtgtgtgaacttcacgtgtcagggccctctgtggggttgcatgcggtggtgtttggagttgcctatgcacat

SEQ ID NO: 49797 - DNA, 126 bp, Glycine max
  Clone ID: PAT_MRT3847_15976C.1
ctgatttgcctcttcttctagttggatatggatttggtgcctcctttgttgcactattggcccaattgggtggtggaatatacacaaaggccgctgatgttggagcaaaccttggcggaaaagtag

SEQ ID NO: 49798 - DNA, 735 bp, Glycine max
  Clone ID: PAT_MRT3847_15977C.1
aggagaaaacgtaaaacctaattaattagggttccgagactgagaatcctggattgctcgcagccttgacccaccttcttctctcagtcgttagggtttcgtgtggtctcttgttctctctaacaaccaggagttgtgtgatatttagtaaaatgggtgagactggaaaacgatatcattcgcagagagaccatgatggggacaggaaacatcaaaagagacgaatgactgacagagatgataggggcaatgatgaattgattgtatataggatactctgtccagatgaagttattgggagtgttattgggaagaatgggaaagtgataaattcaataaggcaagaaaccagggcgaaagtcaaggttgtcgatccgtttcctggctccaaggatcgggtaataacgatctactgctatgtcaaggagaaggaagacgttgagattgatgatgagtttgctggtaaagaacctctgtgtgctgctcaagatgctcttctaaaggttcatgtagccattgcgaattccatagcagctattggagattccgagaagaaacgaaaggatagagatgaatgtcaaatccttgttccatcaagccagtctgcaaatatcattggtaaggctggggctaccattaaaaagctgagaagtaagacaagagcaaatatcaagggttctgccaaggatgcaattgacccaacacaacacatgtgctatggagttttgataattt

SEQ ID NO: 49799 - DNA, 304 bp, Glycine max
  Clone ID: PAT_MRT3847_15978C.1
aagggaaagccaagccggcaacatgagaatgcagacccgggcccgaatcaatcatcactggacggggttccaaactttcatacacacatccaccaccacaacacgtgaacttccaaccaggccgaataagaaggtcattattaatacatgcgtaacttcacacctaaccaaaagacaatgcatatcaaatgccatcagactcaatactgttgagtagacttaacaatacacaaaccgcttgcgccaagaaaaccggatctatgtatgtacacttgggcccgcatatctagcctatcttcctggt

SEQ ID NO: 49800 - DNA, 277 bp, Glycine max
  Clone ID: PAT_MRT3847_15979C.1
ctctgtctttgaagaataagtagatccaaagataatcataatgaagcgaagtgttgagagtgtgatggggtcacgtgcggtaccatctcaggccacgtgattcggcttgaccttagcggcgagtagcttcaaggtcaactccatccctagagcaccatcttcagcctaaggcaccgtcaacaactcgaccgatcctatgatgatggttcaggctctgcatgatattctgcagtgtgggatctcgtcaagctcatgaagcttaatgtggcatactctc

SEQ ID NO: 49801 - DNA, 463 bp, Glycine max
  unsure (1)..(463): unsure at all n locations
  Clone ID: PAT_MRT3847_1597C.1
ggggccgcgcgcgtccgtacggctgcgagaagacgacagaaggggtcattaagatgccatctaacggcgacnttcggttgggtcacgccaacgtggggttggnnntcagggatttcggctacaaacccaccaccgatctctccaccgggctcagcaaggtcggcaagggggacctcgggtattacgggctccagccaagcctgaaaaagggtaatcaccttcacaatattggatgaccatttctataattatctctcctctattttggtctttttacgggaaggaaaaaaaacaaaaaaaccttccccttggtcatggatcatttttcttggttttggtgaatcattattattattattattggtattggtgggggggtggagcaattatacatcatataaatatctggtgtaaatgaacggcatgcatatatataaatgtgatgggaacaaacagaaacaag

SEQ ID NO: 49802 - DNA, 903 bp, Glycine max
  Clone ID: PAT_MRT3847_15980C.1
gaatgtacattgagtaaatcatatttgatatctatatagtttctttttttgatatatatttcttatggggaaatcattgttaatttgttattcaacttaccaaaagatggcacgatatggcaatggcatggccaggggaggttgaatggggtacttttgttaaacatggctcttataaaacaagactgttaggagtgtgtatttttttttaaaaaaaaatagtaacaccactcactcaaattcaatactcatttacctgaaccaaaatataccaaataagagaagatttggatgtcacccgcaggccagagctggtcggtctctgcttcatcagcctagctaattagcatggaagcttatgtgaagtgaccagatggaagaatgaaaatgaggagtacgatggtgcatgtgggggttttgtgctgtctattggtgcaggaatcgtagttaactgggttttattaagctactgaagtgaactatgtgcatatggcttctatgtgcatcagaaatagccaagtaaaattctgaagaactacttactaccttggtattcgggggttgttcccagcttcttccttctgttatcaattattttatttaactttattcgcaccttgctaaattcttaagcttaggctggtgaatttccttttgttcagttatagaaagagaaggaaaatatgatttgactcctgagaaacaggggttgtaccggatcaagaaaaatgttttgaaatcggatggttgttgtgtctaattgtctatagcagctgatattatttattaacataccatttctgctgttgagggtagttgatgaatgataaaaaaaaaaaaagggccccttataagttatggattaatgccttgctctctactctagtgtccctaatttttacc

SEQ ID NO: 49803 - DNA, 2759 bp, Glycine max
  Clone ID: PAT_MRT3847_15981C.1
ccacgcgtccgcggacgcgtgggcggacgcgtgggctgcttcaacttgctccctcagaagcgaagaagaagccacagagaaccagtctcctactctctctcacccacaagaaaaatggcatctcacatcgttggatacccccgcatgggtcccaagagagagctcaagttcgctctcgagtctttctgggatggcaagagcagcgccgaggatttgcagaaggtggctgctgatctcaggtcatccatctggaagcagatggctggtgctgggatcaagtacatccccagcaacactttctcgttctatgaccagctgctcgacgccaccgccaccctcggtgccgtcccccccaggtacggctggaccggcggcgagattggattcgacacctacttctccatggccagaggtaatgctaccgtgcctgctatggagatgaccaagtggttcgacaccaactaccactttattgtccctgaattgggccctgatgtgaacttcacctatgcttctcacaaggctgttgatgaatacaaggaggccaaggcgcttggagtggataccattcccgtactcgttggccctgttacatacttgttgctctccaagcctgccaagggagtcgagaaatccttttctctcctctctctccttcccaaggttcttgctgtctacaaggaagttattgctgaccttaaggcagctggtgcttcatggattcaatttgatgagcctacccttgtcttggaccttgaatctcacaagttgcaagctttcactgacgcatatgcagaacttgcacctgctttgtctgatctgaatgttcttgttgagacctactttgctgacatccctgctgaggcgtacaagaccctcacatctctgaatggcgtcactgcatatgggtttgatttggtccgtggaacccatactcttgatttgatcaagggtggatttcccagtggaaaatacctctttgctggagtggttgatggaaggaacatctgggccaatgaccttgctgcttctctcactacattgcagggtcttgagggcattgtgggcaaagataagcttgttgtgtccacctcctcctcccttcttcacactgctgttgatcttgttaacgagaccaagttggatgacgagatcaagtcatggctagcatttgctgcacaaaaaattgttgaagttaacgcattggctaaggcattgtctggcaacaaggatgtggccttcttctctgctaatgctgcagctcaggcttcaaggaagtcctctccaagagtgaccaacgaggctgttcagaaggctgctgctgcattgaagggttcagatcatcgccgtgcaacaaatgtcagtgccagactggatgctcaacaaaagaagctcaaccttccaatccttccaaccaccactattggatccttccctcagactgtagaactgaggagggtacgccgtgagttcaaggctaacaagatctccgaggaagagtatgttaagtcaattaaggaggaaattcgcaaagttgttgaacttcaagaagagcttgatattgatgttcttgttcatggagaaccagagagaaatgatatggttgagtacttcggtgagcaattgtcaggctttgccttcactgttaatgggtgggtgcaatcctatggttcccgttgtgtgaagccaccaatcatctatggtgatgtgagccgcccaaagccaatgactgtcttctggtcatctctggctcagagctttaccaagcgcccaatgaagggaatgcttaccggtcctgttaccattctcaactggtcctttgttagaaatgaccaacctagatctgagaccacctaccagattgctttggctatcaaggacgaagtggaggaccttgaaaaggctggcatcactgttatccaaattgatgaagctgctttgagagagggtctgccactgaggaaatcagaacaagctcactacttggactgggctgtccatgccttcagaatcaccaatgttggtgtgcaggataccactcagatccacacccacatgtgctactccaacttcaacgacatcatccactccatcatcgacatggacgctgatgttatcaccattgagaactctcgctccgatgagaagctcctgtcagtcttccgtgaaggtgtgaagtatggtgctggaattggccctggtgtctatgacatccactccccaagaataccaccaactgaagaaatcgctgacagaatcaataagatgcttgcagtgctcgagaagaacatcttgtgggtcaaccctgactgtggtctcaagacccgcaagtacactgaagtgaagccagccctcacaaacatggttgccgcagcaaaactcatccgtaacgaacttgccaagtgaatggtataagaaagtagaatctacaagttcattggttctgcttttataatacaccaaagaaaaattttctatattgggttgtttcaataaccgtgtgtggaatatttagatgttttagcatgctctgtgagcaattgattcttcctcaacccctctccccttatttttcccaactcctgttttccctaatgaatgttgtatctttgcggctttgccgcaatccttattgatatgaaatattaccagttttgtgcaaaaaaaaaaaaaaaaaaaaaaaaaaaaaaaaaaaaaaaaaaaaaaaaaaaaaaaaaaaaaaaaaaaaaaaaaaaaaaaaaaaaggaaaaaaaaaaaaa

SEQ ID NO: 49804 - DNA, 1382 bp, Glycine max
  Clone ID: PAT_MRT3847_15982C.1
caatggcatggccagggtaggttgaatggggtacttctgttaaacatggctcttataaaacaagactgttagtagtgtgtatttttctataaaaaaaaatagtcccccctctcgctcgaattcaatgctcatttacgtgacccaaaatataccaaataagagaagttttggatgtctcccgcagcccagagttggtcgggcatttcgacacgtggttccaatcacaacaactttatccaattgcctcgtttctaccaatagcccaacacaaccaactcttttttatttatttccaccaattcttttcttttttttgtttttcattctgcttcatcggataagcataagacaccatcttattcatatgatgaggggaagaaggagacatcaagatgagcaatctcgtgctttgtacgacctctcctctctcgttctcaacctccttcgctcgcctctgacgttctccgacgaggttccgccagcgtcacggcgtccgggccaggctcagatatccccggcgggattcgcgtcgttgctgctgggaatatccctggcgttgatgctgtgtggatctgtgacgttcttcatcgggttcgtgttgatgccgtgggttctgggattggtcatgctcttctacgtcgccggaatcctctccaccctctccgtcttcggccgctccattctctgctacgccacctccccaccctcgccgcgtaaggacattcccgcatggaagcttatgtgaagtgaccaaatgaagaatgaaaatgagttgtacgatggtgcatgtgggggttttgtgctgcctatagatgcaggaatcgtagttaaatgggttttaagctactgaagtgaactatgtggatatggcttcttgtgcattagaaatagccaagtaaaattctgaagaactacttactaccttggtattgagattgaggggttgttctgttcccagcttccttcttccttccgttatcaattattttattcaactctatcgcaccttgctaaaattcttaagcttaggctgttgaatttccttttgttcaattatagaaagagaaggaaaatatattgatttgactcctgagaaacaggggttgtaccggatcaagaaaaatgttttggaatcggatggttgtttgttgtgcctaattgtatatataaaaagatatggaaaatatgatttgactcctgagaaacaggggttgtaccggatcaagaaaaatgttttgaaatcggatggttgttgtgtctaattgtctatagcagctgatattatttattaacataccatttctgctgttgagggtagttgatgaatgagaaaaattcttattgttcacttatcgttatgtgagcttgccttgctcgcaaaa

SEQ ID NO: 49805 - DNA, 2947 bp, Glycine max
  unsure (1)..(2947): unsure at all n locations
  Clone ID: PAT_MRT3847_15983C.1
ccggtccggattcccgggtcgacccacgcgtccgctctgcttcaacttgctccctcagaagcgaagaagaagccacagagaactagtctcctactctcacccgcaagaaaaaaatggcatctcacatcgttggatacccccgtatgggtcccaagagagagctcaagttcgctctcgagtctttctgggatggcaagagcagcgccgaggatttgcagaaggtgtcttctgatctcagggcatccatctggaagcagatggctgatgctgggatcaagtacatccccagcaacactttctctcactatgaccaggttctcgacgccaccgccaccctcggtgccgttccaccaaggtacggctggaccggcggcgagattgggtttgatacctacttctccatggccagaggtaatgctaccgtgccagctatggagatgaccaagtggttcgacaccaactaccactttattgtccctgaattgggccctgatgtgaacttcacctatgcttctcacaaggctgttgatgaatacaaggaggccaaggcgcttggagtggataccgttccggtcctcgttggccctgttacatacctgttgctctccaagcctgccaagggagttgagaaatccttttctctcctctctctccttcccaaggttcttgctgtctacaaggaagttattgctgaccttaaggcagctggtgcttcatggattcagtttgatgagcctacccttgtcttggaccttgagtctcacaagttgcaagcattcactgacgcatatgcagaacttgcgcctgctttgtctggtttgaatgttcttgttgagacctactttgctgacatccctgctgaggcatacaagaccctcacatctctgaatggcgtcactgcatatggatttgatttggtccgtggaaccaacactcttgatttgatcaagggtggatttcccagcggaaaatacctctttgctggagtggttgatggaaggaacatctgggccaatgaccttgctgcttctctcactaccttgcagggtcttgagggcattgtgggcaaagataagcttgttgtgtccacctcctcctcccttcttcacactgctgttgatctagttaacgagaccaagttggatgatgagatcaagtcatggctagcttttgctgcccaaaaaattgttgaagttaacgcattggctaaagcattgtctggccacaaggatgaggccttcttctctggtaatgctgctgctctggcttcaaggaagtcttctccaagagtgaccaacgaggctgttcagaaggctgctgctgcattgaagggttcagatcatcgccgtgcaacaaatgtcagtgccagactggattctcaacaaaagaagctcaaccttccaatcctgccaaccaccactattggatccttccctcagactgtagaactgaggagggtacgccgtgaattcaaggctaacaagatctccgaggaagagtatgtaaagtcaattaaggaggaaattcgcaaagttgttgagcttcaagaagagcttgatattgatgttcttgttcatggagaaccagagagaaatgatatggttgagtacttcggtgaacaattgtcaggctttgccttcaccgttaatgggtgggtgcaatcctatggttcccgttgcgtgaagccaccgatcatctatggtgatgtgagccgcccaaagccaatgaccgtcttctggtcatctctggctcagagctttaccaagcgcccaatgaagggaatgcttaccggtcctgttaccattctcaactggtcctttgttagaaatgaccaacctagatctgagaccacctaccagattgctttgtctatcaaggacgaagtggaagaccttgaaaaggctggcatcactgttatccaaattgatgaagctgctttgagagagggtcttccactgaggaaatcagagcaagctcactacttggactgggctgtccatgccttcagaatcaccaatgttggtgtccaggataccacccagatccacactcacatgtgctactcgaacttcaacgacatcatccactccatcatcgacatggacgccgatgttatcaccattgagaactctcgctccgacgagaagcttctgtcagtcttccgcgaaggtgtgaagtatggtgctggaattggccctggtgtctatgacatccactccccaagaataccaccaactgaagaaattgctgacagaatcaacaagatgctggcagtgctcgagaagaacatcttgtgggtgaaccctgactgtgggctcaagacccgtaagtacactgaggtgaagccagccctcacaaacatggttgccgcagcaaaactcatccgcaacgaacttgccaagtgaatggtataagaaagtagaatcttccaagtcatttggttctgctttatattataatacaccaaagaaaaattttctctatattgggttgtttcaataactgtgtgtggaatatttaggtgtcttagcatgctctgtgagcaattgattcttcctcaacccctccccccttatttttccccactcctgttttccctaatgaatgttgtatctttgcggcttcgccgcaatccttattgatctggaattttaccagttttgtgcaaataactatgagcatctatatcgagtatttcaaaatacatgcttaagaaaaaaaaaaaaaaaaaaaaaaaaaaaaaaaaaaaaaaaaaaaaaaaaaaaaaaaaaaaaaaaaaaaaaaaaaaaaaaaaaaaaaaaaaaaaaaaaaaagggggggngggggggggggcccttttaaaggacccaattttacacccccgggttgccaaggaaaaagttttttttaggggcccccaaattccattccctggcccgggttttaacaggggggagctgggaaaacc

SEQ ID NO: 49806 - DNA, 472 bp, Glycine max
  Clone ID: PAT_MRT3847_15984C.1
gctctccgaacctcagtggcctcgatcatcatcatcaacatcatcatcatcaaaaccctaattttcatttgtccaaaccgccgcaagatcctcaaatgggaatgaggcttggtggaggaagggctcccactcccgcttttaaccatcattactccaggcaaccaccctacagagcttatgcctactatgatgactctgcagcagcctcctatgcccatgataatagaattcatactgtgtccaggagtcctagaacaaaatctatttgggaatgaatagaatgtaaatgtaaatgctctctcttattcatataccattctaaactctgctttcttttcttcccttctagcaaaccctgccattcatttttattattacaatttcacctaagctaaccttctattccagtctcaagcttaaaattaactacatccagcggcgcatttcacaaaatctagatacatttcaagtc

SEQ ID NO: 49807 - DNA, 1151 bp, Glycine max
  Clone ID: PAT_MRT3847_15985C.1
agagtaaactcacaagtgaatgcaactattattaactttccaaggttaaaaaggcctgcactctgcatgacatttatatatgcggagagcacagcaaaatgccccactgatcacaaaaatatccattaaatttgatgaaaatacagtaaaaataaaaggactaattaatacaagaaaacaaattgataatcatagagcagttctgagttctacaagcaaattttaagcagaaatgctgctcagtcagagaagagacctatatgagagttgatcataaggaggacacgttcccgtgtttctcagtttctccataataattatgaatgaacgacaccaatcttcttagcaaaatcatccccatcttcttcttccatgtaatcttcctcttgattttcaccctcttcaccttgttcatactcatagtatccctcttcaccttgttcatactcatagtccgcatctctctgatcatcaccttcataagtactgatcctcacccgattcattgtacactattccctcctcatattcaccatcattgtctcctccagctgcatcagtgacctcaagcttggattcttcattatttagcagaagattcttgtcatcttccttggtctcagacagcactccattttgtgtgtttgcaacagacataggatccgagccatgggtaacttctacattcttattgtcagatgatttgccattcccagagtctgaatcagctccagctcctctcttctccttcagaatttcactaagaggttttggaccttcaaacagaaaatcatcgtcagattgtgggtgatcgtcccttaaacttcttctccttcccagtgattgttgctccctattctcggtgttcctcccatttttaagttcagaaagactttttggcgcagcaaaatcactcctatcacccggtagttctctccccatcaatcgatccttggagtttctcctctcatcatcttgcaaccttcctcttattctgtcatggacccttccctctctaggtgacaaatggtgagtggctggcaaccttccagaaggtaatctgttcctaaatcttcccccgtcttccctctctgggtgatcaccgtcaccattttccggaagttttattctaccccggaagcgctcgagcc

SEQ ID NO: 49808 - DNA, 277 bp, Glycine max
  Clone ID: PAT_MRT3847_15986C.1
gcgattttggaatcttccgcgtcactccgtcgccgccgccgaaagccaccgcaatgtcaaagaaaaggggcctctcattggaagagaagcgcgagaagatgcttcaaatcttttacgagtcgcaagacttctacctgcttaaggagctcgagaagatgggtcccaggaagggtgtcatttctcagtctgtgaaagatgtggtccaaagtttagtggatgatgaccttgtttccaaagataaaataggaacttctgtgtgcttttggagtctacctag

SEQ ID NO: 49809 - DNA, 445 bp, Glycine max
  unsure (1)..(445): unsure at all n locations
  Clone ID: PAT_MRT3847_15987C.1
cctctcaaaaaatantgactttcttcaaaaaaaggtcaactttattgaaaaaatcaattggtgtgggtttccccaacgttcctaatctattaaagcaaagttgcaaaactaaggaatttttctaacccccctttagcctatgacaaaagcatttcttgtaacagagttgtgaataagcggaaatcatattgatcatgctaccccacccggggccactcccgaaaagtaagaaaagagataatttttactttgtgtggtgctccaaaggaaggaaactagtccccggccttgggggggtaatttttgggagggatgaaaaaaccccttccctttctgggttcaagggaaacgggctcaacaatggctatgaactcccttgggccgaaattcaaaattaccttcccgggcctgggaaaaaaattttttttttttgggggccccaaat

SEQ ID NO: 49810 - DNA, 1399 bp, Glycine max
  Clone ID: PAT_MRT3847_15988C.1
ggctcgagaaacaaatgtgttcaccggaggcaagggtgacagagagcaaagaatctttctctggtttgatccaacaaaagcataccacagatactctgtgctgtggaacatgtatcaaattgtgttcctagtggataacatcccaataagggtgttcaaaaacctaaagggcttgggagtgaagttcccctttgaccaacccatgaaggtgtacaacagcttgtggaatgctgatgactgggccacaaggggtggtttggagaaaacagattggtccaaagcacccttcatagcagaatacaaagggttccacgttgatgggtgtgaagcttcagtgaatgcaaagttctgtgctacacaaggcaagaggtggtgggatcaagcacagtatcatgatcttgatgcttctcaatggagatggctcaggtgggtgcgcaggaaatacaccatctacaactactgcactgacagaagccgctaccctcagcttccacctgaatgtagaagaaaccgtgacatttaaattcacatgtagtactatgtttatggttgctaccataagtttcttattgtattattgattcatcatttaccatatactttattcctaccattatttattatcattgtattgtttgagctgtgtaattgatgagtgaggtttgaatacagagcagagcctctataataaaattatatatgttgtgtaaaaaaaatttactcattcaaaaaagtaaaagggattaataaactatttaaaacgctggaaaaaatttaaaaaaaagctcgctgatgccaatgaggaatccaaagctgtgaactaagctccttcaacaagtaacatagagctttgaattattaaagatgttgatgtggttaagaaaactgctcattacttaactcccaaagttcaccattttgtgtgttcgcagcaggtgtaggattctggccactggtaacttcttaattcttattgtcagatgatttgccattcccagagtctgcatcagctccagcacctctcttctcccccttctgtcgtcttctcgcagccgtaccttcaaacagaaaatcatcttcagattgtgggcgatcatcccttaaacttcttctccttcccagtgattgttgctccctattctcagtgttcctcccatttttaagttcagaaagactttttggcccagcaaaatcactcctatcacccggtagttctctccccatcaatcgatccttggagtttctcctctcatcatcttgcaatcttcctcttattctgtcatggacccttccctctccaggtcccaaatggtgagtggccggcacccttccagatgacaatctgttcctaaatcttcccctgtcttccctctctaggtgatcagcaccaccatttgct

SEQ ID NO: 49811 - DNA, 1431 bp, Glycine max
  Clone ID: PAT_MRT3847_15989C.1
aaaaaacaaaaagtttgaaaaaacgtcttatatctttctcttcttctccgtggagaatgcatctctgtggcctggtttcttgttaaccaggtcctcaccagcttttaaatacttaaatttcaatcaatcccaattttctcacattccctttttgccctttctatctctctcgtctttctcccacaatgaacgatcttctaacggaatcatttgaaattccacgtggccaaggtcacggaggtggtggtgacattgagttaggagaatatgcaaggaattcaggagacctgggcttggatagtttcttcaagaaggttcaagagcttgataaacaatatgctaagctggataagcttttgaaaaagctccaggatgcccatgaggaatccaaagctgtgaccaaagctccttccatgaaggctataaagcagagaatggagaaagatgttgatgaagttaagaaaactgcacattacttaaagaccaaaattgaagaactggacaaagagaatttggcaaacaggcagaagcctgggtgtggaaaaggatcaggtgttgaccggtcaagaacagcgacaaccatttctttaaaaaagaaactgaaagataaaatggctgagctaaatcatccccatcttcttcttccatgtaatcttcctcatgattttcaccctcttcaccttgctcgtactcatagtatccctcatcaccttcaccttgttcatactcatagtccgcatctctctgatcatcaccttcataatactgatcctcacctgcttcatcgtacaccattccctcctcatattcaccatcattgtctcctccagctgcatcagtgacctcaagcttggatgattcttcattatttggtggaagattcttgacatcttctttggtctcagacagcactccattttgtgtgtttgcagcaggtgtaggattctggccattggtaacttcttgattcttattgtcagatgatttgccattcccagagtctgcatcagctccagcacctctcttctccttcagaatttcactaagaggttttggaccttcaaacagaaaatcatcttcagattgtgggcgatcatcccttaaacttcttctccttcccagtgattgttgctccctattctcagtgttcctcccatttttaagttcagaaagactttttggcccagcaaaatcactcctatcacccggtagttctctccccatcaatcgatccttggagtttctcctctcatcatcttgcaatcttcctcttattctgtcatggacccttccctctccaggtgacaaatggtgagtggccggcaaccttccagatgacaatctgttcctaaatcttcccctgtcttccctctctaggtgatcagcaccaccatttgctggaagttttattctacctcggaagcggttacc

SEQ ID NO: 49812 - DNA, 354 bp, Glycine max
  Clone ID: PAT_MRT3847_1598C.1
ttctctcgtccggccacgcatgctattctcatgaatatgcctaatgctgctctttcaatgcggtgatttcgatggatatcataattgccaaggacccaagatgacttctccctacatgaactgcacagcctattgctttttcgcatgtgcatatgagggtgaggataccatcaattgtgcggctcctccccacaagctggcgcatgctggacagatccacgacaacggagtcttgaaatggtcacaagaggaatttgttacaggctggacaacttatgtgcgtacgacatcgactctcatgtgtggtgggtgtccatatctctatgctctggagcatgataattgagggtctac

SEQ ID NO: 49813 - DNA, 219 bp, Glycine max
  Clone ID: PAT_MRT3847_15990C.1
ctaaagagcgtcgtagtcgcaaccctaatcagaagaagcgcagttgcaagcgagtgacagccaccagccatgggtcgtatacaccaccgcggtaagggtatatcctcttctactttaccctacaaacggacaccgcctagctggctcaagatctcttcgcaagatgtcggagaccatatctgacaatttgcgaagacaggttctaaccccgtcgcagat

SEQ ID NO: 49814 - DNA, 445 bp, Glycine max
  unsure (1)..(445): unsure at all n locations
  Clone ID: PAT_MRT3847_15991C.1
cgggtcggncacgcgtccgaagtactgaggttcttcattctggctcaggcgttgcgacatccccgtcccactctcttcttcagccttcttggagtctctcacgccagttgcacacacatctactggggctaaggtcggaacgatggctgcctcttaaaaacatgtgcatgacgcatgtactcagacctagtcatagccattctcagcgaattcggcaatggtccaaccccataaacgaaccgtgctggtcactgggaccccacagtcaattcctgcacaatgtacagctctgagttcgaagactgctactgcgaatgtatcaaggtgttgctttcattaggtggtcgcattggatgctacactttggcgtcactacaatacgcatgagtcgtttcaatgttgctgtggaacactttcttgggaggcaagtcatctacttcgccac

SEQ ID NO: 49815 - DNA, 191 bp, Glycine max
  Clone ID: PAT_MRT3847_15992C.1
gggaaggtaaatctctggttatttataggaaacatgccctactttttaagttttattcttcccctggtacaacatctggggggaattaaacaagaaagggaggggttaccaaaacttttggtgaccggtcaaaatttttggtggtccccatacaagaaaaagaatgtttttttaatttattttgcctttgt

SEQ ID NO: 49816 - DNA, 461 bp, Glycine max
  Clone ID: PAT_MRT3847_15993C.1
gaaaatgacatagggaacttataattcccataaactttattacggatccaacccttattattacaaaattgctgggataaatcaattagctacatttaaaagggaccaaaaatggggcccatataattagacaaaagcctttagccaaagcagcttttcatttataaaagggtttggatggcccaaaggggaaatagggaaaaaccgaaaagggtaaaacacaaaacttttggatgggcatcatttcccaaactcaaaaaaaggttggcaaacttcccactttggtttacctttaccctttccttgacctttttgggcttaaaactggggttgcacacgtgcgggaaccactggtttggcttcttcactcttcttcttcacttcccttttggaagcaacagctaactttttttggtttttcaggtaataaagcctagccctttctttgaaaactttccaaa

SEQ ID NO: 49817 - DNA, 1496 bp, Glycine max
  Clone ID: PAT_MRT3847_15994C.1
cggctcgaggacagtcacgcgtagcaacagaacaagagtggaagtattcttcactaaaaaaaaaaagagtcgataaatgtcagacggaacattgcaggtactggacggaacgcacctgagaggcgtcgatctgtccttaggcgacgacggtccattcaccggagctaacatactcgacattgcccattcccgagcctcttcttccctcttcggtctctcattacccgattctctcaaagcctctgctctcacgcgcctccgcacaccagacgccgatgctttccgctccgccgagtacaccgccgacaaggcctccgagattcttcgagactacatctccgccatcgccaatgaactcaaagataatcctcttgttgtatcaatcttggatggaagtactctccggttgttatcagaggatgaggatgactttgccatgttagcagaaaatctattcactgacttagatgtcgaagacaaggggaaaatcagcaagagtgaaattcggaatgctcttgtccagatgggagttgagatgggcgttcctcctttctcagaatttcctcagctaaatgacttgttgaaaaaacatggggcggatggagaagaaaaattgggtcaggcacagtttgcacagcttctgcagtctgtactgcaagatctagaagaggaactttctaaacaaaatgttgtttccattcagaatattcgaatcattaatggctgtaagctaagacagctattggccaatgaacaggaattaaacaccattgtggagaaggcattgctggaaaaaccggaagcaaaggatggactagtagggaacacagaaataataaggagcttccttgagagaaacgcaaaggaattgggtttaccgccagctcaagctgacaatgcagttgttcttctttatgacgctgtctttgctgaaataacaaaagaaaaagatggtgctgaattagataaagaagagctggcaaaacttgtgaagaatatcctcgagaaattcgcagagcagctagaagttaatcctgtgtatcaggacttagcttgaggaacgtgagttaatgggccacatttcatatgttatgtttgaaactttgcatcattacaaagtatttgggattcgcaccccctctcccccaaacttcagcaatatgtatactgtataatgaattttacttatgtggattgtggaggtgccttaaatagcatgcatggtcatgagcttgggtaattttgttttaaaattatgagatttttttttttgccggggttagagttagaaatcatgtgtatttttcaactcacttgtcagatattaactctgcttatgttgtgtgattgttgttgactgaagattttgcattcacaatttgagtcatcttgttaaataaattgtttttcaacaaaaaaaaaaaaaaaaaaaaaaaaaaaaaaaaaaaaaaaaaaaaaaaaaaaaaaaaaaaaaaaaaaaaaaaaaaaaaaaacac

SEQ ID NO: 49818 - DNA, 309 bp, Glycine max
  Clone ID: PAT_MRT3847_15995C.1
gcacgagggtgaatccacgtcacgcactatatctatagagtgtgggatgcagagttctgcatttggatttttgcttgctcagaagcactttacaaaccctcttgtagctgttccttctgctgttagcgttgtctgcatggcgcttggtgggagtgctcttgccgtgttttggatgaacagaccaattccccttgatgacaaagatgatttcaaggaatgaaaatcattgtctaacttccctgcattgcgagccttaattaataatgttatttccccctcatttttttgtaggacaattgtttttattag

SEQ ID NO: 49819 - DNA, 471 bp, Glycine max
  Clone ID: PAT_MRT3847_15996C.1
cacgaggagaagaatgaagatagaaaggatgtggcaaagcccgcgatgatgataaagaatggagaagataagttgggaattctcttcaaagagaacgaacaattgaaagtgcaatatctcttcctcggcatcctcgccctctccttccctttcatcctcttcgatatcgcccccgctttcttttgcaacatagcggggttcgcatacccagcatacgccactctcaaagccatcgaacatgaccatgatcaaatcaaatcccaatggttaatatattgggtgatattcagtgtattgtgtatcattgactccgcctccttccttatttactggataccatattattacgtatacagattcttcttcatggcgtacttgtatttacccatctcgctgggagcaaagaaagtgtttgcaatggtggagagacatatgaactttgtgggaagtaaattggaagaagcagcggaa

SEQ ID NO: 49820 - DNA, 805 bp, Glycine max
  Clone ID: PAT_MRT3847_15997C.1
tttttatcaatatcataaaagatcttaccagtggggaacagctaaaagatcgggatgctgcacaaacaagtttgacccttctttcgagttttgctcgccaagggagaatttttcttggactttctgttagtgggccggaaattcatgaagagttttttaaaggccttaacatcacagcagatcagaagaaagttttacggaaagcatgctattccttttatgatgctgcagctgaattacttcagtctgagcattcttcacttcgcttaatggagcatgaaaattctaagattttgaatgcaaaaggagagctcagtgatgaaaatattgcttcatatgaaaagcttcgtaaatcctatgaccatttgtaccgtaacatctcatcattagcagaagcacttgatatgcagcctcctgtaatgccagaggatggccacacaactagggttaccagtggtgaggacggtatttcttctgcttctggtaaagattcttctgttgttgaacccatatgggatgatgaagatgcaaggactttctatgaatgtttacctgatcttagagcttttgttcctgctgtgcttttgggagaaacagagcctaaaagcagtgaacaatctgcgaagaatcaagaccaaacaactgaaatattacctgaatcagacaaaggtcaacagaccacccatgaaagtggagaggtctctacagagtctagtgctttgccagaggcagaaagcacagaaagagtgaaggataaggaggaaaaagacaagtctaaagaattggacagagagaaggaaaaaga

SEQ ID NO: 49821 - DNA, 285 bp, Glycine max
  Clone ID: PAT_MRT3847_15998C.1
gttggttttgtttcaactattgttggacttgtttgttacggtctcagctcctccttcaactacctatttggagagtggagcttgttgaagatctttctttacagtggttttagtctcttcatctgccttgggaatctgtttgcaaaggtatgtcgaccctcaacctcaacgagtctccgattcaaagctcattcatcattcttggttttgaccatcacatctgtgtattcctattttgctgacaaagctatgaatggaaaaccagatgtatatagcttgatttca

SEQ ID NO: 49822 - DNA, 246 bp, Glycine max
  Clone ID: PAT_MRT3847_15999C.1
ctccgttcctaattcccggctcgacccactcgtccatacctacaaaactacacaacagtactttagcacgagattatttttaactataaggcagtctacttcattggcaactctaacttccttattgtcctctccgtcaccctaaccttcttttctatactacttactaacgcccacttaacctactccatttctttcaacttcaacaaactcaacccaatccacccaaacattaacctccctaaa

SEQ ID NO: 49823 - DNA, 884 bp, Glycine max
  Clone ID: PAT_MRT3847_1599C.1
cacacgcgtccgtgcggaagacgacagaaggggatatttagatattttacttttagatttatttggagtttagtttagaacaggcctgtcttctcttaaacgaggtcgtgttgcttggttttgaatttgaagtgatttgatgatggagatgaatatattggcttcttcgttctctggttatgcaaaaccctttgtaagagtaaacccttctcttcttacgctcagggcatcttctctgcgccatgactaccctcttgcaagcaaaattgttgtcaaaaatttaccatattctaccggtgagactactttgcagaaggaattttcaaattttggcaagatagctgaagttaaaatggttaaagatatgaacacaaaaagatctaagggtattgctttcattcaatatacatgtcaagatgatgccatgcttgcactagaaaccatggatcagaaggatttttatggtcgaacaatcggcgtggaaattgcaagactgggttgggatgattttggtgcatccccaagggcctcaggacccccaaagaagtgggatttgccagagcaaggggaagtggtagattgctggtactgatcaaaattcatgattgagtaaagctgtagaagagaaaatgatggaacaacagatatcaagttatacaagaatggccatactataggattgatggaacattatattttagtaataatatttgatgcaacactgtagttcatgtgatctctcacggtactcttcattttggcacaaaataaaatgtagtccttccggaaattaactttgatcaatctgtagagctcctacatttataaattttactgtactagttagattccgatgattttcattctgaaaaacaaactgggat

SEQ ID NO: 49824 - DNA, 601 bp, Glycine max
  unsure (1)..(601): unsure at all n locations
  Clone ID: PAT_MRT3847_159C.1
tcccgggctcgcacccacgccgtccgtaccggctgtttaaaaaacgacagaaggggacctatcatggcaattatcttcattatgccttcggggatgaatgttgtctctcatagaaaacacaaaccctttcccgtaatatgaaagaggagcggggggctcgggatctggaagagcgaagcgccacccgacggctctggggtataacgtataacatttagggcatcccgaaacccgccatttcccgagacgcgagacctggaagcgtaaagcgggtctcatctaccatcaaccacgaagccctctgagtatctaacatcttaacgtagaacgcgactctggaccctacactctacactctccacgctcgaccgaagatcgcatgtgccatggacactccctacacactcaagacgcgaccctctaccctttacggggtcagagaataaacaattaccgcattgtgcattgcatcagggattatgatatcgtatagcgatagccctgttcattgtatgcatcaggcctctagccgttacctgagacttaacatttgaccattgagccttgagtctgagaattgataatntgtcaattgcattna

SEQ ID NO: 49825 - DNA, 192 bp, Glycine max
  Clone ID: PAT_MRT3847_15C.1
acatgcactttccacccacttgctgaggcaaaggaaacagctgctcccggggcaaaagagtatgggcatattcgcatacaacagaggaatgggacgaagagtgtgaccacagcgcaagggctggagaaagagttcagctaccaaaaggatcctcaaagacctaacaaaagagttctgctgcaatggcaatgt

SEQ ID NO: 49826 - DNA, 439 bp, Glycine max
  Clone ID: PAT_MRT3847_16000C.1
acgacagaaggggtagaagaggtatggaatgcctcttgtttgtgtttttggtttctataattgcaattagaattttgtagtttagtttgtttagggttttgtgtttgaagtgttttagttaggctctgtttagataaactcttgcatgataagaaaataagaaactaaatgcattggcgtttttcataagctgaaatgcgctttaaacttgagaagataaatgaaaatacaagaatctcaatttctttgctatctttttaacttacatagaagttgattcaaacatgccttgcttttggagtttgtgtgagatcagagtgtgatcttacttgttggtcttgtttcttgtgttaaatggtatgtgtggtgtttgattgggtgtgacttcaaattgtaggttctgctatcactggtccaattgggaaggagtgtgctgatc

SEQ ID NO: 49827 - DNA, 173 bp, Glycine max
  Clone ID: PAT_MRT3847_16001C.1
ggtagcagtggcataccaagaatgatgtttaacacaaagcactcatatacctaatattgtggagccacgatctcaactcatttggagtgagatcgaagcaaaagaggtaaccacttgtggcacctactaactattggttacactagtggattcataaacctgagtttaaatgt

SEQ ID NO: 49828 - DNA, 321 bp, Glycine max
  unsure (1)..(321): unsure at all n locations
  Clone ID: PAT_MRT3847_16002C.1
gattgggaaagatatgtcaattcattcttggggggaggaactcctacattaaaattattaaaaagctaacactgaataaaagactcggctttggacatcgaaaataatatacattactaaaagaaactatctaaaatctaaatattattgagtaaacagatttaatctaaacaattaaacaggtgtatactctaaaagaatgcattttgaggcggtngtttataccaaaccaggctgaaggccgagattaattttcaccgagcgatgttgtcttctagttggtcagaacaaccattttgggaatgcgtgaaaccaagggct

SEQ ID NO: 49829 - DNA, 2587 bp, Glycine max
  Clone ID: PAT_MRT3847_16003C.1
ataaactaattaagtttatataaattcatttagttttatttggacagaaatatattagctgagtttgtgggatgcattggtcacaagcccgaagtcgacttttgggtatgttgctcatactcttggaggtttgaagccatgggattcagtaagtaaagttggggatctgatctggcttgctttgatctttgatgaatcaatccctcttacttatttcttagtattagcgatgctcgtgtgtgtttctgtagttaattgatatcacgtcacgatgaataaagtagggtggagtttcaagagcttcaaaaccttattggttgtggcttctataaccttccctattttactcacacttactctcgtccaccaaaacaacaactctgtttctgatctcttccaaggatttcacgtattgtctggaagaaccctcaatactaatgctactgctattctctcgaaagatcatgatattattagagagtcaactctaggtccaaagaaccattcatttgaagatgggaagaatgctctgtccctatctactactaccattgctaatgacaaactccttgatggacttctaatttcctcatttgatgacgcatcatacattggtagatatcaatcttacttgtaccgcaaagcttcctctcataaaccttctaaatatctgatattcaagctacgaaactatgaacatcttcatcaaagttgtggaccttctaccaaatcctacaacaaagtcatgcgaaagggcacaaaatttagcaaaaatgatgctagtactaagtgcaaatatcttgtctggacagcttccaatggcttagggaacaggatagtaaccttggttgcagcatttctttatgctatccttacagaccgtgttctacttgtcaaatttgggactgatatgcacggcctcttttgtgagccgtttcctggtacctcatggttattgcccaggaactttccttattggaaagatcagaaacatattgaaacatatgaaagcatgttaaagaataacaaggtaaacacgtcacatgaacttttgccagcatttattattcttaatctacagcacacccatgatggtcacaataatttttttcattgtgatcaaagtcaagatcttctccagagaattcccgtgctgattttatggtcagatcaatattttgtcccttctctttttatgattccatcatttagacaagatctaagtaaaatgttccctgagaaagacactgtttttcaccatctgggacgttaccttcttcacccatcaaatgaggcatgggaaataattagaaaattctatgaggcacacctagctaaggcaaatgagaggattggcctgcaggttagagtatttaatactcatcgagcaccacatcaaaccattatcaatgaaattatagcctgcacccttcagcataaattgctgcctgatttcgacatgcaaaagtcagcaacttctcctttgaagaagccctcaaaagctgttctagtagcatctttattctcagaatatggtcagaagctgaggactatgtatcaggcaaatacaactgtgaccagggaagtaataagagtttatcagccaagtcatgaagagcgtcaaaagtcaaataatgacatgcacaacattaaggcatggacagaaatatatttgctgagtttgtgtgatgcattggttacaagcccgaagtctacttttgggtatgttgctcatagtcttggaggtttgaagccatggattttgcagagggcgtatggggaaaccatcccagatccaccttgtcgtcgagctaagtccatggagccttgtttccattatcctcccaagtatgactgtagggccaatagcacagttgattttacttccatttttcatcatatgaagcattgtgaagatgtatctagtggtttgaggctggttaatgttaagcactaggccttagacgaatttccagttataccaaatggagtgcaactgcttaggatattgttctccaccattaagtcttgtactatgtaatggttgtttgcgatttaaacctgttttaccacattgaaggtggtttgtgttcatgtggactacacacaaatgcttgtaagctttaagaatgaatggcatttgaggtgaaatcctaaatatatcatcaatgacaacatcgaggctattttttatggatgtattttttacagcagggacctatgatggtgttggttctccattctgagaaaggtcgtagatataattcaacttgagaaggatggtctgtccacagaaacctgcacaagatatatgcattattattcaatatcgttatggcaaacttctttagttggttccaggaattctgaaggtctctgccaattttgctgctgaactacctcaaaggcatgtaatgattagtttagctaaaatgtttctagccaaacaactccttttcccccttgttttaactgttatttattcattatcttacattatttaattgtgaattagaacttttgtagtatttaaacaagcaattgaagttgttataagcataaataatttatgcccacattgacaagt

SEQ ID NO: 49830 - DNA, 446 bp, Glycine max
  Clone ID: PAT_MRT3847_16004C.1
ctctaaagaattctttagttacacgtttgtccttcccttggttttaacccaaacggcattaaacttgcgtcaccggcgacttcggctccgctgacgatttaattttcagcaccggtttcgccctgtggttccactatcatgaagaggttgtaactgtcgacgaggttcacggtcgaagaaattcagtctgctggcgtcagcgtaaactctgccagggtggtcggcggtaccgcattaccacagttgcattctacggcaggggagccgcagttgacttgccaatggcacgggtttaaagcggtttgggttaaaactaatggaaggacaaacgtgtcagtaaaaaaatctttaggaaccattttagaacttttaaaacacaagggaccaatttagaaccgaaaaacaaattagggaactaaacatatgttttaagccttttttatgat

SEQ ID NO: 49831 - DNA, 573 bp, Glycine max
  Clone ID: PAT_MRT3847_16005C.1
gatgatatatttaggatttcacctcaaatgccattcattcttaaagcttacaagcatttgtgtgtagtccacatgaacacaaaccaccttcaatgtggtaaaacaggtttaaatcgcaaacaaccattacatagtacaagacttaatgggggagaacaatatcctaagcagttgcactccatttggtataactggaaattcgtctaaggcctacaatgtatctcttgccaataataaaatctttagcctctaacccagagatttagaaataggaggatccctgtgctgagtgactggaaatagtgaaaagtgacaaggaaatcgcaaaaccaaatgctctgtctctctagtctagacaatatcaaacgctagtgcttaacattaaccagcctcaaaccactagatacatcttcacaatgcttcatatgatgaaaaatggaataaaatcaactgtgctatttgccctacagtcatactttggaggatattggaaacaaggctccatggactttagctcgacgacaaggtggatctgggataggtttcccatacgccctctgcaaaatccatggg

SEQ ID NO: 49832 - DNA, 286 bp, Glycine max
  unsure (1)..(286): unsure at all n locations
  Clone ID: PAT_MRT3847_16006C.1
gaaataaaaaacattttcttaagcgaaacagggttaattgtgataatttacaggtagaacatgcaattttattatagaaccagataaaatggccaatgttcaactttgttatgttttggtctagtcttttagaagttacaaactgatgcaaaagggatgagtgatatgattgctttgttcattaattattggcttaattgataggagtaattgatgctcanagggtttgggttatatacaaaantacaagccataccatttgatcattaacttacccatactacta

SEQ ID NO: 49833 - DNA, 716 bp, Glycine max
  Clone ID: PAT_MRT3847_16007C.1
gctgcatggctagatcttctatacatcctataccttcattgccctgtatgtattaaactttagtattagagaggattagtggtcatgtctgatatgtatatggagacatgtattttttttccttagtttttatttatttatttatttatttatttattttaagagagttctttttttaatgagagacatgctttatatccaaattatataagcatgaaactttcatgagcaagccaatggtgatggacttgaatagtttgcaagaggcatatagttcaaaccgttactatggaacaaaaaaaaaattgaataaactttcatttcagtttttgaaattatgagccatatactgtatggcctttttaattacattgttgatgctaatactaacactaatatattacatattcaagggtatatatatagctatttcttcaactttgatatcatctaaaactctctttcaagaagtacacttggtctgggaagatttacattcatcatatataatgctaatattccaagacttactataaccaatcccaatattgatatatctacacgtgacttgattatattaagtttcaagaatagttaatttgtccgttatgtgttgttagaaattcaagtgtggattttaagtttcacattaaatagttgggaatgagcttattgcaggtgattttgggaaatagattatccctttaatgtggagc

SEQ ID NO: 49834 - DNA, 462 bp, Glycine max
  unsure (1)..(462): unsure at all n locations
  Clone ID: PAT_MRT3847_16008C.1
ntgccaatcagttctactgaacacctccgcaaaatttttccggggctacacgcgcatctctacgcggggcgcgccctttttttttttttttttttactttttcaaaacaattttttggtgttatttcttggggtggcggggggttaataacccatcaataaaaatgggcctctacacttacttaagggtacatatgcttaaagaccattccagttttcactattgaaaaaagaaggatcacgttaaaagagtgttatcatagcaacacttgatgggagttatatgataccaaggattgggtgctcatttctttttgggcctaaaatatttactgtgtttaaagcacaatcactattgtttatgatttggttgccgcttgccattcagtttggatctccgaacgtgaactttctctccaagtgctaaagatgcttaacacttgaaaatgaatctataaaggct

SEQ ID NO: 49835 - DNA, 367 bp, Glycine max
  Clone ID: PAT_MRT3847_16009C.1
aacaaaatataaacatttccctgggacaaaccttatgttcgggaaattaattaccttggaataagccaggttagtggtaaatttttatatacagcattttttacgggaattgcacaatgaaacggggacgcaatgagcattcggaatgatagaatcggtgaactggctaaaaagggtcaggcaaacctatgggagccactctggggggaaccttttccgttgcggaatgcacaatcaacccccccgcagcactgcctacaagacttttgaagccaaaatgcctgctattggagatcatattgcccgacacttcctgatacactaaatctaacggagggtccggtcccccacacaaaggattatccaa

SEQ ID NO: 49836 - DNA, 668 bp, Glycine max
  Clone ID: PAT_MRT3847_1600C.1
ttaaacgagtccgtttttttttttttttttaccacacaacagaaatttgattgaacaagtattagaagtataatgaacaatggatattaaacgaaaataatttcaatttataaaaccaacagtagtaagacagactatcaaaattgaactttttttttccacttctaaggaattaatttattagttccttgcatttgggtggatggccgagatggcaagagtgatgaaatctgctattttttcagccatttttcctatgttttagaaaacaaagatcatagcatttcagtagaaaggccgagatggtataaccaatgactttctgctgctatttttcaagcccttcagcttgagaggagtccacactaagggtttgcgtctttgatgcctagggctgccggcaaacttactgctgctcctcatcaaatcggacaggctgcctcaactgaggttctagcttctggaattggggaaaccgtctctgcttactttctagccccttgcaatatggcaaacaaccttgaatactgagcttccctttggttccttttcggtgattgctgagtggggaaacggagtggaggtttgagaggacacagagcagctacagaaacacgcctccttctaggctgacgggcttgtgatgtagatggcgggggcggggggga

SEQ ID NO: 49837 - DNA, 363 bp, Glycine max
  Clone ID: PAT_MRT3847_16010C.1
tcccacacatacattgccagcactctgttttattataaactgctccaacatgatattgagttgggatattacgcttaatatgacgactaactttctcggtatatcattcaaccagctggacaaactagaactctcaatgcttgatgaaactttaagtatattccaaatgatgaccatggtggagaggaggatgaacttgattactacttcaattatcatatgtcaacttatcctgactcttacaccatgaataagaaacatgattaacaagacttatcctacgatgacaatgatgcagcaatgactcagactcccttgaatcattatttacttcagatatatatattaatgaaccatactcat

SEQ ID NO: 49838 - DNA, 420 bp, Glycine max
  unsure (1)..(420): unsure at all n locations
  Clone ID: PAT_MRT3847_16011C.1
ctctggcgtgcgacgacgcgtgcggggacgcgtccgaccacgcgtgcttgcactcgttcgtacggctgcgatatgacgacagaaggcaatagctgtgagagaaaggagaggttaactaagatgcaatacttcagatgggcagcccttgttgtgacactaaccacaacttnctgttgctcaagatgctgaggctctgcagcatggtctcaaaggatggggggctgatgacaatgtcatagtaggaattctgggtcacagaaatgttcatcagagtgcctgaaataaaaaagcttattgggtggtgtacccagaagatctgagaaaactgcttgcaatcgcaaactctggtgactttgaaagagctatgtgccggcggatgttgcagactggagatcatgatgctcatatggagaatgtggc

SEQ ID NO: 49839 - DNA, 499 bp, Glycine max
  Clone ID: PAT_MRT3847_16012C.1
gcgcccacgcgtccgcccacgcgtccgcggaatcttgacaaagggttaaatgaatcggatgctgtgcagtatccaaaggtatactttatgcatgatgaaggtccgatacatcctgggttggggataactcgtgtgagaacggagtatactttcgttgagatattttacttgccaacacaagcagataacctgggaacggcagcggatctaaatattactaaatacaacgcgaagggctagccttataactccgatgataatgcttacgggcctggagacttctgaaagcaacgtgggatacggtcataacatccagcgtaggtggaaatattctatttctaatacactcagctccgtacctcatcatgctacctgcatgaacaaaactgagctagtgacattttcacagaacaacaacttgaggacagttaaatctaccaacaaggtggatgcccatacctatcgctacggcattaatattttgttgtttgcagggaca

SEQ ID NO: 49840 - DNA, 346 bp, Glycine max
  Clone ID: PAT_MRT3847_16013C.1
tgaatccacttcacagctcagtgccattgaataagttctggctatcacctttcggctcaagtggagctaaattaattgagttgaatatgtacgaagtaatggcctgctactgaattgaacgacaaaggggaatgaatcaagcacagttgctgttatggaatccaattcaaaatcattaagccataatgatttggtttcaaaatcctctcctgaaatttgattttgtactgtttatactcttttctttgtttagaaccaatatattggcatgagttatactatttatgtaatatttctttacaacatatccaatattccttttattgatcaaacagaatgaattccc

SEQ ID NO: 49841 - DNA, 2254 bp, Glycine max
  Clone ID: PAT_MRT3847_16014C.1
tggggggttttaaaaaggggggcccctttaaaaggggcgcccccttttttttttttttttttttttttttttttttttttttttttttttttttttttttttttttttttttttttttttttttttttttttttttttttttttttttttttttcctaacttattctattacaattgtaaaaaaaagaagaaataaaagacgaaataaagaagaggagattaattacatattaattacatatatttaatacttaattggatctataatcttcttcacccctttccgtgtcaataactagaatgaaaaaaaagggaatatcaatgcatctggaaaaaaacgattgatctctatcaagagacccgccaaagccccgaaccatagagtacttactactggtgccacggaaagatatgtttttagatctcgcatttcaaatcctcctttttaagtcttttttctatctaaaatttatttgaatttaatattctttagaataatcaaaaagaatattaaattcaaataaattttagatagaaaaaagacttaaaaaggaggatttgaaatgcgagatctaaaaacatatctttccgtggcaccagtagtaagtactctatggttcggggctttggcgggtctcttgatagagatcaatcgttttttttccagatgcattgatattccctttttttttcattctagttattgacacggaaaggggtgaagaagattatagatccaattaagtattaaatatatgtaattaatatgtaattaatctcctcttctttatttcgtcttttatttcttcttttttttacaattgtaatagaataagttaggaaagagaaagaataagggttaatttggcctaattgaaattcggagtgaaactcgggatctcgtccaggcttccatggaattgaattaataattcaattccatttctattaataaaagagtgaaagcagaaatttaaatggaatgtatagggtgggggcaacaatatcataaaaaatacttagttaaaaaaaacgaaaatactgtattgcaattgtattgcaattcgaaacgaaatatagttcgagatcattgtattatttttgtactatattaatcttaatcttaattggaacgaaatctttcaaaattggatttctaattcttaatttatattttcgttttttcgttcttttctttttcttagattataatccgaaaacaaaagagttaagtgaattaaaaacccaagggaggttcatggccaaaggtaaagatatccgagtaattgttattttggaatgtaccggttgtgataaaaagagtgttaataaggaatcaacgggtatttctagatatataactaaaaagaatcgacagaatacgcctagtcgattggaattgagaaaattttgtccccgttgttgcaaacatacaattcacgcagaaataaagaaatagatcaaattgatcgcttgtgtgttacccttcgaaccaaagaacttaacatgtaaaatgatctatttttcttatctatatagatagatctatctgtattctatcatttacagttgaatatatacaaatatcagtatataacaacatatattaaaaaaataacaacatatattaaaaaagtcagaataaaaaaacaaatcctttatagtatttcttgtaataaatgtgatttttggaatagggataaataaaccatggaaaaatctaagcgactctttatgaaatccaagcgatcttttcgtaggcgtttgcccccgatccaatcgggggaccgaattgattataaaaacatgggtttaattagtcgatttattagtgaacaaggaaaaatattatccagacgcgtaaatagattgaccttaaaacaacaacgattaataacaattgctataaaacaagctcgtattttatctttgttaccttttcttaataatgaaaaacaatttgaaaaaagcgagtcaaccgctagaactactactttaagaaaaaaaaaatatagaaattaagaattctaaatccaattttgaattgagatttgaatgaaatattgattgatgttttgtttgaaaattacgacaattcaatttgggtttttatgttgtaagaaaaaaagataataggtaacaaagaatcatttttttttattcagcgtggttgtttattttgatagctttatcatatgataaaaattcatatgataaagctatcaaaataaacaaatttatattctctcgagcc

SEQ ID NO: 49842 - DNA, 413 bp, Glycine max
  Clone ID: PAT_MRT3847_16015C.1
ctcgagccgctcgagccgatttctttactatttgattctgcagattgcccacttactgcgtgcccacattgtctgacttataagccctttgcccctaacccagctggaaattgacaaactaagtcagaagcgtccttagctggcccttttgaacttgctcctgggaggaagtttggctacttactacgatattgattctcaataccaatggttggattccagagtgaccatatgcctgggaacaagtgcaatggtaattctaatagttttccggttccggatcgtcatgaacgacttatgagaggaagagagctaagaaaaagcagcagggcatctcctgatagcaatagtattagtaatgtgggtagtgaaatttttgagcatgacctgcgcttaagagaagatataactct

SEQ ID NO: 49843 - DNA, 192 bp, Glycine max
  unsure (1)..(192): unsure at all n locations
  Clone ID: PAT_MRT3847_16016C.1
cgcgaaattatntcaacgtagagactatactgnngnattttctatactttagggactacttgtgtattttcattacttnaaagactctataggagagagggtaatacttnggggactanattgatggtttactctttttatgcgttatataatttgcaaacaaactaggtcatggnngancaagtgatganc

SEQ ID NO: 49844 - DNA, 321 bp, Glycine max
  unsure (1)..(321): unsure at all n locations
  Clone ID: PAT_MRT3847_16017C.1
attttagtngggcctgtgtacagagccatgatttangatgtacgcccacgtaagtcttagaatttggctggagtgaaagctggaactagaagtttgaacgtgaaggacaagttacacgtgtacgggggagggggcaagatgaacgtgaaaacggagggcgggaacacgaggaacgggagggtgctgaaaggagtggagctttaggggtttgaagttgaacggaatgaaagggggaaattgtgtctgcggttactggtgtgaatgagaagccttacgcggaaatgatgggttgcttagaggagaaaaaacgcgtcgttaggg

SEQ ID NO: 49845 - DNA, 1269 bp, Glycine max
  Clone ID: PAT_MRT3847_16018C.1
tacggctgcggaagacgacagaaggggatatacatatacatcaaaacacgcagaagaagaagaacaacaacaaagggcttctgaattatcgtgttttgatcagaatctgaggagaaaatcacataatttcgaatttgagttttcgtgtataaaaaggaagagaagaaaatggaatcggaggatttggtcaaacaggaattggaggaattgcagaaacaattggggaagaagcaaaagtttgaagcttctgtttcgtctcttaaaacccttctccaacgcacttacccatcagcttccccggcgcttcgtaaatccttttattcagttctatgccgagttgctactgtgttgaagaccaggtatacagcaccaggtttctggaatgctggactgggcctttttgagcaggctcatttgcttgtttctgatccttctgagaaggagcacttgaaggcttgcattgctcaggccagggaacatttgcatctagaagacaacccatcacaaactttacgacctgcagataatcaggcaaacagagggtatctttttgagggccaccttacggttgatcctgaaccacctcagccgcaatggttggtgcagtcaaacctcttgacaacagctgctacactctttgctgctgaatcctctcaagcttcagaagcaaatgaaaccactcaagatgatgccacaaatatgcttgaagatcttctaaatagattggaagaagttgtgcccttgatggtggatgtaggtcctgtagccccaaaagcccctcctgccagtaaagaggttgtggcaaatcttccggtcattactctcacagaggaaatcctggctaatttggggaaagatgcagagtgtgctatttgcagggagaacttggttttaaatgacaaaatgcaagagttgccatgcaagcacacattccacccaccatgtctaaagccatggctggatgagcacaattcttgtcccatctgtcggcatgagctgcaaactgatgatcatgcctatgagagctggaaggagcgtgaaaaggaagctgaagaagagaggaaaggtgctgaaaatgcaattcgaggtggtgaatacatgtatgtttaaatgaccattcaatgtatggtttaataatatggttgttcgtgtaacaatggatttgaaatcttcatctggtgaatagttgtgtattctttattgtttcatgttatggagatatctcaaatttttagggatgctcaagggaaaaaaaaaaaaaaaaaccac

SEQ ID NO: 49846 - DNA, 811 bp, Glycine max
  unsure (1)..(811): unsure at all n locations
  Clone ID: PAT_MRT3847_16019C.1
acgaattcgcgctcgttacccggggatcctctagagtcgacctgcagctgctgcacttcttccggtatcgttcaacaatgggagcagcagagttattatcttctcttaagcgcaggtcatgctcaaaaatttcactacccacattactaatactattactatcaggagatgccctgctgctttttcttagctctcttcctctcataagtcgttcatgacgatccggaaccggaaaactattagaattaccattgcacttgttcccaggcatatggtcactctggaatccaaccattggtattgagaatcaatatcgtagtaagtagccaaacttcctcccctgcaaatatcaaaatcacaaatcatccccaattcaacctctaataaaagtataacatcagtgaaagacagcaaaacaagtgtgtcattgccagaaagaaagttttctaattactgaaaattaaaatgaaatatagacaacaaaggagaaaacagaatccacgaaattacagaaggcaacaagaaggggtcaacagggtgggcagttgagttggaaatcattttcacattcattagtttatatatgcaaatgggaattaccagcgtgtctgaaattgttacattaatggaaattgaatacaaaacaagcagagcanaggtagtatatagaaaaactcgagaagtaggggctgtccatctgatgcgaagacttaatagaatagtgaaaattacaggagcaagttcaaagggccagctaaggacgcttctgacttagtttgtcaatttccagctgggttaggggccaaagggc

SEQ ID NO: 49847 - DNA, 173 bp, Glycine max
  Clone ID: PAT_MRT3847_1601C.1
tggggatttttttctccaacacaatactaaacactcggtttgttgcctctctaatcaatacttcctaaaacaccctccaacctccacctctgattccatgtttaattcccaaaaaaatacattcaatgatcctatatctgcacaacatctctcttatacaaaaaaaatttacc

SEQ ID NO: 49848 - DNA, 223 bp, Glycine max
  Clone ID: PAT_MRT3847_16020C.1
aacacttgtaagaacagcagaaatatgactttctatgggatcaactctatctgggacttagcgctaattattatgagacctgtgtattttccactatataaatcataacctaaaaaaaaaacacctccacttttacacaatccaaactcacattcactcactatcgaattgataattataaattattataacccaaaaccaatgcactgtccttgtttattca

SEQ ID NO: 49849 - DNA, 328 bp, Glycine max
  unsure (1)..(328): unsure at all n locations
  Clone ID: PAT_MRT3847_16021C.1
ttttaatantttttttttttgggccggggaatgcaaaagattttttacacacattcagccattgggtacagcaagaacatggccactttggaatgggtgtgacagaggcttgttgccccacctttgctttcaagaagaagataggagagaatcagttatcagaaatggacataatgcacgctgaacctgaactccgtttgaggctattgtctaccagcaaacacaaaagaaatccaatcagaagctgccatttgaatattggccctcattatcatgaggcttgcgagagaggaacaactgcaacaaatccacttttaagggccctgta

SEQ ID NO: 49850 - DNA, 335 bp, Glycine max
  Clone ID: PAT_MRT3847_16022C.1
tagctcgggttcgggtcgaggtaggccatagtgatgcaggtgtaggtgtcttacaatggccactgccggtgtgtctatttgaacacagatgcgctactttcggtacccatagagccatttcccacatcccagatcctatatgttctcatccgttcaatctcaatcactcttcttatagactctgacaagctcgctgtgtcgcctggctcacctgtttgaccccttcccaaggcctgtgaatccgcggtagccagaaccgtacccggatcggccgagcccgaaccggcccacatttatcatgaccagcctggctacggggtacccggactgttaac

SEQ ID NO: 49851 - DNA, 487 bp, Glycine max
  Clone ID: PAT_MRT3847_16023C.1
aaaaaaaagcaatagcttcaattaattccagggtggaaccactttgcaggggaaaacttttaaaaaccaatcaccgccctacagggaagactagcaatcagtttgtttaaccagcggctcctatggaaaccccaaacttagtttttagggttccccaaagggtttaaccggcttggacaaaaaaaattgcactttttttctagttgggttttctcaaaatattccccataccagagggccgatcccacccaattgaactttgttttccaattttagctggggcaggaaccaacttttttaaaagcagacaccttttttttaagaacaatttttttttctttggcaggcacagatgcagttccattttaagccccctctactgttttcttgctaacaaggcggtagatttgagccaaaacttaaacaaaggcattctctacattagtaccctccaaagctggggtttccatgaagtaaaggggttttt

SEQ ID NO: 49852 - DNA, 531 bp, Glycine max
  unsure (1)..(531): unsure at all n locations
  Clone ID: PAT_MRT3847_16024C.1
ggcaagttggttaatattttctgattaatttggttacggtaattttagtgatgttttttttattggattaattgtcacggattttaatttgtaggtggtggatttgcaaccggcatcatagaccttggtggtgggttgctagtgtcacaaatttcaacattcaacaaggtttggactacctatgaaggtggaccaaataatctaggggccactttttttgaaccaacaggtctatctgaagggttctttatgctgggatgttactgccaacccaacaacaagcctcttcatggttgtgttcttgtggggaaagataactcttcaacctctaatggagctttagccgaaccagttgattacaaattggtatggaacaccaagtctcaaaaaataaagcaagacggacatggctacatttggttaccaatatccnctgatggctataatcctgttggccatgttgtcaccacctcaccagagaagccttcccttgacaaaatcaagtgtgttagatcagacctaactgatgaa

SEQ ID NO: 49853 - DNA, 417 bp, Glycine max
  unsure (1)..(417): unsure at all n locations
  Clone ID: PAT_MRT3847_16025C.1
gatcatnagtatcttcatatatacggcttattgtacgaccgaggatacatatgctggactaatcacgataaagatgctgctgggccagaagaggctctgatggatgcgattagaattagaggcattcctgctagtgtggttgctaagcgagctcatgaatatgacttacctgctgctcatgatagcctcactagatcaaattcctgctgtggacaagatggattacactaaagtgactaaggcagcaaaatgcatgaaccctatactaactgtactaggtgatcttaaacttcttactgatggcaagtggtctgagactaagcttattgctgtctctaatatcatggcaggtgaaattcatgtaggtcacatacccctaatggcacaagaggaaactctgtctcctagagcatgtga

SEQ ID NO: 49854 - DNA, 356 bp, Glycine max
  Clone ID: PAT_MRT3847_16026C.1
catacaggaggatcccaccgcggcgggggttaaaattccgggtgctctcatttgggattacaatcaatatacaaactttacacactttgcacattccctattactagctttcatgcttggcaattaacatgggaggctgaataaagaaaaaaggaccactttattggtgagcaattagaagccaccacgtgattaaactgtcttgtcaaaaaaaacaggcttgctcggaccagacatcctctactgcttttttgattgggtaaacacatacattgtgttaggtgaatttgcatcttggaaccaattttaaccccaacattaggctattcaatcaatctttaaaaaatttttccctt

SEQ ID NO: 49855 - DNA, 519 bp, Glycine max
  Clone ID: PAT_MRT3847_16027C.1
ggctcgaggcagagcataaacgttgtggggagaatgcttaaagaggagagatcgaaatgatgagctccatgggtgagagccagcgacggagcttgtatgggagtacactggcatggtctatgccatagtccacgtctggttcagactcttaaacaggccttaccagacgcacgtcttgaacgcctctgaagagccaattagagagcccgccttcctgccatggtcaacacccagatccatggacctctgattcatgggggactatgcaaggacatggtcggactggagctggacctggctcctctgcaggaatctcatcttcccttcatatctcgaaatgaacgatcaggaaaccactctccttggctatcataacaggggcacttgcagacatgtgggctataagctgccctctgagatcagcaagcatattgatgcttgtgctcgcaccactcttacgcttacctagcaccacaagttcactgcttaaagatgatataattcacaatgctaatgcct

SEQ ID NO: 49856 - DNA, 581 bp, Glycine max
  Clone ID: PAT_MRT3847_16028C.1
aaggatctcaagcccaactatgtccggattgagcttgaggaaattgttcaagtggcactcttgtgcacacaatatcttccgggccacaggcccaaaatgcccgaagttgtacgcatgcttaaaggtaatgggctggcaaagaaatggcaaccctcccaaagatgctgacccttctaactgcaaaccccaagaactcttttcatcagataggtattctgccccccctgatgattcttcattgttagtccaagccatggaactctcaggccctaggtgaatttttcatagtcttgtttagttcttttacttttaatttatttttctttcatatgatcggttttctagtttactaaagaaagtatatgaaattgaagaacatatgataattgagtccatttgtatgttgtatggtaaaaaaaagccttcaaagttggaaaggcttttggttgttttacttatttctaatggacatatactttgttgaagatgagtttgtagtgaaattttttgtaaagttaagagaaaatgaaaatctttactagtttttcagtgaaattagtgattaaatgatcttacttgcc

SEQ ID NO: 49857 - DNA, 384 bp, Glycine max
  unsure (1)..(384): unsure at all n locations
  Clone ID: PAT_MRT3847_16029C.1
cactattcagcccttcatccttttataaaaatttttatgatttttttttttttgggagggggtattacgggggggnaacgctaaaaaatttttatatcatatataaatgtttgaaaaggaaaatttataacatttaaaaaacctctaacaagcaaaaaaaaacggtcaactaaaaaaacaattaaaaccccttccatataaaggccattctaacaaaaaaagttttccccttgaactggcaatactggaaaaattttcaaaaacatatttaatgcaaaatccccctacaaatattaaattccgatcctaatttaaaccaaatatacagaaactgtgtaataatccaaaacccctttataaagatctggccattttaaattttcc

SEQ ID NO: 49858 - DNA, 101 bp, Glycine max
  Clone ID: PAT_MRT3847_1602C.1
tctcatcttcttcaatccctagagctggccatccattgattccatggggaaacaaactttcgtcaattgcagggcatacaaaagacccctctgaaagcatc

SEQ ID NO: 49859 - DNA, 396 bp, Glycine max
  Clone ID: PAT_MRT3847_16030C.1
aagaaatgttagtagatggagaagcagggcttgaaaatgaaaagcaggtagcaagtggtcaaaagcgtgctctggaatcgtgaaacagtgactttcatttcagagcgcgttggagaggaggacagttgaacaattaaatctctcagccaaccacagctgagcctcatttattcccttcaccttcaaatatgctactctttcagtatatatagatagatagatataaatacccttactccttcactgcaccaatactcggtctcttgttctttctccagctgatcatcttacaatggaagttcattctaatggcgttgtggttgtgtttgccttgtgcattgcacttgccagttgtggctcgttggtagtgggggaggttaaggatgacagcatttg

SEQ ID NO: 49860 - DNA, 813 bp, Glycine max
  unsure (1)..(813): unsure at all n locations
  Clone ID: PAT_MRT3847_16031C.1
aagagttcatcaaacggtttctagctgctataccactttggcaactagagaaggagnagaagaaatggagtgtttccagtccctatcttcaccggcaattgcagattgatttccattatagctcttcatcatcatcatctgcttcagctgattctttgtggtcttaacaagtgatcctttagaagtccaactacggagccaagttaggcaggcacattcatcagggccttgtgaattgtcacccaatgaacatgtgcagaaagaatctttgaagtttgaacatgtgtaggatcaatgctttaaaacttgggggtatcgaattatgtgtcctgtcgcaatcttaggtagatatgctggaacagagaaaaattgcctctccgcatcaaattggtgccaggaatgttttctgctggttgaccttgagcaattgttacaaccagaaaatgctaattcacaagaaattcagttttttgcggctgtgcccgttatttggtgacaacttctgaccatgtgattgatttttgttactgaaattgatgatcaagaacattatatgagcatcattagttcatacaataggtattctttcgggattgatccttatttggtaaagtagatttggacgaaaaacgaaaggagtgtttgtatagatgctatgtacttgttcttgtccaaaatatttcctttttcttcgatcaaattttaaaggtaaaaaaattaacaccattttatcccacttatactttcattattttttcccttgtatcttccatcctcttcgtttctcattctatcatgtgctacattaattaa

SEQ ID NO: 49861 - DNA, 387 bp, Glycine max
  Clone ID: PAT_MRT3847_16032C.1
cggcgccgtcactgagctatacctgagctgtcgccctcgcatgcgcgcctgcattagcttggagctcgggtcgaggaaaaagtgacctagatcttgtgttgatcgctgatctatatcatcgtggcgttttcgtctgcgcctgtgaattgctgggacggaaacaaatggaaaacgattgtcatattgcgacctggatcgaggctatctttccttgtacggcaccatctacacgcgctatcaataatgtccccctccatgcctgataagaatggaaagacagtggatagtgtgattggatatggctctgtggaggatgacacctattgaatctcatggttctgtaaccacagagggactgagttcttacatgaggggggggacgaatac

SEQ ID NO: 49862 - DNA, 178 bp, Glycine max
  Clone ID: PAT_MRT3847_16033C.1
cgatgaaaggcccggcccattaaatccaatggttggtccagttccagtttaccactgtatgcccaattgtaacagtggggtttatggccgtttcaaagaaggccccacccaaaaaaatgttaacgccgactatgaaaccaatggcgatgggaacaataattcccaaattacccttttt

SEQ ID NO: 49863 - DNA, 320 bp, Glycine max
  Clone ID: PAT_MRT3847_16034C.1
agtgtatgcacagaagccggtatgtatgctatccgggcccggaggaggactgtaacagagaaagactttcttgatgcagtaaataaagtcatcaaaggataccagaagttcagtgcaactccaagtatatggtctataactgagttattctttatgccctttcccagaccatagagaacgtcatctctatttcccctgaaattgaaggcacgtgagtcttttattaactcctgatgaatgcatcttgcagcaacctttcctgatgtacatccaaaatgcgagcaaaacttcttttacccttgacgatatacttatattat

SEQ ID NO: 49864 - DNA, 415 bp, Glycine max
  Clone ID: PAT_MRT3847_16035C.1
gggggcaaatagcccccatggccctgtttaaaattctcgcaaatgttaattcactttgtttccaaactaatcaatccaattccagaagacacccccaattaacaagcccttccttatttacaaattacaatgcaaataccggaaagggagaattttattgtaaaaaaaaaatttgaatgggccgataaaaaaaaaccttggcaactcaatgcaacaaaacgttcaatgaaacccccaataaaaaaaccgggggagaaaaaggaaaaaagtttttttaaaaaacactcaatactttttaaaatcctattttcttatatcccggatgaaagcaagctttgtttctgtacaggtgcaacccaccttggtaacccgggtcacataaggcacaacgtaacttcctcctgggcgcagaacc

SEQ ID NO: 49865 - DNA, 301 bp, Glycine max
  Clone ID: PAT_MRT3847_16036C.1
agcggagcttccattgcatgctcgatatcaaccccttaatgaaagtgggtactcgacggttgaatttggtgcaccggatatgttagtgcgctgcggccaaaaggaaaggtggaaaaccactattgcttcttcaaattggaaaaggatgacgccaatctgtatggtcctcatactgtttggagaataccttctggaataaaggcacatgctgatcttgtttctgcagctacatttattgcagctttgttatcaactcttgcaattgttgttgcatcattatattattccaatagctgactga

SEQ ID NO: 49866 - DNA, 479 bp, Glycine max
  unsure (1)..(479): unsure at all n locations
  Clone ID: PAT_MRT3847_16037C.1
gacttcttacttcatgcagtatttgttttcttatctcatnacttatgtttattgtaaggttaatggggacgagaaggccggccaattggtgcttacgaactagcaaaagcagttgaagagcttggcgtgtgtgaaatactacttaattgcattgattgccatggtaaatataattctgtatcttttaactatatttcactatattttctcttcattaagagcagtttggttttttctttgaacagaacgtcaaatgacattgtgcaattcatgtaattgacctacacctagtggaataaggcttttgtcgtttgcttgtaagagtagtttttttaaaattaattttaaaaattgtttattattttcaaaattttgactgttgtctagaccattttcatcatcaatgaattttataaaatagaatgacttttttatttgtaatatatggacatccccttctgtcgtcttctcgcagccgt

SEQ ID NO: 49867 - DNA, 652 bp, Glycine max
  unsure (1)..(652): unsure at all n locations
  Clone ID: PAT_MRT3847_16038C.1
gtaatttggtccactcagtaaagacctactacgttcagtaactgatttgggtggaaatgggctgaactaattggcaacccctttcgaattccagctccatgttttctgcacagaaccttcaccacgttgtgttagcactttccctgcaaaactttcgtgttctttcagaagttgaatctcatgagaataaggaaggtcggtacctagttatgatctattggctccccaactgtttaaatagagacaactcccacagatcagaaactttattaaagtctataattttggaggggtaaaagaaacttgttggaaaccttgaggaagtgcacaccctctacaaaattcacacctcgtgcaagttcgaatgggttgaaacgtgaaatgcaagaatgacacaccttgagcagaacccaaaccttgtgcatttgacacttgcaaatggctacaccactcagctctcctcctcttcctcctcctactggtgcagcatcatagtcgtcatccaccttgaagtggacaagaaaagccatatggctaagattattggcgactagaccagttggggcaaagagaccgctgntccatgttgatcctgcgaccgagaaggctgacggtccccacagaaagaagntaaaacatatttgggggatcg

SEQ ID NO: 49868 - DNA, 472 bp, Glycine max
  Clone ID: PAT_MRT3847_16039C.1
gcggctttggcggtggtgttggaggtggggcagggaatggtggtggtctaggaggtggaggaggctttggcggtggtggtggaggtggtgttggagttggggttggagctggtgctggtcatggtgttggtgttggtggtggtggtggtgttggtggaggaggtggacgtaacattaatcatgcttgcatgaggttatggatcttcactttagcctattggcttgttcctaacctagagtactttttgtgtttatactgtcataaatatcgaatggtgaaactttagatcatatgatttaccaacaacattttatgatatacgataaaaccctctacttgattggtttttctacactttagtctatagtcttgatttgatcctagtataaatcttctgtttattaggttgcaaatatggaatggagaaactttgggacatctcatttaccaataacatgttatcatattgat

SEQ ID NO: 49869 - DNA, 422 bp, Glycine max
  Clone ID: PAT_MRT3847_1603C.1
tggcttggaacctttgggctgatttatgtgcttgtctccgagtagtagaactcctaggttaagttaggcaagtaagtataatataattttgaaacggtcctcgtcctcgcctttacggtccctctgtcgagtctcgccactaataataataagttcctacttgaagttcctcctaggttatcattttcatggtaattaaagaggatttctcctattataaaggtagcgctaaatcttaaggtctaaactaacgtactcccgaaggagaaggtagccgtaggatctatagtagtcctcgcgatagtactcacggcggccttggaggcggtctacgtcgtcggacacgagcctcttttcctttctaagaatccctcgtcaaatactcccgtcggcgggcccgcctcagcagttacacccggagt

SEQ ID NO: 49870 - DNA, 271 bp, Glycine max
  unsure (1)..(271): unsure at all n locations
  Clone ID: PAT_MRT3847_16040C.1
ctattnggacacaaacaagaaggaataggaatcggtctctaggaagagacaaaaaagcccccctagaggaccttttccatattttaattgattttggttcaaaatatctatctatatagaaatctattttatggttaggatcgaatcccattttattggtttttacaatcgaaatttctataatagaactctttattttagaaaaaagaaatctggaaaaaacagtggcgtaaccataatattcgaatttattggggggggggaaaacaaa

SEQ ID NO: 49871 - DNA, 138 bp, Glycine max
  unsure (1)..(138): unsure at all n locations
  Clone ID: PAT_MRT3847_16041C.1
aaacctaaccggnaggagtatgcaagatcttaaaaatcacaaaccggcagtcctaaaggttcaaacctaacttatccttgaatgcaagttcaaaccccttcaatatggtcaccaaatttcatttcattggccttcgtt

SEQ ID NO: 49872 - DNA, 1732 bp, Glycine max
  unsure (1)..(1732): unsure at all n locations
  Clone ID: PAT_MRT3847_16042C.1
ccacgcgtccgctgatcttttcattctgtctcttctcttgaattccgctctcttctctctttacttccctcaatagcaaaagctatggctcttctactagacaactgtgaaagcattttgctgtctttggacacacacaaatcagttcctgcacctttccttaccaaaacataccaacttgtagacgacccttccaccgaccacatagtctcttggggcgaagacgacaccaccttcgtcgtttggagaccccccgagttcgctagggaccttctccccaactatttcaaacacaacaacttctccagcttcgttcgccaactcaacacctatggttttagaaagattgtgcctgatagatgggagttcgcgaatgagttcttcaagaaaggagagaagaacttgttgtgcgagattcacagaagaaaaacccatcaccagcatcatcaacaagtacccatgaacaaccatcaccaccatcataagtttggactcaacgttaacgttcctactatctttcccttccacaataacagactcagtgtttccccttctcatgattcggacgaggtaataatacccaattggtgtgactcgcccccaagaggagcttgccggtgtaaacagcagcagccaactacaacacgcctaacagcaacattaacagctgcaagaccaaactttttggggtgtcgctgcagtccaagaaaagggtgcacccggattatggatctaatccagagaccaacaaggctcgcagaaccatgtcaagcccgtggctcctagcaacaacaacaatttcccttcttttctactctgcagtgataatagtaatatcaacaacaacacatcaccacaaacacaaacacaagcacaagcctctcctatgagtaaggtttcaacggtgcaaaggcaactgaagcagtttgtagggtgctattccaacaacacaaagcaagcgcgtgctgtgaactctcccactaacagttccataaccattgttgaggaagaggctagcagtaacagttgcaagaccaagctttttggggtgtctcttcaatccaagaaaagggtgcaccctgagtacgggtctaacaatgttcttcaaagctccgaaacgaataaggcgcgtttggctttggaaaatgatgaactattaggcttgaatcttatgcccccttcaacttgttaattagttagttaagttagtcctcccaaaattcataaccttagaaccttgctattttctaattttaattgcttcatatatgtataaatatatatatttttcttctttaatcccttaatttgagttttgaagaaggcaaatgctgttgatggaagcttgtgttcgtgcgtgatcctgtgtacatttaacttggtgccgaggttatatccttcgtttttccttaaaaaaagaaaaatccaaacattattgggagaagatccagtccaaaaaaagggagcacccggaatatggatctaatcagatgaccaaacaggctagtttggttttggaaaaggataacttaggcttgaatatcatgcctccatccccttgttagttcccctactgatgattaattctaagtatgatatgatatcccaagctagctatatagctgcttaaattaattttcttttaatacttgctttgatttgttttctattttaacttttaaatcaccacactcaagttttgagtcttggaggatgcctattaannnnttat

SEQ ID NO: 49873 - DNA, 392 bp, Glycine max
  Clone ID: PAT_MRT3847_16043C.1
ggaaaaccgggtattattttattacaaacatgcctaaaaagcccggtttcaaaaaaagcggggggaacaaagattggggggttcaacggacttcaaaattcacatttgccaaaaatttttaccagaaaaaagggggttgggaaatgagttaaggtttgaacacattaaactcccctttcccaaaacggtgcttttaaaactttggacttcacttggaccctaggaacaaggtggtctcaggggcttatccaaaacaagccctcaggggggtttccaacataaatcgggggtttgacaaccggtttaccacggggggacccgggggaaccaaaggggccttgggcagggaactaagggtgggcccaaccggggggaaaggggggaattttccc

SEQ ID NO: 49874 - DNA, 429 bp, Glycine max
  Clone ID: PAT_MRT3847_16044C.1
ggttgcagcagcaaacagcgaagagaagggctagcaaatcttcaatcacctcacatacggaacctttctacaacctgcatttgagtctctgcactgcaatgcaacaacaccaatcttatgaactggtgcctttgaacaaggcatatgcctatgtacatcttaacactgcaaatgaagctgctgttcaagtcatggtggccgcaaggatagctcttatgatcaacatgatcatgcttcatctaatgaagaggctcttcatatgacaatgcctttgcagcacatgatggatgctaagacagctggagccaaataggcatcattggataagcaaagacaaattcatgagctcgatgcacaattgaatgaaaccggagatctcataacagatctaacggcatagtttaagcttgcatatctgcagttagagat

SEQ ID NO: 49875 - DNA, 1221 bp, Glycine max
  Clone ID: PAT_MRT3847_16045C.1
cacgcgtccggtgaattgtcgtctttccccggccattagaatagagatcaagcgcagacatgggaacttacaaaggaagaaacgcgaattgatgatggaggtcaccaaagacgaagctgcaacgccaggatcaggaggtgctcaacctcccaatccaatttctaacggtaaccctaatccaaatccaaaccctaacccgaacatgcctcacacccccagaggatccaaaggaaaatcgtgtaagggatgcacctactacacatcgcttcataaggccaagtccaaaaaccccacatgcgttggtttctccagagcactccagcaagtacccccttttgttgttggagaaactgagttggaagcttcaaaagagggccgcagccttgcaaatttcaagtatgcatgtattggatactctgtctacttagacaacaaagattcttctgctggctctcaggataaaacagcaaaattgcccttttgtgttggtcttgaggtggtcttagtggagaaagcttcaaattcagatgctggccggctttctgctactattagtcttgaagatgaacatgctgctcctcaacctagaagatatatacctccaaatcatacgacagagttcttgaacaggtttcaaagaaatgcaggcctggtggcatctggtgttgccaaaaacttgaacagagtgggtaactatgtgaaagatctcctaaatgacattctaaactaattctacaatgcaccttgcatgggtggtacattcatgctcccttatgttgatttttcatttcaatcctcaccccctaatgtgcaaggcgcattatagaactactccgacattctatttaggcgaacgacggtgacaactgtagttcgtgtacgaaataaattcaattttacacattggccattttccttaccttaggtcaatttattatttaggttactggcggttttataaataaattttacacattggtcattttcctttcgtttctgaacttcgttaaaatgagttttttgtccaagttgggttaatgcgtatatatagtttttagatttcttattgctaaaagtgtgattttttttgtttgttctgtaacttctttgtgggcttccaatgtggaccccaaatttatgtactggttcggccgtatagccctttgttgtccactaaactacctttatgctgcgtgcctttgctatcaaaaaaccaacacc

SEQ ID NO: 49876 - DNA, 1282 bp, Glycine max
  Clone ID: PAT_MRT3847_16046C.1
atacggctgcgagaagacgacagaaggggagagagaaaatagagatcaagcgcagacatgggaacttaacaaaggaagaaacgcgaattgatgatggaggtcaccaaagacgaagctgcaaccccaggagcaggaggtgctcaacctcgcaatccaaatccaaatccaaatccaactccaaatccaaaccctaaccctaaccctcctcacaccaccagaggatctaaaggaaaatcgtgtaagggatgcacctactactcatcgcttcataaagccaagtccaaaaaccccacatgcgttggtttctccagaacactccagcaagtacccccctttgttgtcggagaatctgagttggaagcttcaaaagagggccgcagccttaccaatttcaagtatgcatgtgttggatactctgtctacttagacaacaaagattctctgcttgatctgaggataaaaaaacaaaattgcccttttgtcttggtcttgaggtggtcgtagaggaggaggcttcaaattcacatgcaggtcatggtcatgctactcataatcctgaagatgaccatgatgctcctcaacctcaaactcaaatatctccaaatcatactacagagttcttgaacaggtttcaaagaaatgcaggcctggtggcatctggtgttgccaaaaacttgaacagagtgggtaactatgtgaaagatctcctaaatgacattctaaactaattctacaatgcaccttgcatgcgtggtacattcatgctcccttatgttgattttacatttcaatcctcaccccccaatgtgcaaggtgcattatagaactactccgacattctatttaggcgaacgaaggtgacaattgtaattcgtgtacgaaataaattcaattaatccctttacaccttggccattttcctttcgtttctgaacttcgttaaaatatttttttgtccaagttgagttaatgtgtatatatagttttggatttcttatggccgaagtatgattattttttttgttctgtaacatcttcgtgcgcttccaatgtggaccccaaaaatttatgtactggtttggcagtagcccgttgttttatttaatagattggtaaatggccaaaaggaccgataagttgtccactaaatcacccttatgctgcgtgtctttgctgtcatatagccatagcatgctgggctcgattttacttttatttttgagaatctaatatttaacctctaagtaggtgtttagatatcaatgaaactactttgtcatcc

SEQ ID NO: 49877 - DNA, 723 bp, Glycine max
  Clone ID: PAT_MRT3847_16047C.1
atgagccacgcccccaacctgtgctctgtcccgtcgccggcgttgctcccgcaagccacgcacagcgccttcaccagcggtaggaaaatcccccccgccctcgccgacaccgagggaatcgccggcgcaagaagcgcctcgctgaagaccaagctgccggttttgatgaaacccttggcgaagaagaaggcgagggcgatgagccaggggatgggatcgccgaagccggagaatgcggcggcgaagggtagggttttggtgagaacggaaacacctaaccctaatattgctaccgcgccaagaggcaagggttgcgttataatgccgacgattgtgcctaggaaaatcgcgagtagttgccacgcgttgcggttcacgccggcgggaaccggtgagaaccagaggattactcccgtcgcgatggaggctattagcggttttatggcagcgccttgccatggctgtaccggagccggcgccggggtgatggaggcagcggaggctctgactgttaaagcggagggtttgcgagtggaaattagcgtggcggtttggtttgagtgtggcggtggtgttgcggcggagacggagggaggggagggcggtggtggtgagtgcaacggaggccatggtgggagggagtgggatctagtgagtggacggtggagattgggtgtggaatatgcggctccgtttgttggtgaggaattggtggctttgtga

SEQ ID NO: 49878 - DNA, 1238 bp, Glycine max
  Clone ID: PAT_MRT3847_16048C.1
tacgaaatcttgaacacgacaccagagggggcgtcaaaatctgaatcttgttcctgcctgggaaaacaacgattctatcatatgaatcagcgctgtttggggttgtctcctactcctacaccctgaattgaagcccgcctttgttttcctccaattcacttcttcgctagctcctgcttccacattccctttcccggattcgaactataatggcttgtgggagtaagagcgggaaaagtgagatcagtgaaggaggtgcaaatgattcagtggctgtgggagatgtgatatttgtcaagcttcgcggtagctcatggtggcctgtacaggttgttgatgaaaatagtgttaataagagtgttaaaccgagcaaacggaccaaacgattgccgggagacatccttgttaggcattatggaagctatacatactcatatgctgatcctattaaatgtcgtgatgagtttaagaggatacttgagcgtaatgatggttctctcaagaaagtacttctacagactcttgaacaggatcttcctagcacaaaatcccgtagatcaaaggggtcatcatcgaagcctaaaggaacatcaagcaaagatgctgcaggcaagagaaaatccaattgggaagataaggagcagaataaaaacaagcaaaaagagacattgaatgtcgatgatccggcttgccaaagttgggaaacaagttcgttaggaaagtcgccagagttgagttctaggaggataagagtgatggaaaaccttggcctcgttgccccagctgggtcaccattcgaaaagaaagatgcacataagtataaaaaagcctcgtgattatggggatgaaggaattgatgtagacaagagcatgcgtaaatacattctcttttaacatcacatgttcgtttagtcattactgagaaatgtttaacacttagttgtagtttaggatcatcttatttggtcaatcgccccgtgatcatgcatgcaaactttgggcaaaaattgtgttcggtgagctggtctgatttttttggggtgaaagaatgttgtggaaatgattcttgcatccactttttactgccaaaaaaaaaaaaaaaaaaaaaaaaaaaaaaagacaaaaaaaccaaaaaaaaaaaattaaaaaaaattaaaaaaaaaaaaaaaaaaaggggggaaaggttcaaaaaaaaaaaaaaaaaaaattaaaaaaaaaattaaaaaaaaaaaaaaaaa

SEQ ID NO: 49879 - DNA, 1772 bp, Glycine max
  unsure (1)..(1772): unsure at all n locations
  Clone ID: PAT_MRT3847_16049C.1
accacgcgcatggcctccgttgcactcaccaccaccgccctcccctccctccgtctccgccgcaacaccaccgccacactcaaaccaaaccgccacgcttccatttcactcaaaccaaacctccacgcttcaatctcctccttcccaaatttctcactcaaaaaaccacacctaatttccactcgcaaaccctccgctttaacagtcagagcctccgctgcctccatcaccccggcgccggctccggtacagccatggcaaggcgctgccataaaaccgctaatagcctccatcgcgacgggagtaatcctctggttctcaccggttcccgccggcgtgaaccgcaacgcgtggcaactactcgcgattttcctaggcacaatcgtcggcattataacgcaacccttgcctcttggcgcggtagcaatattaccaaaacctactcgttctagggctcgtcggcgatgttctgacggcgatggcagcgaatccgctgtgcgcgactctgacgcagaattccattaatcaaacgattgggtggttggattgggctaaagccgcaattgtgcctggcttggcgtcgttggtgttggtgccgttgattttgtatgttatatatccgccgacactgaagagtagtcctgatgctcctaagcttgcgaaggagaagttggagaagatggggcccatgacgaccaatgagaagatcatgactgctactctgtttctcacggtgggactttgggtatttggaggacttcttaatattgatgctgtatctgctgcaattcttggattatctgtacttcttgtcactggggttgtaacatggaaggagtgcttagctgaaggagttgcctgggataccctcacatggtttgctgccctcatagcaatggctgggtatttgaacaaatatggtctcatttcttggttcagtcaaactgtagtcaagtttgtcggtggattgggtctatcatggcaattatcttttggaattctagtccttctctacttttactctcattacttctttgcaagtggagctgctcatattggtgccatgtttactgcatttttgtctgttgccactgctctggggactccgccattctttggagccatagtgctgtccttcctctccaaccttatgggtggccttacgcattatggaattggatcagctcctgtgtttttcggtgccaactatgttccccttgctaaatggtggggctatggattcctcattagtattgttaacattataatctggctaggacttggaggagtttggtggaaattcattggcttgtggtaagaggccaattatttaaatttgcctacacagaatttctaatttaagatttttgtatacattcatgtatgaatcctccttattaccagcagttgaagcaatctgcttttctttttcccattctttctaaaataatcttcgggaggttttgatggagatttaggtgggcctggatacagttggtcattttagatcccgggtagaatatttacattattatttatatatgaaatgtaaggacatcctgccattcaggatatgttgcagttgtatgccttgaatgggcttttacataaattttgctgagcaagtgttagattcttgtgcgggatggcaatattgtgaattttagatattgcattcatataactgaaatttggcggttataattataaaaaaccnccgggacccctgtcccccccaaaatccccataaaaacctcccctggggggggggg

SEQ ID NO: 49880 - DNA, 220 bp, Glycine max
  Clone ID: PAT_MRT3847_1604C.1
taggaattcgtctccctgttaatttttctttaaccactttttctatatatacacacacccactaaaatcaggggtgtgtgatattttaaaatcacgcaaccgccataaccttctgacaaaccatatataactaaatatataataacttccaccacaactggaacaacctatctttttttaacaaatccaacaaaactaatctttacatcaatatctacct

SEQ ID NO: 49881 - DNA, 191 bp, Glycine max
  Clone ID: PAT_MRT3847_16050C.1
ccgggtctactcacaaatccgaaccgctgcgaccagtggacagaacgggaatcccaatctcatcttccatttccaccatcaatactatttgcttgacgttttcaaccttctctaaccattgcagagttggatagagcgtctcagatccattccatagccatgtctggtgtcagcccgctttctcaagcttg

SEQ ID NO: 49882 - DNA, 633 bp, Glycine max
  Clone ID: PAT_MRT3847_16051C.1
cctgagtggctcatttccttagaaaaccttgttaaattaagcttgcatcaggacatccagaaccctcacggatgcaaattagaatatctcttagagcaggataatcaactcccaaaactcaagattctcaaacttgaaaatttggttcatctggaatacagcgagaagacgacagaagggggggaaaatttctgtaaatccctggaagagatgacaatcatcaattgccctaaactcaacagttggtggaaaccggggacagaagccaggccgtcatttgaaaagatttcaaaactacacctccatcgctgtcctctccacactatgcctctctatcctcgtcttgaagagatggtcctccacagttgcaccttaaaactgctgcggtagaatactatgtccattccccttacggatcttcacattcaagattgcgatgacttacaaaacctgtccggtgttttccagcatctgagctcactccagcgtcttacgattgagatctgtaagagtattgacggggaaagcaaagcatgggagggtctgaaaagtctgtcttgtctcacgttaaagcaaattgaacatctcagttccctttcatttgctgaccgcgttacaactcttcgacaactt

SEQ ID NO: 49883 - DNA, 575 bp, Glycine max
  unsure (1)..(575): unsure at all n locations
  Clone ID: PAT_MRT3847_16052C.1
aaaaaacctttgtctccaaggcaaacacaccgctacagaacatacataacataggcactgtctctgttctgtctgaactctgaacacagataaatccgccatgtattttcgcatctatggcgtcacgatcctcctcttcctcctcccaaccctcacattctccctctcgcagggtcagataaactcaaactcaatcctcgtcgctctgctggactcgcattacaccgaagtagctgagcttgtggaaaaagccatgcttttgcagacgctggagaacaccgtgatgaacaacaacatcaccatcttcgctcccagaaatgaagccctcgaacgcgatctcgaccctgatttcaagcgcttcctcctcgaaccccgcaatctccaatccctccaaactctccttttgtcccacatcgtccccaaaagaatcatcaaacccgaatacctaaccgggacgggcaatccgggtaggtcaaataacccgacccggcaccgaacgctagctncgaaccaccacctgactctccagtccctgaaattgactcactggaatgtcgattcttcccgggtcatga

SEQ ID NO: 49884 - DNA, 274 bp, Glycine max
  Clone ID: PAT_MRT3847_16053C.1
ggaagcatcgttgtttatccattattaccaatagaattgaaaagaagaatctatatatataatataatataaaagctcgcttcgtgatcaacgattaattctgttgttgcagaatgcatatggctaattcctgagatggtaaacaatttctctctcacatttccgttgtttcctattcgctctttacaggaatacatatacgctttatgcagattctcgattttcttcgtctggtatttttttttcaatttctattattctcgctagattaggc

SEQ ID NO: 49885 - DNA, 392 bp, Glycine max
  Clone ID: PAT_MRT3847_16054C.1
ccacgcgtccgatcggttccttgatcacgatccaaccaacacgtgtacgccgctgtacacttgcgactccaaggccgctacttaacttgacctaacctcaacaccgatctcgacaatagcggcggcggtgccaacgtgtaacggtaggcggaggaggtggaggtggaggtggaggaggaggaacatagatgaggtgaaaaaaaacaagggcgaggaaggatctgacaaagacaaagaggaaaaaggctatgattatgactaagaaaatcactctaacttatgctgaactcgacggagtgagagagagtaatagggttatctcaagagaggacagcaacaagacacttttagactgaggggggggctgcgtcagagaggtaatatgtttatac

SEQ ID NO: 49886 - DNA, 276 bp, Glycine max
  Clone ID: PAT_MRT3847_16055C.1
gatagcacatcaattaatcttacgcaacttcgaatctcacattacagtcctccccgcgtagtcttcctctatcagtccttcttcaaggctcatattatacaaatagctcgcatgatccaacagatgtgaaatgcacctaagaatcagttcaccaccagagactgcaaagaaattctgcaagaaaatcggtgaagttatcaaccatcattgctatcaccatgaaactgataccctacttgagatccaaacataccacaagagcaaattgcttctgat

SEQ ID NO: 49887 - DNA, 654 bp, Glycine max
  unsure (1)..(654): unsure at all n locations
  Clone ID: PAT_MRT3847_16056C.1
ccccactcttacgttctctcttatctctctgtatcttctgccttatcctcagagagaaacagaatccttcgttggctactacttttgttctggctcctaaaaaggtcgaaaatttaggtgagtgttgaggatggtgttacggagaatgaagagaataaacgaaggactttgcttcatgctctggtgaaaatgcagatcatgctgcatattcttcatcttcaagtgcgagcaaaactgctcagagtctggacatctgccgttaccaatgccggatatggtgtatgagctgcttcataaccatcacatggactaagagcttgctgaggcaagggcttaacgaatggatcgatgattattcttcaaatcaggggctgagcaaagcgtatatcaaaccctggatgatctccaagaggaggcgttgtaagaaccctgaggctaattcttggaagagtgacgtgtactgtgacctttccaatgctagatctggagccgggcctgaaccctttgagggggtttatgtaggaggacatgtagatcgccaaatgggtctccttcttggagatgcgaccaaaaaagccttcaagaaatccatagctattccattaccatccaatgccgnttttgatgccaaaaaagaacatgtatttggcaaga

SEQ ID NO: 49888 - DNA, 350 bp, Glycine max
  unsure (1)..(350): unsure at all n locations
  Clone ID: PAT_MRT3847_16057C.1
cggaggaaanggacgnggangaacggcacaaggaancaggcccgcaggcngaagacancancaaagaacaagncaaggcgcnctacaagcgccacaagaacacnngcggcggcgggcncagaaacaggcgccaagaccgngcngggcaggagggggaagccgcaccggggcgggaccgcacaagaaggagcngggcggggaaggaaacagagggaagcgggggggggggaaagggcaggggcggggagaccgggaaggaagcnggggaaagggaangcccgggagggnggggcccgcgccggcgggcgcggggggggccgccgggggcggccccgccgcgccgggagggc

SEQ ID NO: 49889 - DNA, 498 bp, Glycine max
  Clone ID: PAT_MRT3847_16058C.1
tcttcctctattctttctctctatcgcaacacaactacgcaaactaacaacaaccacaacaacgtttgtgtcaggtcgtgttgtgttgttggggatttcatgacaacaataaacccttgattcctctccccattctcccaagagaagggccattctgttacaatgttggatactctcaaatggatttagaagacaagttccttgccaagggtatgtttttttgcttcttttttagtttgttctttcagtagtgacaggttgcaacaattttttgagtttattctttgtgtttgtaatgctgactggctgatgcatgctgtgtgatttgtctaatgattctgtttttatgtgtgttttactacctactaacacactgcttcatgtttcaaaacatgtctaactaagtaactaaccatcaagtttcttttgctttcttccctggtaaagactagtgtttatgtacagtttcagtccacttgtgtttggtttaaatattga

SEQ ID NO: 49890 - DNA, 651 bp, Glycine max
  Clone ID: PAT_MRT3847_16059C.1
ctactcaaacaaactccaacattgctgtctcgtcattgaatgtgttgggagtttctttggccttggcttgttgcaggcacttgctactacaaaagattatgatgagctctagcccagacgaaggaagataaacatgcatctttaccgttcaaaattcgtatgaagtaaatggccttgtctggttggttggggtggataggtggtgataaataaaagactattcagttgtcttggagcttatatcttctgggattggtggcgtcgcaatggtttgttcgcttctctagtggaaatgtcataatgatgcacctgtaaaaatcgttgttactatcatttggttgcaagtgatacgtagtgctagcccttttttctaccgcaatgcttcagacttatatatagttgggaaggttggtagataagaagtggatgtcaaagttggataatggggtatgatatattattgacattatggggctcccctgttgagcacgtgttttgttaaggttcttattatgtgttgtgtatgacgagtggtatatgtggttcatttctcttttccctaagacgaggggttgactcgaacttcaaaataaattttggtggattgttgaatgcatatccatcttggtctgtatcagtacaatgatttat

SEQ ID NO: 49891 - DNA, 301 bp, Glycine max
  Clone ID: PAT_MRT3847_1605C.1
tcgctgatgtgaccgcaggataattattcaccactcttaccgtggactactacgtccgttactggttactagaaaaaacaaaaacaagttttctagccaagatgtgttaaggtccttgctgctcaaaacgcaccgattgcgtttgtctctaaggagcggattgccgagccctagctgcaatgagggggcggcgatcccaagctagagtcttagagccatgattctgtccgacgcaaatgcccttgcatgatatgagagagcacaccttgctggcttgtttgaaggcggggaagcccacatg

SEQ ID NO: 49892 - DNA, 494 bp, Glycine max
  Clone ID: PAT_MRT3847_16060C.1
caaaaacagagtgctctgagaaaggtagcgttttttttgtggttgtttttttctcaattctcaaccatggagatgcagatgacagtgatgggcttgattctgttgctgctgctatttgcttcggatgtgagtgcttggactggcgaaatccatggaatgagcgatcgtgatgtttgcggagattcttctctcggacctgaagaccatgttctcgaaggcgctgaggttgctgatctctgcctcaccaaatctggggaggatctaaattatcatgcattcactgatgctcaggggatatacacagcggccgagacactgcccgatagcgatcgatgggatgcatgtattgcccgaccaatcactagatgacatgagcaatgcactccacttggagaacgcagcattggaggtaaattcatctacgatgatacatcaggacattgacacactgccacggacctttgttgatcgacccaccagaggatcacacttac

SEQ ID NO: 49893 - DNA, 245 bp, Glycine max
  Clone ID: PAT_MRT3847_16061C.1
ctcgtaaacatggtttttgggtctattgctgtctcaggggtaaaccctccttagagattcgttggagctgaggacttcaaggaagaatgttgcaaactttggggaatggatttacaactgacagtgaggcttgggcaaaatggaaacttaatgagctatgtggatgttaagaccactgtatatacatgagatgttgattggctttactaaagcgtataccgtgaagagactgtttgcacaatcac

SEQ ID NO: 49894 - DNA, 573 bp, Glycine max
  unsure (1)..(573): unsure at all n locations
  Clone ID: PAT_MRT3847_16062C.1
ttttttnattttaacattccagaacacattaaataaaataacaaagaatggatagaaaacagagaacactcaaacctaagtgaacacctatcactttttaccaaaatgggtgtaccatttaagcttcacaatgatatggacatcacatttccttcaaccaaatatcctttttgataacataagatgcatctgagatcagatcaaaacaccaaaaatcagaacagggccaaatttctccatgcatgcgcacggatcctccaaaatcaacatgcaaccacatatatcatcacttgcatccacggattcgagcatcaaccatcaaacaatttgaaactcttccaagcagcaagtagaggtgcttaggacttgtgaaaaactcatcaagcaatttgaacacatcaacgacaaggaatttgaagtgaaaaggagacatagttagggcttaggactggtggaaaattataattataacctttttcgaaaaagcctatgttatgcaaagtatctcagaaatgatacactgaaaaatcagaagttttttattaggatgagtttcagattacaaagagtttt

SEQ ID NO: 49895 - DNA, 446 bp, Glycine max
  Clone ID: PAT_MRT3847_16063C.1
ggaaaatgttgagcttcattctctaatgaggaagttttgtatactctcttaaaagtgcatgggtatcatcctgagctatatgctatacaacattaaggttttgttccacatctgaagtaactctgttatttgccaaacaattagattcagcagtaaaaacatgaaacgtacgtcaatataaattgaacattgcggttacaaagacgacttgacgtgacatctacattgcatggcctagaatgatgttactagaaatgaaacattgcatgacctagaatgatgtgcataatagtgaagaggataaacaagtagtggtaggattgaaaatgacgggtgttgaatggtcattttaggttctacattatgtatgtgatcaacaagcaatgctattacactaaaaaagccacccaccaactcaataaacaccataaatgaagacgatcaac

SEQ ID NO: 49896 - DNA, 257 bp, Glycine max
  Clone ID: PAT_MRT3847_16064C.1
cagccggcactctcatggcctaccaaatcaatgcttaagacgttctcttactcattaaggaactgtataactcccggactcctttactcgagttttacaaagaaagacatactctctatgagcaatctattaaccacttcgctaattcaaggaaggcgcctctgcttacgtataatgggaaggacattaaccacttttttagatactttgaaacatccatctgttaggccctcaagcctaaaacaagttttctaacc

SEQ ID NO: 49897 - DNA, 396 bp, Glycine max
  Clone ID: PAT_MRT3847_16065C.1
gggccttaaaatgtgcgaagtaaacgggtcctttaactgtcatacccctacagaggacaaacgactcatgtataacctgcacaataatgattgggctactacaaattctacaatgctacaatggacgctaaataaccctgtagggtgaacagattttttggaaccagaaacttgagccatattcaatgattctaccttaccggttaaaacctggccattaataatccaccgggggaaaccttccaagtaggcatttatgcctgccgtgatcattttagctcctttcccaaatccgatgggaaagcattccaccaataccaaccggttgattggctagcccccaaacatttttttttgtttctgaccgtgtggacccccaaaagccccctacatttt

SEQ ID NO: 49898 - DNA, 361 bp, Glycine max
  Clone ID: PAT_MRT3847_16066C.1
atatcattattctaaatcatctccatgtaacgctatctgcttgattgattaattgaaatagagaaatcaaactattaacacgaaatctatttattagttatattgtcacgtcatttttaaagaaatgaaatcaatttttgcggcaattttttataaaattagcagttgttttatgaatagtcaaaaagctgcctagatgatcagttcttaatgaatgtaatttttgcataaagtcagaaaattgagacagctgtatctggtttaaatcaagtgagtcaaatatataaaagatgaattgcctgtgtgaaactctttcttgcttacattgaaacgtacaaaactggtaaattagtctttttag

SEQ ID NO: 49899 - DNA, 416 bp, Glycine max
  Clone ID: PAT_MRT3847_16067C.1
tacggctgcgagaagacgacagaagggcatatatgataatattgttaacttttataataataattttaaaatcacattaatgataatttataattagataaatgtgtaaaacaattttacactatatgaccattaaactctattaaataagttatcctttctgttgtattgtattttgaaaattacttatagattaattgttacaagtgataactaaaagatttaagtttttgtgattatgatatttactttaatatattttatacaaataattaatggtataaaaacttgtttaaatcgttgtttgcgcttaaaattagctaataaacacattcaagtgtgggtagatttaattttaaaaaaatattcgaggattaatcttagaaatccattgttttactgcgagttttatttag

SEQ ID NO: 49900 - DNA, 693 bp, Glycine max
  Clone ID: PAT_MRT3847_16068C.1
ccacgcgtccggtcaaattaatttattaagataaaatttaccaaaaaaattaagatgatgacacttgtaataaaatgaagaggacccataatgataaaaaaatgattaaatatgattatggtccttcaaatatatattaatctaggttttagttcttcaaaaataattttattgtatttagtttttgaaattttcaaaattcttttttaagtcctctatttgacttcgtcaattatttcaataatgcaagagttgtttcaatattaattagtatttatttttttgcattaattagtatttcagtatatcatgcaagaataaaaagaatgttaaaatatgtttttcatttcaaaaatatatcaaagtttgaattttttccattgtaaaaatttttgtcctcataaaattataatgttacttttttttatcaaaagtgctaattgtttttcacaccttattttgtaaacaaatatcttagcctttctttatgatttttgttgataattgtgatttttgttaataaattgtatacacttgttttagaaagtaaaaaagataattttttatgtttttctataaatttagatgttatcaaagcagagttgaatcattaaatgatgaagagctatagagattatcttgccacaagaataagcttttgcacaacataataggacccttgatgagttgaaa

SEQ ID NO: 49901 - DNA, 318 bp, Glycine max
  Clone ID: PAT_MRT3847_16069C.1
cgacacttataaacctctcccccaatgtcatctcgacaaaccaacactatgtgtgtgaccaacaacgacgcggaggggcagacaaactgttctgtactggtctctaaatcactgagaattgatgacccatcagaggctggacacagtcctctatggacaactttggtcataaatagagagtgacaaactgcaggatgcgtatctacggattctagtggaacaagcaaaagatgaccatgttgtagtagcctacactaaggactgagctaaccatacgcatgcctttaccatgcatcatctactatgagaacttattga

SEQ ID NO: 49902 - DNA, 271 bp, Glycine max
  unsure (1)..(271): unsure at all n locations
  Clone ID: PAT_MRT3847_1606C.1
tggcaagcctgccattacaggaggtcccgcgaggccgtgcccttatgtgcttggctcctgttctactctttctctgtgctctcaccccatccgatggtctcggtgcgccacggcttttttttttgtcgggaaccntgagactgggtgacgacgtgcttatgccctccgtgccgaagttcttgggttccttggtgaatcacggccggggctgctccgcataggtggagaattcgcgccgtgcggggcttctcgcccgcatcatggtctgagc

SEQ ID NO: 49903 - DNA, 408 bp, Glycine max
  Clone ID: PAT_MRT3847_16070C.1
tttttatttttttttttttttgccccttggacaaccaccttttttttaaagttttggcccatatgccatggtttcacctcctaaaaaaaagcctggggattaaccttctttgtggccatgaataggtaccaggtttacattttcctttaaaaacaccctattttcccgcctacctttggggcccggaaaacccgccctcgagagagatattttgtttaaacttccaacagaatccggagagtgtttgcccaaaaatgggttaacagttttttccatctgacacaaccaccgggggccagctaccagccctatgggtctaatttataacagagggcttccctgactacccttaggcgtgctggctgcaaatgattaattaccagtttcacattttattgtaagatcccc

SEQ ID NO: 49904 - DNA, 309 bp, Glycine max
  Clone ID: PAT_MRT3847_16071C.1
actatacccacttggctgaatgaatttattgaatgtagattcacaaagagccattgacacctaacatcacagcaaggaatctgctatctaacgaaacaagcataaatgcattcaaaatgataggacgtactctatgcactctttggagcacatcattgtcttcctccatgcaagtgcaagggctatagaacaatcatggcgatggtggaggcttctcccacttcaagcaaaaccaacaagtttcatactatatcacccaaatcttacggagcctgtcattgtatcacctggcctccctcagacaactgg

SEQ ID NO: 49905 - DNA, 218 bp, Glycine max
  Clone ID: PAT_MRT3847_16072C.1
acatacagaaccaagatcttgattaaatttcattaaaccatgggttaaaattccatctttcctagatttgggtatgctgaaactcaacattttagaactctgcaaatagctaattaggtcatttttaaaccgtaaagggctaacagcaccaataaaaagtgcacatggtaaattacccacttaaaaaactcaaaggggtaacaactcaacattacatc

SEQ ID NO: 49906 - DNA, 216 bp, Glycine max
  unsure (1)..(216): unsure at all n locations
  Clone ID: PAT_MRT3847_16073C.1
ccgagcttggagttctccccaacaaacagaaaccnatgctcaacaatgacattcncacgaaggttaagggtgtncggnctcgctnnccattcccaannngnccnctgggcntcaaaactcctcacantctcacttgngcnctcagnncccatccantcaaaatgtggacgatgtccgttncccaatncnatcgcaggcngtgtatgcgtcntacnc

SEQ ID NO: 49907 - DNA, 516 bp, Glycine max
  unsure (1)..(516): unsure at all n locations
  Clone ID: PAT_MRT3847_16074C.1
tggggnnnnaatgccnttgagtcgatctgtacaacttctgacgtatttatgcgcgcgtacgagctcactaaattggggtcgagctctaacttctgatttcttacatgctttttttttttcgacgacacattcacatttcaaattggcgggctttgtatactatccattagctcccaatgatcacgaagccctgggcttcaccgacggggatggcgccgcccaataataacgcatattttctgtcggtgatgcaggaaatgataatgaaggacgcgaggagttatattgagtttcacagttagcggaatgtgatgagaaaacatgctgcacttaatgaggagattaagaacgccttcgtgaaagatataacaatctgccgggtcgcaactgaagtcttatgaattgagaacggaacatcacaacaagagattgtgaacagaattaaaaaccacgggggttccctgctcataactcaacaaagctattaggcaataaaaccgggtgatgtacagcgag

SEQ ID NO: 49908 - DNA, 2172 bp, Glycine max
  Clone ID: PAT_MRT3847_16075C.1
ctatgggcaaaacaaaaccttggttaaaccctgaactcaaagttgcattacaggagagagagagagagagagagagatgtttgggaggggaacggtgtggtcagtgttgaggcgcggcaaagaagcttgcggcggatttcacaagctgagaggaacgcctttctcttattcttcttcttcaacacctttcaagttcttatcccctcccgtctccacccattgctttcatgctttccgatcccaactaatccccaagggtcatcatgttcatgtgccacaaatgaggaacttttctaagatggtctctgctgaacaaaaggaggagggattaaagctgctagtgagtgggggttctcgtgctcagaaattggttggaatatggctctttgggtcagcggcatgggtgttcagcatggtggtgctcgggggtttaacaagactcacccgatctggtctttcaatgactgattggaaattcaccggtactctccctcctttctcggatgaagaatggttgcaagagtttgacaaatataagcagtcacctgagttcaagcgtgttaacagaggcatgaagattgaagaattcaaattcatatattggatggaatatgcacatcgtatgtggggaagggcactaggagttatgtttgctttgccatattcatattttcttcataaggggtatattaccttgagattgggactgagactctctgctctgtttgccctgggtgctgggcagggtctcattggttggtccacgcgtccgcccacgcgtccgcccacgcgtccggaatattctcagccaagggtaagcccttatcgtcttgcagctcatcttacatcagcatttgctatttactgtggcctcttttggactgcactttctgttgttatgcctgaaccaccagctgaatcactaacatgggttcgtggggcagctaaagtgaggagacttgcattgcctatcagcatacttgttggtcttactgcagtctctggtgcattcgttgctggaaatgatgctgggcatgcttttaatactttcccaaagatgggtgatacatggataccaggagacatttttgaaatgaagcctctgattcgaaatttctttgagaatacggcaactgtgcagcttgatcaccgtatacttgcaactgcaactctgatttctgtgagcattttatggtggtcaacaagaaagctggagatacatcctgcagtacgatctgtgattggaggtgctgttggcatggcaactcttcaggtcaccttaggaatttcaacgcttctttcatatgtacctgtttcactgggcactgcacatcaggctggagccttgacacttctgacatttatgttacttcttaatcacacggttcgaagaccgtctttgtcccttctcaaatctctgcctcaagttggaaaagcacactaattgtttcccgatattatattgcatcaaggcttaggccttttaagttgacaaaatctgtggctattattttttccatgctaaattttgcgttgagctccttctccaattttccactgttggaatcttctgtatttgttttgtacatttgaagcatgaaaattcatgatgatgcaactgttctgttgattatgtaatgagcagatacatattatcagaaattataacatgtgattggatgaagagaataaaaaaattgtaatttaactgatctgttaacatgatatccaaggtttttccagggtggagctgtggaggctaccttaaatgaatattttgaaaatgaagcggctaaacacttggggttggtttattcagacctataactgaccaaatcattcaagctcacaacagagttcaataccacaatatctttacagcattgtcactatttagaaatcttaaaatgatgcagaagacaccaggtatgagatctaacaggcaatgactaatcccacaaaacagctttcgtctatgggcataggacgcaaattttttatcacaagttcaacatcttattcagcacaaatttatgctaatggagagtctaaattggccttcaaataccataaaagcaacattaacatcacagagaacacgtgagcctggtcatcaaggccaatttcatcattgaatctcatgccatttggaataggaatttctaagcccct

SEQ ID NO: 49909 - DNA, 574 bp, Glycine max
  Clone ID: PAT_MRT3847_16076C.1
ggctcgaggttaagatgtgtacagatgtgatagaattacttatacacaatatctctaggttttcccttaatggctagtgaagaaactatgatgccttaatcctattttagaattaaattgtgttctgctgcatcttgttggttaccagctagtctttcattgaaaattgctttatttttttgacagttgtgccctttgtatccacacaatcctcaagtcctactgactgagctgagatccccatctgagcttcttgactttggggaattctcagatttgatggattctgcaactggttctggttctcttcatgttgttaacccagcatttgattatgtgccaccaaaccttgttagtctctttattactgacacgtaagttaaaccaacattaatgaagaaaactagctttacttcatcaatgacttgagaaagtgagttgtattatttggtttcttttcttgcacttcgctggttttggaacttctcagtggagggcataacccgtcatatatgtaccggctcatagctgattactactccgctgatgatttggtagtgaaacatagagctac

SEQ ID NO: 49910 - DNA, 388 bp, Glycine max
  Clone ID: PAT_MRT3847_16077C.1
tggttggaaccaacctttgggctgatgagtctatcagctggtggttgtttccccccgccccccccccccccccccccccccccccccccccccccccccccgttggggggactatagctaatatacaacaccaaaaaagggggtacggaaatagttcaatatacggtagccttcctataggaacccttatgaatataaggtatatattagtaaacttattaatcatatttgaagcccttaatcaatagtacagaggaacggagtaatagattagtgatgttttccccagagacggaaagggggcaagggcccaaaatgccttcggcagttgtttcggttattaggggtctatcgggttagtactcgtgtggtaattggtcctcgacgt

SEQ ID NO: 49911 - DNA, 544 bp, Glycine max
  unsure (1)..(544): unsure at all n locations
  Clone ID: PAT_MRT3847_16078C.1
tcctntagagttgccgcccttgggttattcttttttgatgaatacctcaaaatagaggcttaccatggtaacattgagcaaatttcttgcttaagcaattagtacaaactacaaagtgccgatgcatgaattcaacaaactaatgtgttctgggtgataaaatacaacatttttgtcctgcagaaacactcatatgaactagctagctacaacaaagccatatgtgcttaagatacacggtagttcaaaaatattatatcaagcacaacatttgagactcaacgcacataattcacgagatgtttatgaggaaccagggcatgtattgacaccattcttgcaatcacgagtaagatcactgaatgtttccaatttcctcttcccccgaaggaacaccttagtgtcaactgcaaccctcatgtatccatcgaattcaacagcattaccattgctcagctgctttggttcagtgtaccactcgctggtctcataccataaatgcttgaagtcatccaagaagtgtgttcgatacttaccctttatt

SEQ ID NO: 49912 - DNA, 182 bp, Glycine max
  unsure (1)..(182): unsure at all n locations
  Clone ID: PAT_MRT3847_16079C.1
ttcgtgcacgcgtacgtnagctcggaattcggctcgaggagagagagagagngagagagatctatctatgctatcnanatggcgttgttggttgagaaaacaancagtggnagggantaccnngtgaagcacatcacgcnnnccgatttcnnnaaattggaaatcganctggcggnngttga

SEQ ID NO: 49913 - DNA, 332 bp, Glycine max
  Clone ID: PAT_MRT3847_1607C.1
gaaaactgaaaaatgagaatattattattacagttaagaaactaatcatggaaagtaatgagcttcaaaccagcttttgatggcaatccacaatatttctcccttaaaactaaatcatcttggcaagaccaagtcagtcctcgaggagagctctttggccacatgaacctctcagagaaggggttcactaaactctgccgaaattgttgcactgtctcacatagcaacccctttgccatggattttattttcaatgagacatcactactaataaggacaagttgtacaacattatacttttttccatattgaagggcacagtcaacgatgtg

SEQ ID NO: 49914 - DNA, 208 bp, Glycine max
  Clone ID: PAT_MRT3847_16080C.1
ggctcgaggttgaatggcgtgagttcttcccatgcaactcttgcaagaaattcaatcggcggcattgcttacgtagctcccaacacaagccacggggtgttgtcacatactccgcaccataataaagccaggattactcgagtgagattgccgtaccagctccacctgacaccgattcttaaacactaccattgacaccctccaacaa

SEQ ID NO: 49915 - DNA, 467 bp, Glycine max
  Clone ID: PAT_MRT3847_16081C.1
gccacgcgtacgaccacgcgtccggggatgccgatcaaccgagatcacaggatgccgcaccttaaaaccggaaacaaaagcaatcaatacttgattacaagaatgtgtcaaattcttcctactaaatagagtaccactttttaagggaaagaaaactactctatgagctggccacagactttgagaataattgtctttcacactcttagttgatttgctgaacactgtcctatttgatataggactgcgtgtcagatataaactttttctgtctctagctcaggcctgtgaataatttgaagtgcaagctgacgaaatcttggattagagcacccactctgctatactggtataagactgcgcgggtagacactcctatctctctactgactctcactgtcttctaatgactgatccgtatggacacacaaagtggtctgatctgaaaaacacttgggcgatggtgc

SEQ ID NO: 49916 - DNA, 252 bp, Glycine max
  Clone ID: PAT_MRT3847_16082C.1
ggtgaacgctggtcaaaaaaatgatgggtgggcatgaatgagggacatggagtgatcgcgcctccttggaccaagtgttgctacccaacaccaacaaattattgctgtttgatgtacgtcggcggacacacactaagcctcatttctgggaatcgatgcttgactattggtaaccaaggacctggagaatgctaccgtaatggcttgttacctactgtgcagaagccaactaagatggacctttgcttttgc

SEQ ID NO: 49917 - DNA, 296 bp, Glycine max
  Clone ID: PAT_MRT3847_16083C.1
ttttctttcgtccgcggacgcgtgggcgcataacagcgtgacccacaaacggactgcctctgattttccctagtgagaaagacctgacctactagtgtgtggactagcttgtcgtggactgacagacacccaacaaggtgtccacctgctatgggaccacattacatataggatcgtggcttattagatctacagtataacatttgagatttgaccgatagtgagagataaactgatattgtgtcttgatctgtactctcataaatgatgagaacaagcatgaggcgtgttgtgat

SEQ ID NO: 49918 - DNA, 401 bp, Glycine max
  Clone ID: PAT_MRT3847_16084C.1
ggggtagcggcaaccttattaggacctcaacttctttatttatctttccatcagacatcagtagcggtgattttctgcactcgtgtgttctgagctgaacaaattctgttcttctctcgtatagtgaagtaaacaataagcacataaaccttcgtggacatggcaacaacagccttgtccacgaccagtgtgctttgcaggaggaaacctcagcacatgcatattatcctaccctcttcacagacactccaaaatggaactctaagaactgatgtaactgcttcagcctcaaaagataatatcagcatagaaagtgagaagtgttgttcctctttgttggtgaacagaagaacagttttggcttctggggtttccttgttgggtttcccgggtgagagttt

SEQ ID NO: 49919 - DNA, 433 bp, Glycine max
  Clone ID: PAT_MRT3847_16085C.1
caccccccacccttttaaaaaacaaagggaacccgttcccacaaggaccttaaggaaaaatttttctttttaaaaaagtaccagggacaaagttggacctaaaaacatcgattggaaaagtttatggccccaaacccctggggtggaaaacaaaaggggcccccccagcaaaaaaaccaagtagagccacagcccaaatagccaacccagtcgacccgccagggaaaacatccccggtggaaaaccacccctgggggccgaaaatgggacggtacccatcgactttacccccgtttttgttaacaaacgggaaaacgccttttccttttcttttccggcaaaaggcataaactccttccttaaaagccaggccacctttaattccatagggctgggaagttttgatttttttgccaccacgggccaaaatttt

SEQ ID NO: 49920 - DNA, 133 bp, Glycine max
  Clone ID: PAT_MRT3847_16086C.1
gttttttttttttttttttagagtatgaaaatagatgactttctcttttgacacttcaaattaattcttgaaagtattaatatacaaattttgttgtgtcatttctgcgagacgacagaactaggtaagataa

SEQ ID NO: 49921 - DNA, 354 bp, Glycine max
  Clone ID: PAT_MRT3847_16087C.1
ggctcgagccatattcatctattcccattaaccatttgacgagaacgacaacttctttttcaacttcagggtgaggatgcacttttgtgtaccacgcaccctctcgcttgaggaaccgtatgaatgcgcagctcgtgcagtctggtgctgactgattgtaaagaggatttgagagctgagactgttctgtcggacacggtgaacaagctctaaagatcgaaacctgagtgctgggctgctctgagtgaagaccgatcacacagcgtgaaggacttattagagaaggggtctaccacaaacgctgtatcgcatctttctccagcttggagaatgcaaagttccgaacatttctcg

SEQ ID NO: 49922 - DNA, 215 bp, Glycine max
  Clone ID: PAT_MRT3847_16088C.1
ctcgaacttaatgaacctcatgacccactgaatatatatctctatctagaactggtcaaagccgcgaccaggaacgctctaatttccaagagcataccctaatacgctctctctgaacgatactagagcttcactacttaaaggcgtatattagagtcgatttcacaatacattcagtagataacgttagaagctttgggtgaaggttttaagga

SEQ ID NO: 49923 - DNA, 363 bp, Glycine max
  Clone ID: PAT_MRT3847_16089C.1
ctttggcgtcttttcagctgggaagaccgaagggcaaaccgtagatgagatcatcgaagtgaaagaggcggtggagaagacggaagctgcaattgcacatgaagtgacggacgctaatatcgtagcagaaattatggaagagaatgtggcggttgaaaagacggacaatgatgtgacattagagatgacagaagcacacatggaagaagacttgaaagaaggggaagtgacctgagaagagacggaagataaattgaccgtcgatatgacggaagctaattgtgatagccgaagagaccaaggaagttaatctgactgtagaaatgacggaagagcaggttgccgtaggaatgaacgaagtgc

SEQ ID NO: 49924 - DNA, 570 bp, Glycine max
  Clone ID: PAT_MRT3847_1608C.1
ctttgttaaaaaaaaaaaaaaaaaaaaaaaaaaaaaacgccacacttgtctggtacagattttgtattgttagaaatggccctcctcctcttccgtgcctccaaattgatgtcatttgctgctcttttagcaatacttttactgcttatgtcctccacaatgggaagtgctgctcagcctagttttaagctcgtgcgaaagcttctccaaactaaatacccgcctgcttatcctggatatcctggtggtggaggatatagcccaaaaacaccatgaaatcatcaaccatgccaagggggaaataattaccaataccacagaactgctctgttgctgaaatattggagatgttagcatcgttctttaatataagtgccagtactataagagtgctaaatttaaaattacttttatagcatgcatacatgtatgtatgtgccagtacaataggataataatatatgtatttaatttcgacgaaccatgtgtaccactactatcagtcacaaccaataagtggctagaccagttgaattgcaacgaatattctggtcattcttctttctaaaa

SEQ ID NO: 49925 - DNA, 305 bp, Glycine max
  Clone ID: PAT_MRT3847_16090C.1
acggctgcggaagacgacagaagggggaaaacaaaaagaatattttttcatttttgccgactctgataaaaattgcggatcctataagctaaaaggatcgaggatgaatttaaaacccctttcctttcctgttcccattccctcccaaacaaattagggtttgggttttgccaacatgagtggttcttgcatatgcaatggcgattgccatggctatcagaacccatctactcgcagggtcatacgctcccagttcctccaactcaagaatttcattaatgagaaaagagatgatttgatgaaca

SEQ ID NO: 49926 - DNA, 160 bp, Glycine max
  unsure (1)..(160): unsure at all n locations
  Clone ID: PAT_MRT3847_16091C.1
aaaaganaaagaaagaagacatttccttccgaattgangaagggaaaggtgtcntggatgggcaagtcancttncttanntancacgntganctncgccggcaaggtantngtnggcnantaatnggttgccnacaaccgttggcngcggggaacaccac

SEQ ID NO: 49927 - DNA, 438 bp, Glycine max
  Clone ID: PAT_MRT3847_16092C.1
acttactgtcgcaggttcaagaatgaaatagtgagggcctatgctcaggaccatttcttcgatgtcattacaaactctattggtctagcaactgcagttctagccatcaaattctactggtggcttgaccctgttggggccatcctgatagctttatatacaatcagcaactgggcaaaaacggtgatggagaatgtgtggtcattgattggcaaaacagccccagcagaatacctagcaaagctaacatatctttgttggaaccatcacaaggagatcaagcacatcgacacagtgagagcctacacctttgggtccaattactttgtggaagtagacattgtggtgtctgaagaaatgtcacttagtcaagcacatgatattggagagacacttcaagataagcttgaaaagctacccgaaattgagagggccttc

SEQ ID NO: 49928 - DNA, 240 bp, Glycine max
  Clone ID: PAT_MRT3847_16093C.1
tgtggcatgcattagtctacattggatttacataccaattgaattgagtacatgcttgacatatatacatcgaactgtgaatgtagaatatcacgacatgctaagagccacgagatttactacatcaccattgatactggcaacagcctagctaagaacttatctacgccatctcctaacagcatagcaccttttataggattgaatcatgcaacgaacttgcttattgaagagcaagct

SEQ ID NO: 49929 - DNA, 376 bp, Glycine max
  Clone ID: PAT_MRT3847_16094C.1
atgcttatgacaacatcaaatttttggcgtcttgtatcacgaaccgttttctacgtgcgtttttaacgggcgatatacttactgcaagtgcagtacacttaatacatcttgtgttctatatcacaagcccaccaccactcacaggtgcgggctgctagaaaagccactagcagcaacacctccagtctgctgcgcaggatggtgcgacaaccgaacactaacaaagccggcaaagcccttcttcttctgttgttgattttgcatcttaagctggtgcacactagctccgtatttggcaggaagatctcgaaccacgccgccattgtcacggaattgaccgatgacctggtgaagattcgagacgcgctctgacgcc

SEQ ID NO: 49930 - DNA, 417 bp, Glycine max
  Clone ID: PAT_MRT3847_16095C.1
gtatcaaatcatttagaaattgactgaggcatgggtcacgcagtctcgtggttaccgacacaaaagaggcacaggaaacggagctagattaactattatacatgcaagattttgataattggagcaaacttccaaacgtaaactatacatacaacaatgctatttgcatggattgggtttttaccacatcaagtcaataacatattcatctcttttcaagaacatctagaatgcggttgaaccaacctaccctaatatatgtactcatgtgtattatgcgaggctgataatgatgctccaataacctgtacatacccttatggataccctcttgagaaaaaaaacaatgacatgttatatacctgtgccgtgaatggagagcttgctgaacgagctacattcttgtttctagcccat

SEQ ID NO: 49931 - DNA, 376 bp, Glycine max
  Clone ID: PAT_MRT3847_16096C.1
cccacgcgtccggcagaacatattatcatttcctcttttttttttttttttttttttttggaggtttaacaaatggcaacaaccactgtgatcatgaccactctcccccaattcagtggtcttagacctcaattctcagctgcccctgtgaagaacttggttgctgtccaacaacctatgaggcccaaggggaagggtgctttgggagctcgatgtgactacattggttcatccactaatctgattatggtggcttctacaaccctgatgctgtttgctggaaggtttggattggctccatcagcaaacaggaaagccactgcagggctaaagctggaggtgagggacttaggcttgcaaactggtgaccctgctg

SEQ ID NO: 49932 - DNA, 244 bp, Glycine max
  Clone ID: PAT_MRT3847_16097C.1
ccctttgtttgctcacataatatttgggttccttcaatattatctttttttgtgtctcctaaaagaaatagagaaaactttgtttgactctttgatggaggctcgaagaaagctaaaggcgtagttttgtttgaagttttctttgaaatggtccccatgtctgagatattgtcccccgaagaaaaaatcgtggaaggagagtgggagaaggagagatatgacgaagagaagattccctacccag

SEQ ID NO: 49933 - DNA, 425 bp, Glycine max
  Clone ID: PAT_MRT3847_16098C.1
acgcatgcccacctcggaagctgggtattggggtcaggctcacaacctggctgcgccaaactagggtattgcatagatggcactgggcctccgcgccatatcaggcatttctctatggaccaaagtgcacagtgacttacttcccacggagacaacctccaacgaggcctacttggccggataattagcctcgcgtaccgatattacatacacagagcgccgcgactggataccaaagatgtagaggctatagctctggtggaaggttaccgtcaccgtggctctgatgtggctattgggtcacggcacgccactgcacagggccaggctgatattggagcatctggagttgatcaaggccggaaccaagcaacctttttcttgagcggacataagggacgaggatgaggatcatgatatggttg

SEQ ID NO: 49934 - DNA, 483 bp, Glycine max
  Clone ID: PAT_MRT3847_16099C.1
gaattcccgggtcgaccccgcgtccgggtgtataatgcatgatttgatatgcttctctcacattttcaagcatatgtgatttgaccgacgttcattactcgatactcagcccgtactgcttatgtaggaccttctacgcgatatgaccctaaaactgttcttgtgtggcaggctctacgcacaatcttttattactttctgttttctaatatcatgtctccttggatctgaataacagatgctcttttgagaatctattttttactagagtcttgaggaggctgctgtgaatcccctagatgatgatatcgcactgacttatgctggaccatgggccatccgtggcatcagcctgcccgtaagggtgccgtttgcgccaggcatggcttgattagcgacctttgctgctcgtcgcccgtacggaaacgccactagcctgtgctgaaactagcttttgcccccatgcgagctgctgtcaaccgg

SEQ ID NO: 49935 - DNA, 326 bp, Glycine max
  Clone ID: PAT_MRT3847_1609C.1
atgatttgtgggattcgcatagtcagttccctgcgtcagaacttgcgtagcggatgacactataaacgcgctccaatctatcgactgattggggaagagattaggagtcaaaaggggcctcttgcgtactcgggttaatcagcccaggtagatccctattcgttcggggggaactcggtacaacaatattccaactcataccaatgccatgagttgctgatggagcagaccccatcaatgattactcatgcatcataacactcactaccatgggcaatctagtgcttacacaaaatggatttattggagaggacaccatcaactct

SEQ ID NO: 49936 - DNA, 371 bp, Glycine max
  Clone ID: PAT_MRT3847_160C.1
ttatttatacccgcccaaggctcgatcacagggggaggtgaaaggggcagaacatcagacccgcccagagccgcgggagatgacaaagaacaaacactttcccgaaacaaagccaacggaagaccgaactgaaaagggccgaccaccaaatacacaaccacaggaaaagacaccaacacaggccgagagccgcgaagagaccaacagcagcaaaccggaaaggaaggaaaaccagccagagtaagggccggagacggagagcacaggaagcccaagcaagcaagcggcctacaacgggccaccaagcgggccatcgagcgggccgacggggcctacgaacaaaagggacaacggaagaacaaaagcgcgag

SEQ ID NO: 49937 - DNA, 242 bp, Glycine max
  Clone ID: PAT_MRT3847_16100C.1
aaaaactactttggcgaaagaagttggtaagaaagctgaggagttaaaactttttgagaaggttgtcatggcaacagtctctcaaactccaaatattagaagcatccaattgcaaattgttgataacttgggtttgaaatttgggggacgatcagaggaatgcagagcacaaagactatcagagagattagggacaggtcacaactctactaatcttggatgatgtatgggagaacctagac

SEQ ID NO: 49938 - DNA, 319 bp, Glycine max
  unsure (1)..(319): unsure at all n locations
  Clone ID: PAT_MRT3847_16101C.1
ggaatttcgatgctcagtcatctcttttaccattctcttctctcttgctcttgcaggagagagccatgtccatgcatcgctacctgaggaagattattgggaagctgtttggccaaacactcccattcccactgcactgcgagagcttctaaagcctctctcgcngggggtttaaaaatcaatgaacttcctaagccattttgatgatacccccgtccccaaaacattcttcttttaaagaaagacccttctccccgcaaaacatggaaaaagtaccattacccaagcgcccctttgcccccctcgngggggttttacc

SEQ ID NO: 49939 - DNA, 435 bp, Glycine max
  Clone ID: PAT_MRT3847_16102C.1
acaaattacaactgaagatcaagatttccactacaaagttaattatactaccaatttctcactcaaaacttagggaaaatgattgagatacttctgaatttgcagctgttagctcctttcttccttttcttcatctttccagtgtttttcttcttctttctcacgtcctcatgtcctactaaaagaagcatcactatcccaaaaccatacccactgattggtcactacttagacctcaaaggcatcggcaaccgccgtatccagtggctatccgacatcgtcaaaatctcaccggctaccacgttcaccctccaccgccccttaggccgccgccaagtcatcaccggcaaccccgccaccgttgcgcacattctcaagacccgtttctccaactaccaaaagggctacaccttcattcacaccctctccgatttc

SEQ ID NO: 49940 - DNA, 144 bp, Glycine max
  Clone ID: PAT_MRT3847_16103C.1
atttttggacaaggcatttatcaatactgcaatgagtattgacactgaatttataatactttctaataatcctctccctatcgttctttttaccgtgtgtatcatcctctagaaaacaacaattcaaagaagcgcctcaattct

SEQ ID NO: 49941 - DNA, 334 bp, Glycine max
  Clone ID: PAT_MRT3847_16104C.1
aaaccaaaactaaattttttttttatttaattaataccaaaacctgggggggttcactttctgatataccggattttgattcccttgacaaaaaagggtacaaaaaaaaattccttttgggccctccgaatctttccacctataaatagtttcccgccccctaataaaaaacccggccaaaccctggttcctccaaaaaattaaccccaaaaaccaaaccaaaaccctttttttaattgggaaattccttaggggccccccaacatttggggcctccaagttaggatttttatacctataccctaaaaaatgggggggggaccctgagcccaat

SEQ ID NO: 49942 - DNA, 343 bp, Glycine max
  Clone ID: PAT_MRT3847_16105C.1
ggggaaaaaaaaccttatttattggagtctggtggggggggccctcaaaggggtcttgaacattttttgtaattaccggaccctcaaatctcaatggtaaaaggggggataaataattgaataaaccggccaataattttatctggaatggcaaaccctggccgaatcacccctggactgggaacagttacttttccttggcctacaggggcttcccaaactggaacaatttaaccacccgtttttttttttttgggacaattaaccccatgccgcttttttaccggcccaattttgatattctacccactggaagccctctaagggctcgggagggaaaccc

SEQ ID NO: 49943 - DNA, 481 bp, Glycine max
  Clone ID: PAT_MRT3847_16106C.1
tctcgagcggctcgagcggctcgagcggctcgagacggctgcgagtagacgacagaaggggaaggaagtctattaatgagataaacttctgtatgaaaagcatgatcccagtaagaaagaggcatggaagcctgtgacaaaagagtcaaacccatttcaacaatgtgcttgtgttttctttccactacaccattttgatggtgagtatgaggacagataagcctatgatgaatgcctatttgatcaagatattgagtaaaaggtctatactcaccccccaatcagtttgaatacttttcattttctggtttaactgtaattcaacaaggctcttaaactgtttgaacacagaaagagtttcagatttctgttttaaaaaatagatccaagtgtaacggctgtaagcatcaacaaatgagacataagaatttgaaacccatagaagaaagcataggtgcaggttcccatagatcacagaata

SEQ ID NO: 49944 - DNA, 1539 bp, Glycine max
  Clone ID: PAT_MRT3847_16107C.1
ccacgcgtcttcgcaaatccgaattttctttctctaaacttctctctctctctctccctacaaattcatttttctcgtttcttttccgagaaagttcattcgcattgcccatctgtgcttgcgtatctgttgatcccgctctgattctatccaattctcacacgcgtttatcccttgttctccaaatatgggctcagtttgaagttgatgtggtcaaagtcaaaatggattcacatgtaatatgataaagacatcacctagccaactgggttttctgaaggttgcaacatgttgatggacctttccctttttgtagatcacttctacaatgaaaagtggattattgatgatactaaatgcttcatgctacattttaactctaaccctcgtctgcaaactaagtgccaacaatttgttgacagttagccacctcttcatggaatctgttccagtctctctgaagtgttattggttatagtgttgtaattctaataatggaaagatataaaattttgagagagcttggggatggttcttgcggtcatgtatataaagcccgcgatatgagaacatatgagattgtcgctgtcaaaaggttgaaaagaaagttttatttctgggaagaatacacaaatttaagagaagttatggtccttcgtaaaatgaatcactcaaatatcataaagttgaaagagtcatgtagagaaaataatgaactatttttcatttttggatacatggagtctgatctatatggaagccactgagctgaaattgcaggattttggccctgatcctgatgattgttttcttggcttgactttaggtgtaaagcccagtgtttcaaacttagatgtggtccaaaatgtatctcagggtgtcagagaggttggtgtatggtgctgtaaatcctgcagcatgacatattccggttttttgttttgaaatcctaattcaacagctgttcacctctattttttgacttaatctacatgaatatgcagaatgttctattttgctcagatttcaatgatcattcagaccagtcagtattttggacattattatctcctgatcaaaatggagttcataactcagccgagacttcgttgtcattgtcattcagttcagtacaacatccgccaattggagttccagagtctgcgggattttcttttcagcctttgcagcctaacatcttaaccgcaccatttttggctctctcttctcccttccagcgcgagcactgcctttgaatcactcaacttttgaactgcaacagtatgatattattgaatcttcataatgcatataacactttttattcattttaattaatattttgtacagttgtctttatcattcaatagtttccccatgtagtgaaatattatgtaattattgagcaaattctataaggatacttgattccattccttaactgtaacattgaaatttcaaacctgtagggaacatgaaaaccggatgtcaaagaccttgtttgcttactatttggaaaaaaaaagtttctgtttctgc

SEQ ID NO: 49945 - DNA, 554 bp, Glycine max
  Clone ID: PAT_MRT3847_16108C.1
aatagcaaaagttgtactacatttttctaattagtactaatagtattatacagaactcttttcaaatctatataaaatctgttatttacagcctgcatatggctatacatcaaaatcaataatagaatattgagaaacaagacgttgcctcattcctcggttacacgcattcggattctcatcgctgaacatctgtggaggaggatggtgagggttcaagtataacgggggtggaggttgtgccattgccatgtaattatcattatacccatgctggtaagggtaattcacgtaattaccatcataaccttgattcgaatacgaataccctgattgaacctctacctcatagctgatgttgctgctgctgctactactactactttcaccaggtgcgtatccaccgggaccgtgccagtacatatggggagctgggtacgcgtacccgtagtgctccattttgttcacctccaccttctgtgcaccttcagcaccaccaccagcaccaccttccttgttgatgaactctttattatcaccaccctcttttttgg

SEQ ID NO: 49946 - DNA, 439 bp, Glycine max
  Clone ID: PAT_MRT3847_16109C.1
tcggagattgttttcttggcttgactttatgcgtaaagcccagtgtttcaaacttagatgtggtccaaaatgtatctcagggtgtcagagagaatgttctattttgctcagatttcaatgatcattcagaccagtcagtattttggacattattatctcctgatcaaaatggagttcataactcagccgagacttcgttgtcattgtcattcagttcagtacaacatccgccaattggagttccagagtctgcgggattttcttttcagcctttgcagcctaacatcttaaccgcaccatttttggctctctcttctcccttccagcgcgagcactgcctttgaatcactcaacttttgaactgcaacaggaacatgaaaaccggatgtcaaagaccttgtttgcttactatttggaaaaaaaaagtttctgtttctac

SEQ ID NO: 49947 - DNA, 561 bp, Glycine max
  Clone ID: PAT_MRT3847_1610C.1
tgacatgaccacttaaacacattttagatgtaggggtcaaattgaattcagtatttctcatgaagatgtcaccactattcaagagtatttgcataacatagagggttcaatacctatgacatcattgcaatttgccagtttgaaggcttacgattcattattttttggttagttttattttttaatactattagtactgacaataggtttataaactaattcaattacaacccatacctgaaaatttttatcgtcaaattgtatagcagatgcaatcatagaagatgtagtgtaacatgaatggtcttaaatcctgagattcctgaaattgtttcattaaaaaaacggtatagaaatgacttatctgttagcaaaatgcttattagtttaacatgtgatgttctttatatttggtgttggtcactctattttcataaggaaaaaaaattcgcttttttgtgcttgacaaagttgttaatctattggtagaaaagttccttacctttcaccgcaggaaacatgttggtgatttacatttaattggatgggttagtatgcaac

SEQ ID NO: 49948 - DNA, 1923 bp, Glycine max
  unsure (1)..(1923): unsure at all n locations
  Clone ID: PAT_MRT3847_16110C.1
accagctgttgcgatttgagcttctttttttacctcgacctctctcttccttgctgccagtgatttagtttttctccacacgatggtgaccaccttcagtcgttttgtccctgcgtccttgctaatctcctgatgctgctctgtttttagtaagtgcgattccacctttgtctcttaatctgcaaacaattcttcgttgtgagagtgagatggtcaaactgttcatcagtttgtgcatctttggattaacatatcgaatggctttctggatgttagaaacttgatcacattttgtttgactttttgcttattgtatctctccttatagtttcataattataattatggaaagatataaaattttgagagaacttggggatggttcttgctgtcatgtgtacaaagcccgtgatatgtgaacattagcagattgtcgcggtcaaaaggttgaaaagaaagttttgtttctgggaagaatacacaaatttaagagaagttatgattcttcgtataatgaatcacccaaatatcataaagtcgaaagaggttgttaaagaaaatattgaactatttttcatttttgaatacatggattgtaatctttatcaattaataaaggagagagaaaagcccttttcagaggaagagatacggtgctttatgaggcaagtgctacaaggacttagtcacatgcacaagaaaggattctttcatcgggatttaaaacctgagaatatgctggtaacaaatgatgttttgaaaattgctgattttggactggctagagaagtatcatcgatgcctccatatactcaatatgtttccacacggtggtatcgagctccagaagttttgttgcgagccccttgttatactcctgctgttgacatgtgggcagttggtgctatattagctgagctttttactttgacccctatatttcctggtgaaagtgaaatagatcaactgtacaaaatatacggcattcttggtatgccagattccactgctttcaccataggggaaaacaactctcagttattggacgtagttgctcatgaagttgttccgcctgtgaagctttctaatattattccgaatgctagtttggaagctatagacttgatcacacaactgttacattgggacccatcaagaaggccagatgcagatcagtcattgcaacatccatttttccatgtggatgcatgggttccttgtccgcccagtgatccacttgagctgaagctgagtagcaagagggcaaagccaaatcttgagctgaaactgcaggattttggccctgatcccgatgattgttttcttggcttgactttaggtgtaaagcctagtgtttcaaactcagatgtggtccaaaatgtatctcagggtgtcagagagaatgtgctattttgctcagatttcaatgatcattcagaccagtcagtattttggacattattatctcctgatcaaaatggaattcataactcagcagagacttcgttgtcattgtcattcagtccagttcaacatccgccaattggagttccacagtctgtgggattttcttttcagcctttgcagcctaacatcttaacctcaccatttttggctctctcttctcccttccagcgcggccactgcctttgaatcactctactttgaactgcagcactatgatattattgaatcttcataatgcatataacacttttatatttattttaattaatattttgtacagttctctctattatcatgaaatataatgtaattaccgagcaaattttataaggatacttggttccattccttaactgtaacattgagattcaaacctggtatttccagaactcaaatagagaacaagaaacccggatagatgtcaagcaaaannnccgtcccccccnnncannaaga

SEQ ID NO: 49949 - DNA, 409 bp, Glycine max
  Clone ID: PAT_MRT3847_16111C.1
ctcatatggctccttcgcaaatccgaattttctgtctctaaacttttctctctcctctctctctctctctctctccctacaaattcagttttctcgtttcttttccgcgaaagttcgctcacattgccgatctgtgcttgcgtatctgttgattccgctctgattctatccaattctcacacacgcttatcacttgttctccaatatatgggctcagtttgaagtcgatatactcaaagtcaaaatggatctctgtgtaatatgatcaagacatcgcccagccaactgggttttctgaaggttgcaacatgttgatggacctctccttttttgtagatctcttctacaatgaaaagtggattattgatgatactaaatgcttcatgctacattttaactctaacccacg

SEQ ID NO: 49950 - DNA, 310 bp, Glycine max
  Clone ID: PAT_MRT3847_16112C.1
agtggtcctaattcttttagctcactaacatgccataacaggagcattacttgtggtgttgacaaaacgcaaacaaccttgcaatttataaagttagcacatggagatacgttcaacataaactataagcatatatataatgtagagaaagaggctcctgaggacaaggcgagcttatagtcacaacctcactatggatagtgtaatgatctctaaacacaagaagcttatgttagcaatatcaccaatgtgttacatgtattggatcttcactgcccacaggaagatcaccaatctgaaatgaaagctc

SEQ ID NO: 49951 - DNA, 1605 bp, Glycine max
  Clone ID: PAT_MRT3847_16113C.1
ctactacatcactcactagccactactaccctctctcaaaaactccaaaaatcataatgccatatcatcgatatttatctccttagccatcagcatcccaagtgtccaaccttaaaatcttctatctctctcactaactcatactctgtttgctctgtttcagtgctttctctcccctgctatctctaaattgaacgtgttttctgctacttttgcgcgtgtgcattcctcttcccttcaaagctagcactttacccaccaccacaacaaccccttttgctcccacgtgcacagagtcaaacccaaagctctttttttctctccaaacccacaacaacaaaaacagagcttctctgttttctccattcccaaaacacaaaataaaataaaaaaggaatctttttcacgcataattctgctgaatttcggaacagaaaatgggtgctggtgagtactacaagatcctcaaggtgaaccgcaatgccacagatgaagaactcaagagggcatataagagattggccatgaagtggcacccagataagaaccatcaacaccaccatgttacgaaggaagaagctgaggcaaagttcaagcaggtttcggaggcttatgatgttctcagcgacccaaagaagcgtcagatctatgatttctatggccactatcccctcaactccatgaaggtgaatgaggagaatagtgatggggatgttaatagggtccccaaggggaagggggagaaaaatgtgggggtggttgagagcaaattggtgtgcacccttgaggagctttacaaagggtgcaagaagaagttgaagatctcaaggactgttcctcacgaattcgggaaaatgaagactgtggaagaggtcttgaaaattgacatcaaacctggttggaaaagaggcacaaaaataacatttcctggaaaaggcaaccaagaagcagaaagtaaaactcctgatgacctaatctttgtggtggatgaaaaaccacatgcttttttcaaaagggatggaaatgatttggttgtcacacagaaaatcttacttgtggaggctctagtgggaaagacactcaacttaaccaccttggatggaagagagctcacaattcaagtcacagaagtagtgaaaccaaaatatgtgctggtggtcccaaatgaaggaatgccaatttcaaaggaacctggcaagaaaggaaacttgagaatcaagtttgatgttttgttcccatcaaggcttacctcacaacagaagtatgagctgaaaaggattttgagcaacagtactgctgatgactaattctgtcttgtgtatgtcttattggcttctttgttttttctattaacacccttgagttaagagaggtcagtttacaatgtgtaaatatttaaatacaccttttagtcttagacatgaaaaatgtgcataacacaaataaaccaagcatgttactactatgtctgcagtgttgtggtgtagttttggaataaggcgatttcatctgcaaaaatggtcttggattgtgtttaatcagtattataatacattattgggtggaaatatttacagtcctaatatgtttattcagctttttttt

SEQ ID NO: 49952 - DNA, 414 bp, Glycine max
  Clone ID: PAT_MRT3847_16114C.1
ctgacgatgcacgcgcgcgtacgcaagcttcctttacgagcgggcggccttccttttttttttttttttttttttacaaattttttttttacttttttttttttagcgcaggcgaaatttcgttggggggttttattatcaattttcatttaaaatttttatgttgaggaaacaaaaaacatatacgcagcgtgagtaaaactgaagttaacacaccctgggcccaaaaaaagattgtaaaacaaacccccccctttgtatttttcaaaaaaaactgtactctattgtacggcaggcaaacaccaacaatctttattcaaaaaactttgtttgttaaagtcccccacccacccaagggaggggggcggatcaaagctcacccttaccttttttacccgtccggaaataatgcat

SEQ ID NO: 49953 - DNA, 132 bp, Glycine max
  Clone ID: PAT_MRT3847_16115C.1
atacgtacacacagacgtgtgcgtcattgggttgtttccagcgcaccggggcacgtggccggggcttcaaccgttactcgcaggaatacctgcatgaaacgcttggcctctaccgcctcccaagagcgcgtt

SEQ ID NO: 49954 - DNA, 271 bp, Glycine max
  Clone ID: PAT_MRT3847_16116C.1
tacggctgcgagaagacgacagaagggggaagcttgatgaaaaacgtgatcaaagctgtgaagaaactcaagttgtggtcctaaaagaaaaggaagaaaaagacccctggccatgagcatcctcctcactattgctgcagctggtattggtgctcatccatccaaccatcaggttcacccttaactttattctcatgccttgattttgaatacagcaactattggacattctttccaacccccgagaccgagcccgagcccgaaccgcaac

SEQ ID NO: 49955 - DNA, 264 bp, Glycine max
  Clone ID: PAT_MRT3847_16117C.1
gcggcgcccgcctttttttttttttttttttcccagcccaaatcttccccagagttctttttgctgccaccatggatttggattaaaaggaggttggttggacccccggtggtttaatccatcaaaccctcccctggaggggtgaaaacctcccaagttgggggaaccacccgcccctcaattttaaaggttatttaaaaaacccaattgcctttgacctttatttaatttctgccaatttccaaaggaaatttccttcaaatt

SEQ ID NO: 49956 - DNA, 417 bp, Glycine max
  Clone ID: PAT_MRT3847_16118C.1
accatgcgtctgtcgacgcgtgcgaataagacgacatgcgattggacgatttataccgtgcctaaagaggctaaatttgatacttatatcgattaatatattcactttccattgcataaactcgggacatacaccaacgtgcatatgaaagaggccatattggaagggcagcatactactctgcttgagtggcggcatcggtacaatgatcttggttggtttgattggaatagttattatctggcaaggatttcgttgaacatcaacatgtatgttgcagggaatatctcaagtcatgatgtcgagaactcagaagctccgcgatttaacgccgtgaaagcaggtatggatgactctaggtgggcacatttaatccagacactcttgggtgacaagcagactgcagaacttttgtag

SEQ ID NO: 49957 - DNA, 422 bp, Glycine max
  Clone ID: PAT_MRT3847_16119C.1
gtgaatcggaattggggtttcttcaatcggaatcgcgaacaacatggaagtgagaattgggcaaagggtgtctcgcggaatgctccctctcctcgctctccacaccgtctgcgattttatcatatgtctgtttctcaatcggaatcacgaacaacatggaagtgagaattgggcaaagggtttctcgcggaatgctccctatcctcgctctccacaccttcagcgagtattaccgctccgaccacaaacctccggtcaccgccgccctcatcgccgccaacaccctcatctacctccgcccctccttcctcgaccccctcattccccccatcgaacaagtctggttcaaccctcacctcatcctcaagaacaaggacttgaaacgcttcttgctgtcgccgttttaccatatcggagaaccg

SEQ ID NO: 49958 - DNA, 477 bp, Glycine max
  Clone ID: PAT_MRT3847_1611C.1
caaatccaattaatctctatagctcatagcaaattcagagcaacaacaattcagaaaatagccaaaaaatcaaccaaagaacatcgttgacgttaatggctcaaagggtttagagaagcctctgtggtatgcgaagacataaacgtacgccgagatgatttttccacagtgattgtgaatgacattcacggcgagatcaaggtgggagaggaaggtgtgaagggagggattgcggtcgccgctagcaacccagtcgggggtggagttgaagaaggcttgtctaggtaacccatagtcattgaagaactactcgatgacggtgacctccccgtcaacgtaatcaaaggtggcggcggaagagccggaaacgagagagttgtgttcgcaatggactttcttctggtagtcttgctcagcggcggaggtgaatttgaaggcggtgccaaaggtgtttcagatctgaaagtaaagatcgat

SEQ ID NO: 49959 - DNA, 644 bp, Glycine max
  Clone ID: PAT_MRT3847_16120C.1
cgaaacaaaacgaaaatgtcatcatcaaccacaagcagcagcagcagcaacaacaacatgagcgacgtcgatcgtttgttcgcatcttttaagtgcggtttaacacctccaaaatctgctacgagggaaagaaaacgaagcaagaggagactggagcaggtgagttcaaaccacgagactccatcggaatctccgggtcccacctgagtgggagaggaactgagaacccccttatcacgcatcagaaaaaccaacattgaatcttctattgagaaacttaaatcagcagtaaccagagcacaaagcattggttgtgggaaacagttctctccaattgtattttatggatctccctgtggcatccctcccaaaaagccaacccgtatgttatggcgaatgttacgtgagatatgccccaatgtctctcagcaaaatatattgagcataaggaaggaagtttggatgacattcccaaggcaggatgaagcaatgaagtttgccaaaggacaagaagatgttcatgttttcagctatcaagaccactttaatggccaaagaaagttccttgtgtctacatatacagaattctggcgaaggtacaataatatgaatcccaaatttcgtcatcattatgaagtcattca

SEQ ID NO: 49960 - DNA, 475 bp, Glycine max
  Clone ID: PAT_MRT3847_16121C.1
tactgggaagaccattgtgcctgagataagtaactatgccaatgtcatcatcatggccctcttcatctatatagctctaactggcatcctgcataagcagactggaggtgtcgacatacatgactgttgcatgaacgagcatgtcatcatcattggtagcccctacaaacatctctacgatatcaccaatggtcagctcaacccctttgcgcgagtcaacacagaacgtccacacacatacactgcactcaatgatcgagagacatcttacctctccatctgacgatggacatccttgttgagccctgccttgaccctactagttataaacatcgtcggagtgattgtcgctgtctctgatgctctagacaatggatatgatgcatggagtcctctagccggaaggctcattgttccactttgggtcatcgtacacgtgtaccctcctctgaatggtgtcattgagaaacatgac

SEQ ID NO: 49961 - DNA, 381 bp, Glycine max
  Clone ID: PAT_MRT3847_16122C.1
gaaaatctccaacacccactccctttttctgtctctatacaccacacaagcgccggagatcatgaattgtgatgccgccgatttcttcttacacacaagcctaactccatactcactactactccttttgttattacttcacctccgcattctttctcacacacatcacacacacactctgattaaaaacatttaccatttctccgacccaaatgtcctgcaatctgcgatcactctccatgtacaaacccacttcccaaattcaccaagtgcgctgactgtggcacttgcaaccatctcctacacattcttcttataacacaaccttcttattctaacacacacacaccctcttcaatttgagaccgacccataatgcta

SEQ ID NO: 49962 - DNA, 319 bp, Glycine max
  unsure (1)..(319): unsure at all n locations
  Clone ID: PAT_MRT3847_16123C.1
cccacgcgtccgcaaggatggattaatgtatttgctaatgttcttacagaatntaaagaggtttgactcataccttatttgttcatctataacacattgatctatgcattttatattttattttttatttcttttttttattatttcttattttatataataatttttattctttttatctttcttattttattattcctattttttatatcttttataatttattttcttataatttatttcttttctttcttattatttattttttttttattattttctatattatttttaatctatttattttatatattttttc

SEQ ID NO: 49963 - DNA, 193 bp, Glycine max
  Clone ID: PAT_MRT3847_16124C.1
cccacgcgtgcggacggctgcgagaagacgacagttggggatccctgcaaatccaccacacttatcatagagatagggaaataatagggcgctgaagattctgaactttagacatcatagggatcaatcagatccagagtatcactcaagagaaggagcaaatgagatgagggaaggtccgctatgaggacat

SEQ ID NO: 49964 - DNA, 189 bp, Glycine max
  Clone ID: PAT_MRT3847_16125C.1
gggccgagatttaggctctcttacttcccatacgctctgatgctactgtgctgcggcggcttgacgactgcttggttttccgctcttgtccaccattgactctgcagcatttccataggagccgcctgcttcgactttatgaggataatacaatctattgaacttcatctataggatcatgaacttgac

SEQ ID NO: 49965 - DNA, 1053 bp, Glycine max
  Clone ID: PAT_MRT3847_16126C.1
tacggctgcgagaagacgacagaagggggcccttctagctttttcccagtccaagcagcctccaattcgtgccactctcttcaaaatggccgttaccttctcaaatctccacacagaatcaggtctcaagtccctcgacgacttcctctctgggaaggtctacgtttctggggatcagttcacaaaggacgacatcaaagtgtatggtgctgttttggagaagccaggtgactcttttcccaatgctgccaagtggtacgaggttgtctcatctcagcttgctgcaagcttccccggcaatgctcaaggggtgagattcagtggcaaagcttctgctccagcggaggctgctcctgcgaaaccggatgcttctgctgctgaagatgatgatgaccttgatctctttggcgatgagactgaggaagacaaaaaggcagcagaggaaagggaggctgctaagaagtctaccaagaagaaagagagtggcaaatcttctgttctgcttgacgttaagccttgggatgatgaaacagacatgaagaagctggaagaggctgttcgcagtgttgagatgcctggtctattgtggggagcatccaaactggttcctgttggttatgggatcaagaagttgcagatcatgttaactattgtcgatgaccttgtatctgtggacacccttgttgaggagactctcacagttgagcccatcaatgagtatgtccaaagctgtgacattgttgcattcaacaaaatctaagttttcatgttgaatttcagtcattttgaagcagccaattagtttgtttttctttctcatccacttccttctaacttattcatgtctagtttatgtttcagtgatggttttgttactagaattctgagaagtaaaaaatatatattttgaatatttatgttcttgtgttccatcaatgtgttgttagattctaatataaaataggtgtcctactcctttccactattacaataaaaattaattattcgaattgagatcggatcgggttcaatttaaaagctggttcaagaagg

SEQ ID NO: 49966 - DNA, 442 bp, Glycine max
  Clone ID: PAT_MRT3847_16127C.1
tcctctagagcggccgcccttgcttgtttttttctttttaccatgcatataagaatatgcttcttcttcttatacaagcccggaaaaagggcattgctgtaaccttcttacaaacagatctatgatgcagtaatgacagcctggtaatacctacgatagcgagtgctacaatacttacacgcggggagaccgagcggcatgctcagaaccagagcgctcttacatcatattcaggacctggatgcatgtgaaccaagcagagtatcataattgcggactttacggcaacgacgcagacttgctgtgtaccataccatacgcctgggatagatgttctgagggaggcgtacttgtacagagtctgaaactctcttgaacacgcccgaagaaaatgtatatcgctagatggccctgtatatgataccctatggggcggactacg

SEQ ID NO: 49967 - DNA, 381 bp, Glycine max
  Clone ID: PAT_MRT3847_16128C.1
acacactaccaatggttaaagatatttaatttactgttaacactactaatccagttttctggggagggtttaaactgctttttacatgcttttacttccccttttagggatggtggcctttgttggggactaaaacaaagactttgccataacatggggggatggccgttccaagatcctaaaccatggagggttactaactttttaattggccaaagcatttggttaaggtttccaatcaaagaaggagtttctttttgggaggatggacatgcatttaaggcttgtccctggaaactttgctggcaccgtaattgcctattattattcttcaaagggttcaacttgtggtgaattaaacttttgaattttttggaaatt

SEQ ID NO: 49968 - DNA, 343 bp, Glycine max
  Clone ID: PAT_MRT3847_16129C.1
gtgggcatacagcaccaatagtatcgtatgcatgggaagcaccagatttattgtcgagattatatataggctcatcgtggatgatggtaaccaggtgactatcttcacaagaagtatagcgcatgtctgcttacagtatgcaggtgaatcagacagatgatcatgctagatgagacttgcaaatcttgcctttgatggaaacaaggttgactatgactaggtgctctccagcctctcggctgatggatgtgatgcaatgtatcacataactgtacgtaacgcatatgaagatgagcggactctggatgcgctgccgatcttggaacagtttgtctactgctcc

SEQ ID NO: 49969 - DNA, 376 bp, Glycine max
  Clone ID: PAT_MRT3847_1612C.1
agatatagataaactgggtggcccccacaatcatacacccttgcttgtccatcatccaaaattgccactaaaaactgcttaatctctattaccgtcaacgtaatgattaaaactaacctcctttaaaagttgcacgatccatatttctcacggtaaatttactggattccccctagcaccacctatttttccctatgtgacttagcttcatatcttaagcacgcatcccatgatttccgctttgcatgcgctttaacacgagtacaccctaccataaacaaactcatctacacacctgtgcattaaattcttagatttttcctgaaggtctatgcttatttcactataatatttttctacctgtttttgcaccaca

SEQ ID NO: 49970 - DNA, 501 bp, Glycine max
  Clone ID: PAT_MRT3847_16130C.1
gcttaggttgaatcttcaattcttaaaactcctcagtgttcttgagaccatgagaccatggtggtatctatgggctttgggctgcgagcctgcaattttgatacctcagacaaagcataaaataaactaggattgggaaacgaaaacatcataaaacctaagcactatttatgcgggatatttgtctagtactccttaagcttgggctcgaaatcacaagcatccaatggatcctccacagccacaagtgtgagactatcctgcaggtccacgtaaataacacacagccagacatttatcgtaaggcccctcatctctcactcgctgtccattatataaacttaaccacatggataatcctatatgtatatatcatttaatttgtatatttagcttagccaagctatctatccatgccgcagccgcacccagaagcttaagcacatcaacccacaaactcaacttgctcgacgccaccgatgctccccagtttgttggagg

SEQ ID NO: 49971 - DNA, 387 bp, Glycine max
  Clone ID: PAT_MRT3847_16131C.1
gccgctggaagtcaggatcgaactataactgtttggactactgcaagtcctcgtcctctatttgtggctaagcatttttgtactcaaagtgttgtggatttgtcctggagccctgatggatattcactttttgcatgttccttggatggatctgtggctacatttcattttgaggtaaaagaacttggtcagagattacgtgatgctgagctagatgagttgaagagaagtcgttatggagatgtgaaaggtcgtaaagcaaacttggctgaaagtccagcacaattactgctagaagctgcttctgccaagcaaacacctagcaaaaaagtggtttctgatgttcaacaaaaccaatctaaggcaaacgcttatgttgatgtggca

SEQ ID NO: 49972 - DNA, 109 bp, Glycine max
  Clone ID: PAT_MRT3847_16132C.1
tcactaagaatatgtgcctcttctttaccttgttcctgttacaacatgcgcccgctcaagaggatctaatcttacgtactcctgcatgcgatgtcatacctcttctata

SEQ ID NO: 49973 - DNA, 2929 bp, Glycine max
  Clone ID: PAT_MRT3847_16133C.1
tctcgcttaagaaacaagacatgtggaaattcaatgaacctacaaaacaaactgatttttcacctgagcggacagcaacaaaatctgaattcccttcaattcagagcttttcctcagagatggcagaaggaaaaccagaaatacaaagtagctcagttcccgggtctggttattttgactacacaagtgcatctcagtctgtaagagaacaaaagagaacagaagatgggttcaactggagaaaatatggacagaaacaagtgaaagggagtgaaaatcctcgtagttattacaagtgcacacatccaaattgctcagtgaagaagaaagcggaaaacttttccactggacatatcactgaaatagtatataagggccaacatagccacccaaaaccgcagtctactagaagaacaaactctcaatcaattcatcaaccttcttcgtcttgcacaaactcagggataactgatcattcagtggtgactctaggaaatccacaaatggatcatttctccatacaagaagattcttcagcttctgttggagaggaagagtttgagcaaacaccgcaaaccagttattccggaggagacggagataatcttggacctgatgccaaaagatggaagggagataacgaaaacgatggctattcagtctcagcaagcagatctgttagagagcctagagttgttgttgaaaccacaagcgaaattgatatacttgatgatggctttaggtggaggaaatatggacagaaagtagtcaaaggaaactcaaatgcaaggagctattacaaatgcaccgcccctggttgttcagtgagaaaacacgttgagcgagccgcacatgacatcaaagctgtgatcacaacttatgaagggaagcacaaccatgatgtgcctgctgcacgtggtagcggaaaatataactcgaacagaaattctcagaacagcaacatatcagcgcctataagaccctcggcagtgaattgttattctaactcatcaagtttcacaaattctctctataataatactaggcttccagcaactggaaatcaagaatcattttcactggacaagttcaagaatcctggaagttttggctattcagatcttaacagaccaatgggttcacataccaatcatgcacaatacacagatgctgcatactcaagggccaaggatgagaggaaggatgattcattccttcagtcatttctctcaaaggacttctaaatttggagtggaccacaactttacatattatcctggatatgtttttgtatagcatgtaggattttagttattcacagcagaatatagacaaaaaaattgcaaatgtttacttatttacctcttttagattagtgactggcactacagccatagtgacagaaaattgctgctatacctgtctgccaagttcttgtccaaattgaaacttcaactttatcataggattgactgatgaattctgttattcttttgttgtatttgtagggaaaaaaggttcttctggaagaatcttacgatatttcattaatcagtagcaagtgtgcttgtgttggctatttctactatgctctttctaattttagtttttatcaaatgatttgtgatgaatatcaggaggtccaggacttccataatttgtaccaatatcaacaccgggatttgataaattttcaattcatagtccttgatgtgaatcatacatagtccttaatgcaatttttgttgataacgatatgttaactgacatctgatttaattagaaaagaaaacacaattcaggaaaatttccacgcctgaaaaatttgtgataaactgtgtctaaaggttgaaagttgaaccctctaggattttaacaagtcaaaattctttttggatgtacattaagtagtcagattgcaaagaaacaaaaaatgaaattcagtttctagtcttctgtcttccattgcttgcgtctcacagtcagattcaaataatgcattcaccacatcatctttttttggtcacattggtcaataaacagtctcaagtacaagaaacatgattaaacattacatgtattcgtatatgaaatcaatatcaaatctcactgtatacatatgcaccgagccagagaggtgaggcctgactccttttctcattaatatacagaaaaaaagtgatttgtatagaagtatgaaactgtagtaggagagttttgcaaagttaagacttcatatataaggttgagttgataatttgtagcctgaaatgagggcagatactgctagacacaagaaggcaaaaattgacatgctaatggctgcagctgaagagtctgtgaatatattgtctgccccttctctcattctatttgtcattggaattgctgaagatgctgatgatatcaaaagatatgcaatgatctgatctccaaaaaagtcaatcatagctgccattcttggctgaagcaattgttttgcagtggagagttcctgaatttgacggaacgcttgggctccagtgtacaaactagacaaaatcgctatagccagcaaatacctgtcatcctccaaaaaccacggctcgagctcgagccgatgcttattgctggccatgataaagaacgaaatcagagagaaaagcagagcgacccctctcagtcccaacgaccctctcttgatcaagtcctccctcttccaccgccgcaggattccgccgattccgccgtggctcgccggcgcgaggtggccctcactcggcgcagaaggcgccaccggcggagtctcaacgtgtatcttcggcgaatcactaccgttgagatttgacatcttattatggtttcggattcagatttggatgaattgaagtaaaagaaaaaattgaatgagaagaagacaccttttggttttctgtctgttggttttttc

SEQ ID NO: 49974 - DNA, 154 bp, Glycine max
  Clone ID: PAT_MRT3847_16134C.1
tggtcacacatccgactcttattaaacctaatgccgcttttaaaatagacggggggttttttaaacaaaatgccagatacggggctcttgcactggggaccgcgtctagaacatacaacattcacggtactgagcacaccggttcctttcgcac

SEQ ID NO: 49975 - DNA, 571 bp, Glycine max
  Clone ID: PAT_MRT3847_16135C.1
atgccaatgaagatgtgtcacttggtgcatggttcataggtctggaagttgaacatatagatgaccgcagtatgtgctgtgggactcctccagattgtgagtggaaggcacaagcaggtaacatatgtgttgcatcctttgactggagctgtagtggaatctgcaagtcggtagagaagatcaaatatgtgcactcaaagtgtggtgaaggggatggagctgtttggagtgccttagtttaggtttgatgggttcaacagaaagccaactaactaattcacgtgttggtatgcatacctcccagctttttgtttttgggtgtgggaggatatgatgatatatttttggttcaactatagtctatacttggtattatgtgacatagacctctcttgttacatgtatctctttatatttttgttcctttgacccacccttttgcacaatgcctttggaggtagttgtgcggggtcaattttcagtgtagcttactaaagagcaatgaagtgatagtgttgttgattcgttcagtgataatatgaattatgaaatcactttatttttttcgatg

SEQ ID NO: 49976 - DNA, 533 bp, Glycine max
  Clone ID: PAT_MRT3847_16136C.1
ctcagaacacaagttcagctccatcatctgcattggcctcaaaatgggaatcaatgatgcatggatttaaaagtttgagatctaacattgactccaagggattcctccctctttctaatgctcaagggtcaactctaaactcaaaatcttcatctgaatcccttgatgacatatttgagagattgaaacgtcctccttcagaatatagagattctggtgactgatatggtcatgaagtggactttaaggaaatgtcatttgcaagataaattgtatatatgttcttttatagggagaattaataagcaagtttccacatctgaaagaagtttgctctgaggatagatttttgttgaactacatgaacagatcttatattgagatgatcatcaagagacatttggtatttgtaggttctgcaaaacaaaaatgcgtagaatgtggagacatagtttgaagaaatgctataggaatactcatagcatgtgtaatagtaactctatttaagcagtcattctgcttgtaaattttgt

SEQ ID NO: 49977 - DNA, 391 bp, Glycine max
  Clone ID: PAT_MRT3847_16137C.1
atggccaagttcgccaccaaacgttaaaagaaaaaggaccatctttagacggaaagcatagtttatccattactaagcttgcagatacatatgaaactatcgaaacaaaaaaggacttttgttgccacaacaacgcaggtggtcagaactttttaacttctacactaaaacaaattgcagaagcgaaattttgacgaaccatgaatcagttctaccataagagggcccttccggattgttaatgaaagaccgctttcaaggttctgtagggggtagactggatgtggcatcctttatgcctggaactccaaggtccaccatattggggactgtccccggggtgaagcaaacaatttgggctaccttaattacccctgttaggggggggatt

SEQ ID NO: 49978 - DNA, 244 bp, Glycine max
  unsure (1)..(244): unsure at all n locations
  Clone ID: PAT_MRT3847_16138C.1
ttcctttttggcnncaagcaacccatacanggacggggtgcgcagaaagcaacgaacccgcaccccaannccagagnnacaagaaacaaggcggccccccagaggagcagcaagcaggacacagggagacaccacaacagggcacgcacacggcagggccaaagaggcagaaacgggaaccnccaaggggagccccacaggagcaaggaccggaaccgcgaccgaggccacaaaagcagggggg

SEQ ID NO: 49979 - DNA, 444 bp, Glycine max
  Clone ID: PAT_MRT3847_16139C.1
cccacgcgtccgtccacacgtacgaccacgcgtccgaaaacaaagacaaaaagattgaggagaaaaaaactaagtttatgaaaagaaaaaaggaaaggaaagaaaaaacattatacagaagaaaaaatagatcaaactgagaaaaaagaagaagaaagaaatgagaaatagaagagaaagaaaaaataaagaatatgttgaggaaactgagtagcatctcatggatggctgaaactggtacagctggagtagaatgtgttaaagatgcatcaacttcactcctggaggagacagcttgtggttcttttggaagaacattctgtaagtgttgggcatgcaatcctagtcatagagccctattgatgactgtagtgaggtctgtggtgcctatgttgtgtcatttggccaatgtgccaatgggtatgcagctgttgcttccctact

SEQ ID NO: 49980 - DNA, 337 bp, Glycine max
  unsure (1)..(337): unsure at all n locations
  Clone ID: PAT_MRT3847_1613C.1
gctaggatcctctatatcagaccgcttcnnnttttttttttttttttttttttttggaaactaaatatccaaacaaaataatccaacaataagttcttattttcaacaccaaattatttctcatttaaaaatccaaaattttacaatcctcagactctctccaacaaaaaaaatcctaaaaaaaataccaaatactcaattccttctaaagcaaatccaaaactcattttttcaaaaatacatgtcttctattttatacccaaattaatcttccctcaaaaatttaacttatattctccataaacatactaaaaaataaaaaactttcttaagattt

SEQ ID NO: 49981 - DNA, 425 bp, Glycine max
  unsure (1)..(425): unsure at all n locations
  Clone ID: PAT_MRT3847_16140C.1
gacatttgcaactgaaaaggggacagatgattatatgcaatgatattaccaatgggattacattaagttatagtttttggcaagtaaatatagaagttaaatcagttaatatggtccatattccttaaaacaacaaaaaagaacatatattttgacgtactggttggatgagtttgcaatggtttggcttaaaatatggtttgtctatctgaggtgtctttattaataatggagggtaggtcactgttaaagatgtaaaccattggttgcatgtgtctgtatatgcaagtatgtctatatatttactatatttttgtacagattatactaacaaattagttgtctgaacatccaacattttcttttcatgcagctatgggacttggataatattctacaaggctcangaaacacacaaagtaatg

SEQ ID NO: 49982 - DNA, 501 bp, Glycine max
  Clone ID: PAT_MRT3847_16141C.1
cgaggttcattgttttattctcttaaatcacagaatctctagtttttgttcagttcattgttttattctcttaaatcacagaatctctagtttttgttcaaatttgactttaactttctaaagggtgtttctgtgtgtgtttgtttgttttcatcttccttcatgataattgtttgtgagaaatgggaattctgttttcagcatgtgtgtttagttggcaagaaaacatgagaaaagcaattttgatttttgaattttccgttttagtaatgttaaagggtagtcaatagtcatcactttgttttctatacaacatagaatttaatgttagctataaataatcaaattctctgctcaagaacacagaacttgataaagctctagtctttttgggattttgagtgaagggtaaagtctttaaattcatttcattttacttagattcattttcacagcatgcaatttagactgaacttcattacccttttccagctttgcaat

SEQ ID NO: 49983 - DNA, 233 bp, Glycine max
  Clone ID: PAT_MRT3847_16142C.1
attggcccgcttgtttaactcgggggcccttataaaaagaaacttcccctgagtttgctattaagaaaaacgactatttaggcggtaccatcctttccaaccatacgaacgaagacagcgaaggagctccgctgcgagatttaaaacttgtttccgttcttgcatggttccactcctgtagagtgatcatatagcgaattttgtgttaacgaatcaattcgcagagtatggaa

SEQ ID NO: 49984 - DNA, 333 bp, Glycine max
  Clone ID: PAT_MRT3847_16143C.1
gtaagatgattaattcaatgtcatgacacattctcatgttaggaaaatttggacatcatctggacatcaaagagaatctgacatcatcgactacagacatacccttcacttgttgaaagaatagctgagagacaatacttattatggtggagacagtctaagtttcgtcgatatagcacttgtgccaatccacacttggttcaacacccattaaacttttggtaacctcaacaaacacagtgagtgccacaactctattgcatgggctaacatgcgccatcacaccaattgcgttgccaattcccttcctgattagcaggaggtttattagtt

SEQ ID NO: 49985 - DNA, 516 bp, Glycine max
  unsure (1)..(516): unsure at all n locations
  Clone ID: PAT_MRT3847_16144C.1
ccacgcgtccggtacttatcgtagtgactaagagattaactcctaggcgaatgcaggattggtaatgaacatatgaggtcgagcattcattttagttctcttaaaggatcttttttcctaaactatagttttgtttaccatgcccttgctcgtaagtagagaggaaggaattcttgaaatggaggagtgatacaggatggggaacagaggcattatcagtgaaaattatatttgggatatattgcataattattcaattgattgtccttatcaagcaatataaaaatactagccttgaagcttatattgatcaggtccaattgtgatacgttgaaggagcatgctgaaggtgaaagggtggnagttgataagctgaggcatggatgcgatagaatacgtacatccatgatgacgaaatgagaagaacacacacgaattgagttgtctaatggagtatnaatgttngagagcacaccttttgagattgggtacttagggacttcgtgccacactatt

SEQ ID NO: 49986 - DNA, 326 bp, Glycine max
  Clone ID: PAT_MRT3847_16145C.1
gcacaacggacgaaaatgtcacctttggtgattgatatttgctagaagcacaagacggcttacaggagtttgacatttgtttaacccaatctttggactataaagaccatcaggactgttgctctttaggccagaaatctaactgaccctgcttttcagaatttgttgtgggatgatattaacactcatggatgattttagggaaaagattgaggatcatgaatctagtttgtctctgttttttcccacactattgacaagctgttaatctacatgttagttgataatttgttacatgtgacattgcttaattgggcatggaagat

SEQ ID NO: 49987 - DNA, 476 bp, Glycine max
  Clone ID: PAT_MRT3847_16146C.1
ggccggccttttttttcgtttttatccgttgtttaccgaaaaagacttgctagccagcatattctgggacgtaggtgaagcgtggccttgcatgtaatagagcttggtacgtgtttccttacttgctttgctcttaaaactatacattgtttacaggagcaccttgggttaggagctccctagaaagttaaaccttggggacaattaccttctgcgcacggcctatgaggaggtggttttaatggtgaattaccggaggagcccccccccaaatgatgattattcgcgccggttggggatctaccctcagaacatggaaagattgggggacctttacgcgctggaccccaccgtggttcaccgttttcttgcttcctacgagcgggcctgggacaactccgatgagctctacactgaaattagtggcggctccccttcatagagtactgtcttttactgaattgccccgactttgg

SEQ ID NO: 49988 - DNA, 386 bp, Glycine max
  Clone ID: PAT_MRT3847_16147C.1
gctcgagctgctggagaattctaaagaaactactccatgaaaatgtgatcaagctgaaggaaatggggactgatgcacgtactgatagagatgaacacgggaagccagatggggcaaagtatatggatcacgttcatcaggaataagcgtacatggaccacgattcaacaggtgtagctgacacacctggaatgagatgtacagttatacagattaagtgctacatgacacagataggagctgagttctgcttatgaacatgctgatcagggctttaatgcagatatctacacgctgaaactgtggttatttacaatgtctgatgctcacaagctagctattttggaactcggatgcccatgatctgatgaccaacacgcacattt

SEQ ID NO: 49989 - DNA, 627 bp, Glycine max
  Clone ID: PAT_MRT3847_16148C.1
aaagcaaactaacacaattcttcaaactaaaaattggtataaaattcaaaagagaaaacaaaaaaagctgcttaattaattagtaacatgcaattaatatacttatagcaaaaacaaaaacagaaaatggatcggaccgagacgcttgattccccaagagtgtgagtagttgggatcctcgtagcaaaagagccaagacccttctcacaactcaatatatataagttgctgaagctagctagctagatgcgaacttagggtttttctcatgcgcatgagcgaagcagcagcagcagcaactttggatcttccttggttgtgttcgtcgtcttcttcttgggcttgtgctgtgtggtgcttgtgatggtgaaggtgatgatcatcatcggcagcatcaggagcaaaaggttgggggatgatgatgtttgtgataaaggaataaggagtgggagccttgagggggtaatgatgatgatggttatggacgatcagagagaagggcaaggagggtgagggcatgatgattgctgttgggtgaggcgcgttgaaagtgttgaagaaaaatccaaggtagttcgtgccatccctctgagaaagagaaagagactacttgatagctcctcgtgc

SEQ ID NO: 49990 - DNA, 1020 bp, Glycine max
  Clone ID: PAT_MRT3847_16149C.1
ctcgagccgaaaaaatgaaagaccttaaaaaatacagagaaatgtgggagcatcaaaacgttggtttctacgatggcttcagggagcacaagaaaaaagaggacttcaaggcaaatgtgacaaggctagagttggcaagtgtgtgggacgagatcatggaaaagctaagaagttaccaactcccagatgagtttgaaggcaacaaagaatgggtagatcttggatcaaggtttcgacaactaatggagcctctagatattgccaattattaccgtcatgcaaggcattacgaggatggttcttcttcttacatgcttaggggaaggcctaaacgatataggtacacccaaaaatggttggaacatgctgagagaaggccacaggaacctagctccacatcttgtttctgggctgaggtggaggatcttcgctacaaaaccagttatagtaatagctcatcatttgaagatgttaaggaaagggttgagcaattggaggctcaattacaagcatggagcgaaaagggggagttggctaatgatgtcttcttggagggttctaccttggtcaagtggtggaaaactctacctctacaacacaagcaacaatcatgcattagaaatctaataaatgagtgacagatcaagacaaacatgcattaggctgtgtttttttttttttttttcacattcaatcatgtcgaacatcaaagctctctcacaaaaactacgttcaacatacttcggaatgtgtgatatgtgtaaaacaaacacacacttaaatgtcttcttggagggttctaccttggtgaagtgtgttggctgagtgaacttttcttatttctcttatttattgtattttattttcatgcttctttctattgtgtgttatgtaataaacatgtagtttcttctacgttctctatctatctgaaaacaaatgggtattgaatatgtactatcgatgacaggtgaacgaaatggctttgtaattattattgtatagttctgttttggtttc

SEQ ID NO: 49991 - DNA, 438 bp, Glycine max
  Clone ID: PAT_MRT3847_1614C.1
gcgatccttgcttttgggctgtcgaagaagctgacttatctattgtattgaattcaaaaataccagatgcttacttgtaggaagggtcctggaagcatgaagctcgacgaagatgacactgttatggctgatctcaaagagggagcatcactgatttcagacaactcatggacagctgcttcgatcgaagaatgtgataagctcatcgccgaagaatattataccatacctattatagaggaaaagaccataccacacgatgctactataaaagatgtccaggggcaagatgatcttactaaaatagcgacggtggctgagactatacctaaagccacgcatagagtactaccccagacgcgcgcaccatgttgtgaccatatctgcagaaagaatcccagacgagagccttaactgtgactggagtgaacaaatact

SEQ ID NO: 49992 - DNA, 240 bp, Glycine max
  Clone ID: PAT_MRT3847_16150C.1
ccgagacacaattggggcctaacaaaatttttaagcccttaatttgtctgttgccagggaagttttaaaagggcaactttttggaccaaaatccttaaaaataacggggtttgcaaacaagaaaaacacctttttttcctttaaaaaactagctcatggggttttacgccagcctttaaagaaaacctagccccccgatttgtgtttaaatttggaacactccccggggcgtttttaaat

SEQ ID NO: 49993 - DNA, 606 bp, Glycine max
  Clone ID: PAT_MRT3847_16151C.1
tttttattgcattttaggcaagaattgttgcaagctcgtgaaaagcccaaggaggagcaagtaatggcattgaagcactctatgcaaactggaatggcacaggcaatgaaagagcaaactcaacttagggaggagatggcttaccagtacaagcttggaaactttgaggctgctgctgctatccagagaaggttggatcccgatgctgccatatagttggacatacttactgtaaattgaagtgttgggtgatagggtaacaattttcccatccccatgacagggtaatgatggtcccgtccccatgacgattaattttatgtcaactatgtgtctttcggcttagtgttagcatgctgtggatgggttattttttgatggatgagtaaattttggctcttctgttacgtctaccattgctaattgaagaatgtttctttttcccatgatggagattttggcattgtagttgactaagtgaccattaaaaaaatgtcaaagaggtcaagctacatgcatggcttcaaaatttcccatcattcggacatactgaaattgagtattgcatgtaataaacagtcttgctagtgaaaaatttgtttgccc

SEQ ID NO: 49994 - DNA, 1098 bp, Glycine max
  Clone ID: PAT_MRT3847_16152C.1
attagctgcgcagcaactggcgcaaggcctcgctgtgcaaatcgccgtcttcgatatttccccaggccgggacaaggctgggtgatcacccgtacatcgttggcaaagcggtcgagcaaggcggcgaacttggcgctttgcaaggtcccggtggttgccagcacgccgaccacaccactgcgagtggccgccgccgcgggtttgaccgccggttccatggccaccagcggccagtccgggtaacgctggcgcaaatcggcggcagccgccacggtggcggtattgcaggcaattaccagcgccttggcgccttgctcgcgacagaaaccggagatcaccgcgcagcgctggcgaatgtactccgggcttttttcgccgtaggggatatgcccgcagtcggcgacatagaacagcgactcattgggcagcagggcctggatttccttgagcaccgacaggccgccgacgccagagtcgattaccgcgatcggtgcgtcacgcatcgccgccaccacagacgctgcattgcggatcgcgcttgacccgcagttcacggaatttcgtgcccagggcatcgatcagcagcaggcggccgaccagcggctcgccgaaaccggcgagcaatttcaaggcttccagggcttgcaggctgccgaccaggccgaccagcgggccgatgacgccggcttcactgcaggtcagttcggcttcgctgccgtgcccgtacaagcagtggtagcaggggctttccggacgccgcggatcgaacaccgagagttgcccctcaaggcgaatcgccgcgccgctcaccagcggtttgctggcggcgacacaggcggcgttgaccgcctcgcgggtggcgaagttgtcacagcagtcgagcaccaggtccaccgctgccaccgcgacaccgagggaatccgcgtccagggcgtggcgatgggcgaccagggtcacttcaggattgatcgccgccaaccggcgcagcgccgaatcgaccttggtcgtaccgatgctggcggtgtcatggatgatctggcgttgcaggttggtcagctcgaccgtgtcgaaatccgccagatgcagttcgccgacccc

SEQ ID NO: 49995 - DNA, 657 bp, Glycine max
  Clone ID: PAT_MRT3847_16153C.1
gagcaaccttgtatggtgtctccgtcttctttcttatgcatgtcctttgagtaaaaaaggtatggatatagttgttcgagaaatgcgagatgcaaaggttaattggaatgtcactgttgcaaatattatcatgttggcttatgtgaagatgaaagatttcaggcatttgaaaattttgctatctcagttgccaatctaccgggtgcagcctgatataatcactattggaattctatttgatgccactagaattggttttgatggtagtggagctttagaaacatggagaagaatgggctatctatacagagtagtagaaataaaaacagattctctggtccttacggcatttgggaaaggtcattttcttaaaagctgtgaagaagtgtactcttcccttcaccctgaggacagaaaaaggaaaacatggacttaccatgatctcattgctttattgtcaaaacatactggtaccatcgactgtataaaacctagatagttaacccatctttgcttttatgaaagttaaaaaaaaaatgtaaaaagattgtgatatcttactttcttgtttccagttaagttgggatgatgtaaaaaatattaatgctatatggcagggtgaagacactttcattttgaaatgaatttagtttattt

SEQ ID NO: 49996 - DNA, 200 bp, Glycine max
  Clone ID: PAT_MRT3847_16154C.1
gagaagccaccgaacggacccactcgttttcgttctcgttctggtttatacatctttgccaacgatgtttacaccgctcaaccaaacatgcaccacggggggggggaggtcactgacctttacaaaccaaagaagtgctcctccacacccacattcattaccgctaatgaccatgcttccgttcacatcaacattgcgca

SEQ ID NO: 49997 - DNA, 460 bp, Glycine max
  unsure (1)..(460): unsure at all n locations
  Clone ID: PAT_MRT3847_16155C.1
ggctcgagaatcgcaagtcgtctgtcttgcaggtgcagacgacctgtcttcatagccaaacgacctcaaaaacattcaacaacgttcactattaattcatcataaaataaaaacaagtttcgattttttatctttgttttgtttctgatccattcatggaggtgccgagttcctgggatgctcttcgcaaacagggtttcttcattttgtcggtgatggggaattcatgggatcaaggatgggattctactacccttttgctatctgtgctttgaacatggtttgatttgttgagttgcaggttttcagtgttggaattcccccccgcggtgacgaggctttagtttgctttttgaattgttaatggattggattatgaattnttgcaatgctttagatgattgttttgttcgtacatttaggtgcttaggataggattggcaggctaggaatgcacctg

SEQ ID NO: 49998 - DNA, 455 bp, Glycine max
  Clone ID: PAT_MRT3847_16156C.1
cttcttccttcatgccccttgtcagaatctccacactgatgtctgttgctacaccgatcggtgcgccatcctccctactgtatctcattgtctgtagacgaagcctccgcaacttcatgctccgacatatattacggcgagtaacacactcgttctgatgctgggcatgcatccgtgccccatattgtccttcgcgttagcgtcctgcacattgtgaatgattgctttgacccaatctacatacatctggtgagggaatgctaatacgtacgtgcctatttggtacgaacggactccacaaatctgtctgaataccaatggtagagctgacattgccaccttcatgttaccctggccttgacaacagatgaatactctttcgcactgagactccgcaatctatgactccataggatcataccctatatgtgaatcgcttggagctacagatctct

SEQ ID NO: 49999 - DNA, 594 bp, Glycine max
  Clone ID: PAT_MRT3847_16157C.1
actactgtcgatctatcgctaccaatgtaccagagtcctgtcaccgtaggggtaccgggtccaacacaccgctgtgcaaataacagggggaaaacgccgaagcttgttgaacctagtcccaagtgtttgatccccaccaaccacgatacctaaaccacttacctgcctgtggttacaattaattagcaacaaagtagtgattgtggtgcccgtattaatttacctgcccgtagtgatttacaaaattaagggacaacccgtagtaatttacaggcttgtaagtaaattgcacttagttatgtaccaagtgtttaaattcctaattcttaaataaatagtccttcatgagctggccttaaggcaaatttggtacctttggtaacatagcccgtgcattaaagggttaaaaagaagtaaaaaagtggccctacataggcttgtacaagtgcagcagcaagtgcaagtaaagggataaataagcagttaaaagctcgtaagcattaaaatacttattaagatgaaaccaaaatgattgggacttaaactgtaaatattattgattagatagatgaattaggagagcgagaaaaagaa

SEQ ID NO: 50000 - DNA, 391 bp, Glycine max
  Clone ID: PAT_MRT3847_16158C.1
gtttggatcttgctggccgtgatctgactgactctttgatgaagatcctcggcagaggtggtgaacatgtaccctctctcagattccactgtgtgtgagggtgtgtcttccataatctctcttaatggaacagttgaagccaagtgctgttaactcttctcctctcactccactcaccttcttggacagagcagccaccgtttacggcgatgtcccttccgttgtttataacgacacaaccttcacgtggtctcagacgcgccgccgatgcctccagctggcctctgccctcgcctccctcggcatcggccgcggccacgtcgtcttcgtcgtggcccccaacatccccgccatgtacgagctccacttcttcgtccccttcgccggcgcc

SEQ ID NO: 50001 - DNA, 2167 bp, Glycine max
  Clone ID: PAT_MRT3847_16159C.1
gtttggatcttgctggccgtgatctgactgactctttgatgaagatcctcggcagaggtggtgaacatgtaccctctctcagattccactgtgtgtgagggtgtgtcttccataatctctcttatgtggatctatgtattcctatcttgttctgattatggaacagctgaagccaagtgctgctaactcttcccctctcactcccctcggcttcttggacagagcagccaccgtccacggcgacgtcccttccgttgtttataacaacacgaccttcacgtggtcccagacgcgccgcccatgcctccagctggcctccgccctctcctcccttggtatccgccgcggcagcgtcgtctccgtcgtggcccccaacatccccgccatgtacgagctccacttcgccgtccccttcgccggcgcaatcctgaacaacatcaacacccgcctcgacgcccgcaccgtctccgtgatcctccgccacgcgaactccacgctcgtcttcgtcgagcgccgatcacgcgacctcgtcctcgaagccctatccctcttccctgaaaatcaaagtcaacgcccaaccctaattctcatcacagacgaaaccatcgagaaagcctcacccaccgtcgagagcgtcactacgaggggcgactttgtaagcaagggcgatcaacgggctttatgggttctaccgaactaggcggagtgggagccgatcgtacttaactacacttcagacgtcgtctccctttatgtggacattgacttgggcggtattcagagaaatcaactaatcaactgtgctattacaaatgtaaccttgtctaggaagcaagaaaaagaaccttatctctatgttccacgctaacggctggagcttcccaaaggagtatgggattgttgccgtaactaatatctgtgtccgcaagttcgacgctgagattgtttactctctcataaaacgccatcacgtgactcacatgtgcggcgcgccggtggtgctcaacatgttaagccaacgcgaaagaactccccctttgaggaaaccggttcagatcctcaccgccggagcgccgcctcctgcggcggtgctcttcagaacataggctttggggtttgtcgtgacgtctgggaggcatttgactgagaccggaggattggtggtgtcatgcgcgtggaagggggagtggaacaagttgccggcgacgttcagaactcggtcagaagcaaggctgaaggcgaggaaggggtaagaacggttgcggagacgtggttgaaatgggtcccaccgggcagagcgtgttatgtgcttcggagaagttgtgatgaattgatgcgaggaggtgtgatgttaggctacctaaaagacccttcgggaacagcaagttgtttcaagaacggttggttctacaccggggatgtttggtgtgatgcatgaagatgggtacttggagatcaaagataggtcaaaggatgttataatcagtggcggcgagaatttgagcagcgtggaggtggagtcgatattgtacgggcatccggcggtgaacgaggcggcggtggtggcgagaccgcacgagtattggggagagacgccgtgcgcgtttgtgagcttgaaaaaagggataaaagagaaagagaaacccactgagaaggacataattgagtattgtagggacaacatgccgcattatatggttcccaaaacggttgttttcaaagacgagcttcctaagacatctacggggaagatacagaagtttgtgctgagacaaatcgccaaggagatggggtccttcacgcaaagtcgaatgtgaattactctccaatagtttatggcatgcttggcatcaagttcctattgtattatcacctagtaaagtttatgtataataagagtttaattagtggtgtattttgattatagattattgtgtggtggagaattgtttattatattgtacccaaattcaactcaatcaaactttacgtattagaaattttcatagtctaggaacattaaaaacaaaagctatattcctcggatcatgcttgtctcgttttggattctgctccagctgaatgtttcatttaattctagcaaaaagcttaagcactgttaaaaaaaaaaaaaaaaaacaaaaaaaaaaaaaaaaaaaaaaaaaaa

SEQ ID NO: 50002 - DNA, 472 bp, Glycine max
  Clone ID: PAT_MRT3847_1615C.1
ggaaagcagccacaattgtattggaaatatgttcaattgcacttgtcccaaccttgtacatagcatctaggggtaaaatttgttgcgctgtagacattagtgataatgtcaaaaggtttaatgcaaatgcagttatgaatttcaacaatgatcttaggatgttggagagttttgcggatgagaagttccattgttctggcttggctgaattttactctggagctagttttaagagctgtatgatagaagcacgacaattaatgaatcttctgtcaagtagtcagcctgagaacttcatgaatcctgttataagggagaaaaactactatgcgttggattataagatggtaggctccatttgtgataaattcaaggattctccagatgggatatttggaaagtcttttaaataaaaacacaaagcaaagtgctaaaaagaaatcaatggacatgctccaaaagcgacttaagg

SEQ ID NO: 50003 - DNA, 1444 bp, Glycine max
  Clone ID: PAT_MRT3847_16160C.1
ctctccctctttcctatcacactttctagatagctagcctgtaagatatatatatagatatttcatatatatcctatggtccgtgagtgcccttgttctgtaccaaccctttcttccacatgttgagtttcagcatcgtcctctcttgagtccccatatcaaatacccaccgaattcaaccccccatataacaaatctcctcccatcccatttttcagcaccaaagtttgaaacttttctcaattgggttgaggagagtttgactcaaatttttatttttctaacgaagcagtagctattagaagtgcaaaaattaaatgtccaacatcttcttgttgatgtttgagattcatgtatccgattctcagtgaaatcttcttttccgggtgtatgatcaattccactgttaggcgcaggacccatttagttcaatccttctcagttgctttcctctattggttgtactacgtttcatgatttctaaaccttccttagtctaataatcatctactactagttattattatcatcatcatatataataaaatctatctgcaatattatttttctgagtttgtgtctagttagtgtctgggtcctggtcctgccaattgtgtcaattaattgtattgaatcataaaagatggcttcctcaagtggaacatcttcagggtcatctctgcttcagaactctggttctgaggaggatttgcaggcggtgatggatcagagaaagaggaagagaatgatatcaaaccgcgaatctgcacggcgatctcgcatgaggaagcagaagcacttggacgatcttgtttcccaagtggctcagctcagaaaagagaaccaacaaatactcacaagcgtcaacatcaccacgcaacagtacctgagcgttgaggctgagaactcggtgcttagggctcaggtgggtgagcttagtcacaggttagagtctctgaatgagatcgttgacgtgttgaatgccaccactgtggcgggttttggagcagcagcaacatcgagcaccttcgttgagccaattaataataatagcttcttcaacccgttgaatatggggtatctgaaccaccctattatggcttctgcggatatattgcagtattgagatccatggtctctgagtctgagatttgatgaggatttcttcttcttcttctaggtttgagtctgttgagaaattgtaatcactaccatatggtgataaggaataataataatgaatgtgtatcgtaaaacggatgggattgttgggtgctggttctgtaaatgtggcatgggccattactgtaatttgtcaccctcctttcctatattattataataataatattgacctacttctctgtcttgatattctttttattttttgtttttttatgaataaatattaatttttattagaaagattatttgaagagatttt

SEQ ID NO: 50004 - DNA, 505 bp, Glycine max
  Clone ID: PAT_MRT3847_16161C.1
ctcgagccgaatcggctcgagcggctcgagtctgcgagaagacgacagaagggaccctgccatatagtataaataaacaaattgaaaagaaaaactggaatgaatccaacaagagagagcaaaaggaagaaaataagaggtttacgaaagatcacgcttgagttcttgtttgtaaccgagttctttgagacgggcgtggccggaatcaagtggggcgtggccatttgcgaccacatgagaagggagtattttgtcagagcccatgagaagatggaggaaaaaatgggagtttgaatgccaatgtgatctttccagtcaacatatataaaaataataacgtccctccagtccggaactcccttcttttttaattctaacttgatgttgatgttgatgccttggtttaatttcataattaaaaaggccactgtgcactgacgtgttaattttactattcatggtaaaaattatagattttccatagctctggtctctggattcctga

SEQ ID NO: 50005 - DNA, 1875 bp, Glycine max
  unsure (1)..(1875): unsure at all n locations
  Clone ID: PAT_MRT3847_16162C.1
ctcgagccgaaacgatctctctttttctctcatacacttttttataataaaaaagcttttcaacttattttcccatgaagtgatcccaaagtatattagagcttactttgtttcttgtctcggatttcataattgataattaattaatttcaccaacttgttggcttttttagttctataaattccccgcttgaatcacacagagtcctctcttccactctctccctctttcctatcacactttctagatagctagcctgtaagatatatatatagatatttcatatatatcctatggtccgtgagtgcccttgttctgtaccaaccctttcttccacatgttgagtttcagcatcgtcctctcttgagtccccatatcaaatacccaccgaattcaaccccccatataacaaatctcctcccatcccatttttcagcaccaaagtttgaaacttttctcaattgggttgaggagagtttgactcaaatttttatttttctaacgaagcagtagctattagaagtgcaaaaattaaatgtccaacatcttcttgttgatgtttgagattcatgtatccgattctcagtgaaatcttcttttccgggtgtatgatcaattccactgttaggcgcaggacccatttagttcaatccttctcagttgctttcctctattggttgtactacgtttcatgatttctaaaccttccttagtctaataatcatctactactagctattattattattattattattatcatcatcatcatatataataaaatctatctgcaatattatttttctgagtctttgtgtctagttatccgtgtctgggtcctggtcctgcctattgtgtcaattaaattgagaatggtgtcttgtattgaatcatatatctatcatataaacatggcttgctcaagtggaacatcttcagggtcattatctctgcttcagaactctggttctgaggaagatttgcaggcggtgatggaagatcagagaaagaggaagagaatgatatcaaaccgcgaatctgcacgccgatctcgcatgaggaagcagaagcacttggacgatcttgtttcccaagtggctcagctcagaaaagagaaccaacaaatactcacaagcgtcaacatcaccacgcaacagtacctgagcgttgaggctgagaactcggtgcttagggctcaggtgggtgagtttagtcacaggttagagtctctgaatgagatcgttgacgtgttgaatgccaccactgtggcgggttttggagcagcagcaacatcgagcaccttcgttgagccaattaataataatagcttcttcaacccgttgaatatggggtatctgaaccaccctattatggcttctgcggatatattgcagtattgagatccatggtctctgagtctgagatttgatgaggatttcttcttcttcttcctaggtttgagtctgttgagaaattgtaatcactaccatatgtggtgataaggaataataataatgaatgtgtatcgtaaaacggatgggattgttgggtgctggttctgtaaatgtggcatgggccattactgtaatttgtcaccctcctttcctatattattataataataatattgacctacttctcataataatattgaccattatattattttattacccaaccttccaatattattaataaaaagattagttaaatactaaaaacaaaaaattacttnanaaannnnnnnnnnnnnnnnnnnnnnnnnnnnnnnnnnnnnnnnnnnnnnnnnnnacncnngnnnngggaatgggatcggagtcatttcannnnnannnnngnnnttttcgnnattggngtatcgggatgcattttcg

SEQ ID NO: 50006 - DNA, 278 bp, Glycine max
  unsure (1)..(278): unsure at all n locations
  Clone ID: PAT_MRT3847_16163C.1
cgcgnctgccaccccantgcaagatgttcaggttnnaattgantggtttatttccnctcaggaatgtgtncncagnacctatngtgtnttaaatccncaaaatccttttgtgttaaataggtggatggganaactgactttcccccagggcanttcccgaagtgttangataatgcctctntctatagggggaggagctggtncaaagaatgctattctcntgaacatgccaaatgcngttctntcnatgtggagatnttntgctngatntctcgtcg

SEQ ID NO: 50007 - DNA, 767 bp, Glycine max
  Clone ID: PAT_MRT3847_16164C.1
cacgcgtccgtacaactgtgaaaggggctgtggatgatcttgatctggtcataaaaaaacttgaagaagctggattttcgcatgacagattctacatccattgtgatggggctttgtttggtctcatgatgcctttcgtgaaacgagtatgtgcaaatgttactataaattgtttaacttgtataagatataatgatgaaattttcatctgctatcttcatttgttctattagaaaactttgatgtgctattaaattattttacttttgttctggttgtgtaaatttcgtattagcgaacatcattttggttcttccatgcataacatgtctattttattgcggatcattttgtcatatttttgcgctcctggtataaagtcataattttaaaatgatagtagaaacatgtatgttttaatgcttgttgatcaacccactttaaataaagtataaatgtgactatcattgattatttacaattttacatgctcatgaaactgcactgtttttttcttctttcatttttggtctgggaatgttcattttgttctaaactggttatatttaaaaatggacaagattaaaatttcatgctttctttgccaacccatcttatgttggacgatttataggagcagttgctaaaacaagaaattgagagctattcctgtagttatgtgaacctcaccgtattctatattatttggaatttgctttcaagctccaaaagttacttttaaaaaagcctgttggtagggttagtgt

SEQ ID NO: 50008 - DNA, 955 bp, Glycine max
  Clone ID: PAT_MRT3847_16165C.1
atggactcttaatcaacagatttatacttccctttttcatggatatatcaaggctaagatgacggctgcgagaagacgacagaagggggaaatgaacaagaaaaacttgaagccagacctgttgctgtatggaactaaaatatggggtctttgcagacaaaatgaaatagaagattctatggctgtaattcgggagatgatggattgtggtctgactgctaatagttacatatatacaacccttatagatgcatattttaaggttgggaaaaccacagaagctgttaatctattacaagagatgcaggatttgggtatcaagataacagtggtaacatatggtgtactaattgatggtttatgcaaaataggtttagttcaacaggctgttagatactttgaccacatgactagaaatggtttgcaacctaatattatgatttacactgctctgattgatggcctttgtaaaaatgattgtcttgaagaagccaagaacctgttcaatgagatgctggataagggaatcagtccagataaattggtttatacttctttgattgatgggaacatgaagcatggaaatcctggagaagctttgagtttgcgaaatagaatggttgaaataggtatggagctagacctgtgtgcttatacttcactgatttggggtttttctcgttatggccaagtacagctggcaaagtcgttgctagatgagatgctcaggaaaggcattattcctgatcaagttctctgtatttgtctattgagaaagtattatgaactaggagacatcaatgaggctctggcacttcatgatgatatggcgaggaggggcctaatttctgggactattgacataacagttccctctgtacacacttgagaggaaaacatgttatacatacttggtctcctgttccttattttggtggcctacaatctagtttac

SEQ ID NO: 50009 - DNA, 404 bp, Glycine max
  Clone ID: PAT_MRT3847_16166C.1
ggctcgagcccacctctccatttaagatgcatattttctacaagaccctcaccggcaggaccatcacccttgaggtggaaagctatgacaccatcgacaacctctaagccaacatccatgacaaggaaggaatccccccggaccagctacgtcttgttttcaccggaatgcaacttgaggacggccgtacccttgctgactacaacattcataacgagagcactcttcacctcgtcctccgactacgaggtgatatgcagatcttcggttacacactcaccgaccagaccataacccttgaggttgaaagctccgacaccatcgatgacggtaatgccaagatccaagacacggagggtatccccccggaccatcatcagcttatgtttgccggatagcagctc

SEQ ID NO: 50010 - DNA, 613 bp, Glycine max
  unsure (1)..(613): unsure at all n locations
  Clone ID: PAT_MRT3847_16167C.1
ggaattcattcttattgtttcttacttacccttctgccatccctcactatcccatttcttagtgacttagtacagaaaacaaaaaagaagaagaaattatcaacaaatggcatcatcttggactccacggcagaacaaattgtttgaacaagccctggctttatatgacagggaaacccctgacagatggcagaatgtggccaatgtggtgggaagatcagttgaggatgttaaaaggcactatgagatcctcaaagaagatgtcaaacgcattgaacatggccaagttccatttcctcgttacaaaaccaacaccagcaacaactaactaagccattggttcttgaagatccagtggctaccaagtactgtatgaacatccgttagcattatcaacaataaatagcgaatagtgtatttctagctgaaatcagtaaaacaatctaactgcacccctaccattattgcagcagtcttctaccctgttttcctcctttatttttatactaagttttgtttatccatgatgttgtcaaattaatattgtacttaaagcaagttaatcattgtcaagtaatgaagaattacttataattaaaaaaaaannnnnnna

SEQ ID NO: 50011 - DNA, 189 bp, Glycine max
  Clone ID: PAT_MRT3847_16168C.1
ataaaatatacagacggaaacatatttgtttaaaaatagaagaaagtgaccattctgggccgggttaatttaataattctaggcaaggacagtaaatgcttagacatattttcttaaatcacaagctttaatcgggggggtaatgaactaagactgtttgcatacaggaatctttttgccacccggctc

SEQ ID NO: 50012 - DNA, 364 bp, Glycine max
  unsure (1)..(364): unsure at all n locations
  Clone ID: PAT_MRT3847_16169C.1
gacattcaagcgcaggaatggaggtcgcaacaaacacggccgcggccaacgtcaaatttatcctggtgctccatactgtggcaaaatgctgtctccaaggaacaaggccatcaagaaggtttcttggtgaaggaaacattgtttgaacagcgcctgcaggtcagaagatgtgcagngaaggcttgtgttctatgaacaatatanctctttccgaaacctctattgtgaaagatgcaggtactgtgttttcttgttgctatcccactcctcaatgttgtgaagggtttcgatctccgcaactgacagggaggaaacgttgagccttcaccagagattcattcanggcgcaagggatgatgcaccc

SEQ ID NO: 50013 - DNA, 234 bp, Glycine max
  unsure (1)..(234): unsure at all n locations
  Clone ID: PAT_MRT3847_1616C.1
gatgaanggcgaagnagncaaaggcatcnnggattgcnagaaagatatatggggcaactacagaanngttccnccagggtgaatncacnacnntaataatagcntccaaacattggagtnccgtaacgcacntgagaaangtatgaggagggcacgcgaaaaccagatgatagtcaagnncagtgggtaccnactttgaggaagaggggcanaatggggccgacggggagncna

SEQ ID NO: 50014 - DNA, 253 bp, Glycine max
  Clone ID: PAT_MRT3847_16170C.1
agaattcatgaacgatacctttataaacatcatgcagacaatcaagcacccgatgataaatagaaggctaactaactcgcacatacaactatcagttcacctccccctctttcttatacatgggtgtatcttgcatggcacccctaagctcaccaaaagtgatatcccggtaccacgtgcgcatccatagactaaataaacaaagaacaccgcaaggaaatccaaatccagagtaagaacagaagccactatg

SEQ ID NO: 50015 - DNA, 519 bp, Glycine max
  Clone ID: PAT_MRT3847_16171C.1
ggatttcctagctgttcttgatttagagttatttttggttttgattttctattttaatgttcatgtgaattttggcagaaaggaggtccatacttggccatctatctttgggtttttacgtttggtctttctattgtgatgatgaccctttatccagtactaatagctccactcttcaataagttcactccagtaagaatttcttaacttgatattttaaaaaaaatacatataccatatttttttattttagttttgggataattacattgaattcttccaaggttagcactaattacacttagactctcctctgttgggtatggggctgacaaggaggtttcaggagaggtcaagtactcaagttggtagaggttggtgcaggcagtggtggtgtgaggatgggatgatttagagcttggcttggatgaggaacagtctgtcttggttttgggagaagcatcccagaggaagggaacaatagtcttgttgtgtttttaattttggaaaaactagaaa

SEQ ID NO: 50016 - DNA, 158 bp, Glycine max
  Clone ID: PAT_MRT3847_16172C.1
aggcgtgagaacacctccgataggacgacataatattgtcacatgtataatcgctcccgcggctttgttcctaaaattatcactagctgcgataaatactagacatatgaacatggatttcacacactatcatttacctctaatcatgaatgttttac

SEQ ID NO: 50017 - DNA, 436 bp, Glycine max
  Clone ID: PAT_MRT3847_16173C.1
aattcggctcgagatacaatgaaatttgaagactatctcatggagaaaagccaacaagagcctcacaatagacaaaaccttgagaaagaggttgtccaattgcaagcacacttgaaatgtgaagaggcgctcaatagggtcttacgttgtgcacttcatggaccagttttctctcttccactcattcccccactatttccacctcaggttcgtgggcttcttgaagaattggcaatggttgaggaagagatcatcaagcttgaaaaaaaagttaaggaactggaacttaggattgttccaggagagataccgaacatagacttggaaatacaccataggagacagtctaaactatataaacattttcgaggatcatcgaggtatggttcattgattactgagcagaagtcaagttcactccattatgaagtaattt

SEQ ID NO: 50018 - DNA, 659 bp, Glycine max
  Clone ID: PAT_MRT3847_16174C.1
aataaatatttaagttctttgattagaatcagatagcatcccggcttttctttcgtttttttttacaagctaggatccggtttgttttgcaaccagtttgctgacatttacaaggtcaagaaaaccgatacctccatacatgaaaccttcacatatcttcatttattttcagaaaaatcctcatccacaatatcttcaacttatcttttataaatcaaaaagtgatatataagatccactagcatcgaaagctcataaccacatccagaaggctgaagctactttttcaacaccaacagggtgttcatccaatggtccagtaatcaagacagatctaaaaattcttataaaacccagaaataaactgaccatcctattttactgtggttgaaccactatgaaactttcatgcctcatgcagttcgggtcaaaatcaaaagtttagcaacaagagaacatacaatcaaatttgttagtctcggagacaaaaggcagtgcaagcataactgttgtggggatctacgccactaaagcaataagccataataataggcacaactttccttcagaggcaaagatacccgcaacagttttgctggcccgacacagaacagtaggagaaaggaagcttagaatatgggttgcggctaaaggaggaa

SEQ ID NO: 50019 - DNA, 285 bp, Glycine max
  Clone ID: PAT_MRT3847_16175C.1
tctcggtcgcgtgggctttgaggctccctttaacacgcttttggcccttcattcttacaagggtcaaatgggagctggtagacctgcgaagaacaaagggtcgtttaaatcctgagcggatgttgatggaggttgcaacacagcgttgccgtctccagtgtgagtgaatcttaactttgacaagcaagtgagtgttctaggggtgttgaactatctgaccaaatatttttgtgcaaaaggactagacactgtgctactggtggccctattgagcttctccttgtg

SEQ ID NO: 50020 - DNA, 1159 bp, Glycine max
  Clone ID: PAT_MRT3847_16176C.1
gcctcaaatggattgctgagaccaaggttggcatagtgacacaatgctgcttgtctggtattgctaatgaagggaaggaccaatatcttacaaatcttgccctcaagatcaatgccaaaattggaggaagtaatgtggagctcatcaataggctaccacactttgagggtgaaggtcatgttatgttcataggggctgatgtcaatcatccagcttcccgggacatcaacagtccatcaattgctgctgtagttgccactgttaattggcctgctgcaaatcgctatgcagcacgtgtttgtgctcaaggtcatcgggttgagaaaattttgaattttgggagaatttgctatgaacttgtttcgtattacgataggctgaacaaagtcaggcctgaaaaaattgttgtctttcgtgatggcgtgagcgaaagtcaattccatatggttctcacagaggagttacaagatttgaaatcggtgtttagtgatgcaaattacttcccaaccatcactattattgtcgcacaaaagcgacatcaaactcgattttttcctgtgggtccaaaggatgggattcaaaatggcaatgtgtttccaggtacagttgtggacacaaaagtagtacatccttttgaatttgacttttacctttgtagtcactatggaagcttgggtactagtaagcccactcactatcatgtcttatgggatgagcataaatttaactctgatgatttgcagaaactgatatatgacatgtgctttacctttgcaaggtgcactaaacctgtatctttagtccctccagtgtactatgctgatctcactgcatatagaggacggttatactatgaagcaatgaatcaaatgcaatctcctggttcagctgtgtcgtcttcatcatcacagattacttctttgtcaatttcttcaacaggctcaagtttaaatgatccggggtattacaagttgcatgctgatgtggaaaatataatgttcttcgtttgaagggcttatatctgcactttctgttgtggcagaagaacttattttgctcctcttctctgctctctttgcattgggacaaactacttttcctgattgaaatagataagtagtttgtgcgtgaatctaatgggtcaattatcgtgaaactg

SEQ ID NO: 50021 - DNA, 330 bp, Glycine max
  Clone ID: PAT_MRT3847_16177C.1
cggctgtctacttgatgctcatagatgggcatcgtgttaaagagcgatatggaatggtgtgtctctgatacctcttttgtctctccctcctcttattttgcggaggctttttgctgaagtgctcattaaatatagtattggagactactcgtccaggcttaaactccaagtgtgtttttacaacccgtcaaaaaaatggtgtatctctgtgtgtatggtgatggtaacttaattagtgtgtatgaatatatatagccgtactttagctgttcttacttgtaaagcgttctagctagttataacatcaccgttactgatggtattgacaaa

SEQ ID NO: 50022 - DNA, 521 bp, Glycine max
  Clone ID: PAT_MRT3847_16178C.1
tagctggatccttaagcgccgccttttttttttttttttttttttttttttttttttttttttttttttttttttttttttttttttttttttttttttttttttttttttttttttttttttttttttttaaaggaaaccaaaggggcggggaaaattccaacccaaattccacaattttaaaaaaaaggggggggggcaaaaggggaaaaaccttaaccctccccccccttttttgggaaaaaacccccaaccaacctaaaagggttcagtccccccccacccaaaaaccgggcctccccacaaatgaacatttaagggggggttccaaaaccccccaaaaaaaatgggggaaaaaaaaaaggcaagggcctcccccttccttgttaaccccccaaaaccttgggccttcccccacccctttttttgggggttccctttaaaaaaaaattttttaattaaggttttggggcccaaaagggaaaaacaattggcccaaaaaaacctaaacaaacccctgg

SEQ ID NO: 50023 - DNA, 335 bp, Glycine max
  Clone ID: PAT_MRT3847_16179C.1
gggttttcctcatgtgctttcacccaaaaatggtgaaaaagggggagggagattagaaatggggggggggaataaaaacacttttttttaaaaaaatattaattttattctctattatttatcattatttatactacaaaaaaaaataattttaaaattaatatatttaatttttttattaattataaaatttaaatagtggttacacggaacgatgcgctgagatgttttcttggagatggccttagccatatctgagaaggatagtaaacgtgtttatgatatgactttaaacctattccatattctatttataataaaaatttttttaaaat

SEQ ID NO: 50024 - DNA, 525 bp, Glycine max
  Clone ID: PAT_MRT3847_1617C.1
tgaagatccaaggcagagagatagctaggttaattagggtgatttttaagaaggaaaattaaattaatggagcattacttgagctgggcacaggctttggcttcagcatggggattcatgttggtggtggctcttatgtgttgttgcctcagcaccaaaccaagacaagatagtgatattatctctggtaacggtggttgcacttgtgacggtggtggccatgcttgtgtttgattttttttttctttcttttcttcattcaattaattatctctctccttttaggcatagaagtctcttctttttctccggtggtatagttcatttggttagagtatgtatatttgatgtatatagccgattaatttagtgttaatttttttttttgcttttgttattttgttcaatttttagtatagatataaagacttggtagtggtatcaaatgtgcttataattgcgtggggaactcgcagatgattttgtaatttagtacaaacattcatcagcttattgaaggatatg

SEQ ID NO: 50025 - DNA, 482 bp, Glycine max
  Clone ID: PAT_MRT3847_16180C.1
ggggtggggtaggtcaaagtggacagcaaaaagatgtttacgaaggaactgtttagacataggaagtcatctacagctcatcatgtcgtcttgccacagaccatgatagtgacaaaagagaaaacgaccttggtggttataggaatgtaaattaacatcttggtagtttctgatataataactgcggctgtattgacctgcattgttgaggaaacattcttgcgaatgttacaggcagctggcattttccgtttaatgtgaataattattgtagttcatttgggacaatgttgtgttcaatgtagagcacaacaccaaacttgcatctctctcccttaatgcatgctttaacgtctgtgcctctggtataactgaaaagagaaatgaattgaagttgttgttcaaacaagggaaagtgccttaattcatacagatgaattgaaggttttccatatcggacacatcatatatatgtattagat

SEQ ID NO: 50026 - DNA, 207 bp, Glycine max
  Clone ID: PAT_MRT3847_16181C.1
catacacatggctcaaagccgaattgtaaaatgggccggatatgggccacagcgtacgatttgggccgcagcatggcccgggtgctggctctgtaccggcaaatactgcgtggtctgaacttatcggacttgcagttgggcttcgaaacgaggctgtcgaagaatgcctatgcacgtgcactgcactgggtggtctgagatgaacgc

SEQ ID NO: 50027 - DNA, 293 bp, Glycine max
  Clone ID: PAT_MRT3847_16182C.1
ctcgctcctacagtgcatcacaggggcacgcccgaagctaaaagcgcattccgcgtgcattaaagaacctgcggtcactctaaactctgaagcattgaatactaactagataggctcaatatcgcctcatctgcggtacatcgtcaccggtatccacatccgtaacaaaaaatctagctgcactcacaatccccaaacatcttacagtctaacactatgacttcctataccttggacattacagagcatcatcctcatgttcaaacactagcccggtctctaccatgtgctgc

SEQ ID NO: 50028 - DNA, 429 bp, Glycine max
  Clone ID: PAT_MRT3847_16183C.1
gtcatcactgtatgacgtcctccttctttggggggggggggggggaatgagctaaaaataacgaaaagcttaggggagaagaatgaccaaaaggtaggatataaggggccgaaaaagagtataacaaaaaaaggaatggaacgtataaagttgtgagcttagtagggcaaccaaaccgatccaagagaaagacatgggttctagaattgattgttaaggggtgcatacacgattagtcagaaaatgccaattgtcgtgaagaaaaggaagacctcacaatgtaagtgaggtagagtgcgtagaaggaaagaatttaagggtggtgggcgggaggtggatgaccacgtggtgggggcaggcccaagcgatgggagtggtaggtttggtgtacgtgggcgagcccaggcctagggactaatgttataaggg

SEQ ID NO: 50029 - DNA, 569 bp, Glycine max
  Clone ID: PAT_MRT3847_16184C.1
cggctcgaggcatttacatctgaagaagttatctgaaggtgcttgatctgcaaaccaaggtactcgtgtcttctacttgtctaaatcacaagacagtggaattgcatgtgattttacaggtctaaaaaagcagtgtcattttttgttgatgtacatttacaggttgccagcatttatagaattcccaagcccaaacctatggttcagaagcctgtatagaacgaaactgagagcagcagtgcgcataatacagagacttctgatgctaactaacctgacatgtcctcttcaagtgattcatctgccaacagtctcttatggcacaagcaaagagactgttactgagcaactctgaaggtcacgatgagctatgattaactgggcatgcatgtaaggccggttttaatcatctacctgcagcggttttatagccagagatgtagactggtgatggtagaattaataggtgaaaaggagagcctatgtacttctcagcgatcacgacaatagagttcacgcaacacttgctgcttgagtactaaaattctgatgttagatggctactactg

SEQ ID NO: 50030 - DNA, 1881 bp, Glycine max
  Clone ID: PAT_MRT3847_16185C.1
tgacgtcctgccgcgtcgtagctcggattcgctcgggccatatggggcgagaaagggtcttggcaaaacagttcaggccatcacatatttaactttgctgaaacacttgcacaatgattctggtccacatcttatagtatgtcctgcttctgttctggaaaactgggaaagggaattaaaaaggtggtgtccatccttttctgttcttcaataccatggggccggacgtgcagcttactgcaaggagttgaactccctgtccaaggcgggattgcctcctccatttaatgttcttcttgtgtgttattcacttttcgaacgacacagtgcacagcagaaagatgatcgcaaaatcctgaagcggtggaggtggagctgtgtgataatggatgaggcacatgctttgaaggacaaaaatagctttaggtggaaaaatctgatgtctgttgcaagaaatgcgaaccaacgcttgatgctgacagggacaccacttcagaatgatctgcatgagttatggtcattgttggagtttatgctgcctgatatttttgcttctgaagatgttgacctgaaaaagttattaaatgcagaagatagagatttaattggtcgtatgaagtccatcttagggccatttattttgcggcgactgaaatctgatgtgatgcaacaacttgttccaaaaatacagcaggttgaatatgttataatggaaaagcagcaggaaactgcttacaaggaagccattgaagagtatcgtgctgtttcacaagctcggatggaaaaatgttccaatcttaattcaaagagtgttcttgaagttcttcctcgacgacagataaacaactattttgttcagttccgcaagatagcaaaccatcccttgttaataaggcgaatctacaatgatgaggatgtcattcgctttgctagaaagctacatccgataggtgcttttggttttgaatgtactttggacagagttatagaggagcttaaaaattacaatgacttctgtattcaccggcggtggcatgattatatgctgagattgagctactccatggataatgtaggccttagcagaacttcttccttcactaaaggagggtggtcatcgagccttgatctttagtcaatggacttcaatgcttgacatattggagtggactttggatgtcattggattgacctataaacggcttgatggaagtacacaggtggcggagaggcaaacaatagttgatacgttcaataatgatacttcaatatttgcatgcttactttccacgagagctggtggacagggcttaaacttaacaggagccgatacagttgtaattcatgacatggattttaacccacagattgatagacaagccgaagatcggtgccatcgaattggtcagacaaagcctgtaaccatatatcggctggtgacaaagggaacagttgatgaaaatgtgtacgagattgcaaaaagaaagctagtattagatgctgccgttctcgagtccatggaggagattaatgaaggtgacatgcccgagaagaccatgggagaaatattgtctgcaattttattgagttaaaatattgatctaagaaaaacagtttaatttatcgtcactcctttcctatagttccaatcttgaattaatctgttgatttgggatagaagagaactggcagcctacaaattagtgagattcttctctcctaattatgtttttttctttaactcgagattttgtttaaagggatcgaatacaatacaatatcaattgaccaaccacttgttggttggaatgaggtgtttataccaagaaaaagagagatcagaaataaagaaaaaaaaaacaaatatgataaattatgtat

SEQ ID NO: 50031 - DNA, 332 bp, Glycine max
  Clone ID: PAT_MRT3847_16186C.1
tattttttttcgtccacattccaatggctgtaaaggagaacgtccacccccaagtcatcggttcctgcccgactccgtcgaaggctttgaaattgtccgaaaagtcttcgttgaaggacgttcagacagacaacgcagccgttccactggtggtggacgagacctcttatcccgaaccgacctgtgagttttatggcggccttcttggcccacagctgccagaagctgaacggtttgttctggatccaactcttgttgaggagtacaggcacaaaaagcctccattccggttcaatggtctcggagaagttgtgtaccttcgcacatatgcc

SEQ ID NO: 50032 - DNA, 855 bp, Glycine max
  Clone ID: PAT_MRT3847_16187C.1
tcattggacggacgcgtgggcggcttgatggaagtacacaggtagcggagaggcaaacaatagttgatacgttcaataacgatacttcaatttttgcatgcttactttccacaagagctggtggacagggcttaaatttaacaggagctgatacagttgtaattcatgacatggattttaacccacagattgatagacaagccgaagatcgttgccatcgaattggtcaaacaaagcctgtaaccatacatcggctggtgacaaagggaacggttgatgaaaatgtgtacgagattgcaaaaagaaagctagtattagatgctgctgttctcgagtccatggaggagattaatgaaggtgaattgcccgagaagaccatgggagagatattgtctgcaattttattgagttaaaatattgatctaagaaaaacagtttaatttatcatcacttcattcctatagttccaatcttgaattaatctgttgatttgggatagaagagaactggctgcctacaaattggcaagaatgcggtaccagtattgatgtacattataatcaataggagaattagtataaaaagtcatggcgaagattaacaaatttgttgaacattaattattcctgaagcactaatgaagccttaccctttccatacctagacactgaccaagagaaggcagaaagaaagacagcacgagatccggtgcaaaatgagttggcaaccacacaagaaagaggcaaaagatgaaccaagcggagctggacaagcatgcggcgcgttagcataacacggtggccaaacaagacgtcaccacggctgtgcacatgggacatgggcaccacatcaccg

SEQ ID NO: 50033 - DNA, 2296 bp, Glycine max
  Clone ID: PAT_MRT3847_16188C.1
tggaggattcaggttttaagcctctgctcaagccgtatcagttggttggcgtcaattttttgctcctactgtatcggaaggggattggaggagccatattggcagatgaaatgggtcttggcaaaacagttcaggccatcacatatttaactttgttgaaacacttgcacaatgattctggtccacatcttatagtatgtcctgcttctgttctggaaaactgggaaagggaattaaaaaggtggtgtccatccttctctgttcttcaataccatggggctggacgggcagcatactgcaaggagttgaactccctgtccaaggcaggattgcctcctccatttaatgttcttcttgtgtgttattcactttttgaacgacacagtgcacagcagaaagatgatcgcaaaatcctgaagcggtggaggtggagctgtgtgaagaaagctggtattagatgctgctgttctcgagtccatggaggagattaaaatctaatgtctgtccgagaaaatgatgggagaggcttgatgctgcaattgtattgagttaaaaatgagatctaagaaaaacagtttaagttggagtcacttcattcctatatttttaatcttgaagatgttgacctaaaaaagttacaaaatgcagaagatggagatttatgtggtcgtatgaagtccatcttaggtccatttattttgcggcgactgaaatctgatgtgatgcaacaacttgttccaaaaatacagcaggttgaatatgttataatggaaaagcagcaggaaactgcttacaaggaagccattgaagagtatcgtgctgtttcacaagctcggatggaaaaatgttccaatcttaattcaaagagtgttcttgaagttcttcctcgacgacagataaacaactattttgttcagttccgcaagatagcaaaccatcccttgttaataaggcgaatctacaatgatgaggatgtcattcgctttgctagaaagctcgagaagacaacagaagggggttttgaatgtactttggacagagttatagaggagcttaaaaattacaatgacttctgtattcaccggcttttacttcattatggtgtcaatgatagaaaggggatccttccagataagcatgttatgctttctgcaaaatgtcgggccttagcagaacttcttccttcactaaaggagggtggtcatcgagccttgatctttagtcaatggacttcaatgcttgacatattggagtggactttggatgtcattggattgacctataaacggcttgatggaagtacacaggtggcggagaggcaaacaatagttgatacgttcaataatgatacttcaatatttgcatgcttactttccacgagagctggtggacagggcttaaacttaacaggagccgatacagttgtaattcatgacatggattttaacccacagattgatagacaagccgaagatcggtgccatcgaattggtcagacaaagcctgtaaccatatatcggctggtgacaaagggaacagttgatgaaaatgtgtacgagattgcaaaaagaaagctagtattagatgctgccgttctcgagtccatggaggagattaatgaaggtgacatgcccgagaagaccatgggagaaatattgtctgcaattttattgagttaaaatattgatctaagaaaaacagtttaatttatcgtcactcctttcctatagttccaatcttgaattaatctgttgatttgggatagaagagaactggcagcctacaaattagtgagattcttctctcctaattatgtttttttctttaactcgagattttgtttaaagggatcgaatacaatacaatatcaattgaccaaccacttgttggttggaatgaggtgtttataccaagaaaaagagagatcagaaataaagaaaaaaaaaacaaatatgataaattatgtataaaaagtcatggcgaagattaacaaatttgttggacattaattattcctgaagcactaatgaagccttaccctttccagtgaaaagagaaatggaggcaaaaaaaaaaacataacaaaaaaaggagcgcgatgagggaaccgaacgagccctaattgaaacgggatttcaagagggagaaaacagaatgctggaactgtattagtggagcgtggtatgcgacgacgaccccttttgacctgtaccaatttctgaccgtgcagtacttgccgctgcataactggtcttcgttaccctgctgtgtccgatggtaaagaaatttaatgctg

SEQ ID NO: 50034 - DNA, 265 bp, Glycine max
  Clone ID: PAT_MRT3847_16189C.1
gattacccaagcaccttttaaccgacatgtgaataacttttacatctcagaattttggctgcaaacaaatgaattagaaatagaaaactgctgatctctctcacaagagcacatgggcaaggggaaactggcggtggctatttctaaaaatgaattgtcgccaaactgggttctccatacgaggagaggaatctgaaccagagcttcattgccaatcaatatgcgcttttgaaatgctttattcgaatagaggaaaacgaggggt

SEQ ID NO: 50035 - DNA, 685 bp, Glycine max
  unsure (1)..(685): unsure at all n locations
  Clone ID: PAT_MRT3847_1618C.1
ccacgcgtccggccaaggaaatttgaccgtgaagctgatgaatggataagctagggagcacgccaaggaaattgctaacaacaaggcatcagggataccgagatacacaattatcagataaacctgaaaggaaatggttcctctagcataactcgactaactccaaacacaaaaatggggcaaaattcagtggtactgaagtttgtatgtattcttttgttagccttgatctcttactggctgatattcatacctttttacagaaggcaaaagcctgaagcatttctacttggctctatggagaatgaaatgatatctgatggtgttcttgcacaagacataaaccaagcatcatctttttggctactacgtgaggttcacatttttcactccatgattatcttttttagaaaaaagtactttatctcttttcaaaattaagcatatatccctgccatgcttntgatggtttagttttcatattaagtggtctcattactcttagcttgttttctaattttgtagttagtatttttacctcttctgaattatactttcagnttttttaaaaatcagcaagcttgaccaagttangttggctatacaccttgcattttgaatttttataccaatgtcacatttgaagttattggtatctacttggccttcttatccacttgcttga

SEQ ID NO: 50036 - DNA, 459 bp, Glycine max
  Clone ID: PAT_MRT3847_16190C.1
ctcattcttcctaaaattcccccttcaaaacgaagcgcatcgcatcgcatcgcaatccaaatcccctaatcaatggattcgttccagcaacaaccccacggctacatgaggccaccgcaaccgccacctctgccgccgcacacggcggatccccaccaccacccgcaccactttcaccagataccgccgccaccgccccaagtcccttggttctcctcccagttccaataccgcccttcccagaccccttcccctccgccgcagtggcagcaacctccgccagctcctccgtcgaacgcttattcctaccaccccaatcagttccctccgcctcgcgctcacgtgcctcctcctcagttcacacctcactcccacgttcctcctcagccttatcctcaggaatggggcaacccaaattggccacctaaccagggctatccagccaataagaatgaagat

SEQ ID NO: 50037 - DNA, 169 bp, Glycine max
  Clone ID: PAT_MRT3847_16191C.1
ataaattaagcttatatatatttacactatatattgccactttacgtttgtgtgatattaattatacagtcaagtatttatatagctctttaaccataattgcctggatacaacatgtatactagtgtatacaccatattcaaagatagctaataaatacttgaatatg

SEQ ID NO: 50038 - DNA, 1163 bp, Glycine max
  Clone ID: PAT_MRT3847_16192C.1
cccacgcgtccgcccacgcgtccgcccacgcgtccgtacggctgcgagaagacgacagaaggggaatccaagaaagacacgattttgagagcagtaggagacacccgataagaatctgattcttggagcattgccattttatcttgtacattcgcttaatttgtaactacaatggctgaaattgtagtggtttttgacttcgacaagaccatcgtcgactgtgacagtgataactgggttgttgacgagttgggtttcaatgaattgttcaatcggctccttcccacaatgccttggaacactctcatggataagatggtgatggagcttcattcccatggaaaaaccattgaggacattgtgtaagttcttcagaggattcctatacaccccagaataatccacgccattaaagcagcacatgctttagggtgtgatttgaggattgtaagcgatgcaaatacgttcttcatcgaaacaattttaaagcacttaaaaataaaggaatgcttctcagagatcaacactaacccgggttatattaatggagaggaaaggctacgaattttgccttaccatgacttcaacaattctccccatggatgcactctgtgtcctccaaacatgtgcaagggtgaaatcatagagaaaatccaagactcaatatcttcaggagaaaaaaagagggtcatatatcttggggatggtagtggggactattgcccaagcctgaggctaaaagacaaagattttgtgatgccaagaaagaattttcctgtatgggagttaatatgcaaagaccctttgctcattaaagctgaaattcatgaatggagcgatggagaagaactggaacgaatttcgctgcagctaatcaacaaaatttctttgggagaaagtgctcagaacatttctgctgattgcaagttggagactatacgagagccttttcctcaagttttactagctcaccgataagacccctttaatatctttggatatctcatctacctcaaagatagctagtttttttttttttcatgtcaaatgctaataagtgtttttagatattaactaaggaattaaaaggataatttttttattgagatgcataaaatgatactgtttatttatttttataataaatattttttttagttcgg

SEQ ID NO: 50039 - DNA, 176 bp, Glycine max
  Clone ID: PAT_MRT3847_16193C.1
gagatcaacatctcttaatacacgggatacaactcccgacaaccctacaaatacgcgcaattgatgcctaaaaacaaaatgtttctaatattggcgcttgtttgtccgtctagcgagactacttgcctagcactatcactaactaaatgtcctacataaaccgaaccgggtgcaac

SEQ ID NO: 50040 - DNA, 612 bp, Glycine max
  Clone ID: PAT_MRT3847_16194C.1
ccgcagcaaacggtcaagatggctaacactgacgctctcagctttttcaaggatttcatggccggtggcatctctgccgctgtgtcaaaaaccgccgtcgctcccatcgagcgtgtgaagctgctcctgcaggttcaggcagcatccacccagattgccgccgacaagcagtacaaaggcattgtcgactgctttgtccgtatccccaaggaacagggattcgctagcttctggcgtggtaaccttgccaacgtcatcagatacttccccacccaggctcttaactttgccttcaaggatatctacaagcagattttcctcggtggtgtagacaagaacacccagttctggcgttactttgccggtaacttggcctccggtggtgctgctggtgcctcttccctttgcattgtctaccctctcgacttcgcccgaacacgtcttgccgccgacatcggcaagggtgatggcagacagttcaacggtcttgctgactgcctgaagaagaccttcaagtctgatggccttattggcatgtaccgcggattcggtggtgtcaagccagggtatcattatctaccgtgccggctacttcggcttcttcgacactgc

SEQ ID NO: 50041 - DNA, 367 bp, Glycine max
  Clone ID: PAT_MRT3847_16195C.1
ttttaagaacatactttatcataaattgaattaattttttgtgttttgtaaggcggacagatccaaataattataataattataacaaaccaacccacaagcgaaaaaaaaaaaacgatttttacaataaaccaggtgaaccccatggaggtaaggtgggatacttaaaaagcgtttctgactaaatgctataaaggtgaacggaatttttcgtgcaggagctaccagttctggaattaaaaacaggatcgcaatagtttcttttcttttttttgaaagaaaaccccattgcagcaacaatttttggtggaaaatcgagcaaagtgttggggcccataattttgaacgcgggtcggtcataaaccat

SEQ ID NO: 50042 - DNA, 280 bp, Glycine max
  Clone ID: PAT_MRT3847_16196C.1
ggaagagaaaaaactcgagtcattgacttaaaaaaaaaaaaaatccaacgttgttctcgtcaataaaaaagaggcaccttctttgcaccaataaaaaatttttaaatcactaaaccaccaagccacattgttttcgtgaataaaacacattccccactgaaacattgttaatttccagcgcccccccgctttgaaatcacgaaactctttaataccccgttccactttgtgaagccacattggatgtttattatcggggatacatataccatcaactact

SEQ ID NO: 50043 - DNA, 2083 bp, Glycine max
  Clone ID: PAT_MRT3847_16197C.1
cttcggcatctagttgtttgttggacttcagaattttgctttaggtgtgtacattagtctagccttttttctcttgtcaaactcacaaatgggtatagctttcttaacagttgccatgtaacagattttcataattcattcccattgaagggtctttttctttatttggttggtatgctgccacctgtgttatgctgagtgtgtgtatgtgagtgttgctgctgcgtgcatgattgttgcacatcttttcgagaaataaaaatatgagagagtaacttaggagcccctcttgttttttcctcagttggggacttcaatttagattccaagtggcttgtagatcccaaacaactatttattggtccaaaaattggggagggtgctcatgccaaagtatatgaaggaaaatataaaaatcaaaatgttgctgttaagattatcaacaagggagaaactctggaagagatttctaggagagaggctcggtttgcaagagaggttgctatgttgtcgagagttcaacacaaaaatctggttaagtttattggggcttgcaaagaacctgtcatggttatagtaactgaacttctattgggtgggacattgcgcaaatatctcttgaatatgcgtccaaagtgcttggatatgactgtggctgttggatttgctcttgatattgcccgagcaatggaatgtttacactctcatgggatcattcaccgtgatcttaaacccgataacttgatcttgacagatgatcataaagcagttaaacttgctgattttggtctagccagagaagagtccttaacagagatgatgactgctgaaacagggacatatcgatggatggctccagaactttacagcactgtcactctaagacaaggggagaagaagcattacaaccataaggtggatgcctatagctttgcaatagtgttgtgggaactcatccataataagttaccttttgaaggcatgtctaatctacaggcagcatatgcagctgcatttaagaatacaaggcccagtgctgaagaccttcctgaggatttagctctgattgtaacttcatgttggaaagaggatccgaatgatcgaccaaatttcagtcaaatcatacagatgctccttcgatatctctccaccgtttcaccaccagaaccggttgttcctctgcggattacttcatctgagaacgcggtgttgccaccagaatctcctggtacaagtgcattaatgcttggaagagatggctctagagaaaccacaacagccaaagggtttttcttctgctttaaccagtgttactgaggcctcaaaacacatcatttggcgtttgtccttatcccagataacagttaggaaaactaaataaaccaaatttaccaattgtaacaaccagaatcttgataagaaaatgtttattgtcaaatagtgagtttagtagcaattagtaactaagaaagtgcctttgttcacagcaagagtggctggcaagctctttttaacatttatggtaaccttcttctgacttatatccagaaaattttggggttaaggttgctgagatgtaatatcattgtaaagtaaggttcatccaaaggcctttacctctttagtgtttatgtatgtggcatgcatgattaatgattttggggataccccaaaaggcaatattgaaggcaggtctaaagggtttttcttctgctgttactgatgacacaatgcactcacaattctttcaatggggccgtcccaaatcacagtgtggcaatctgaataaaccccagcaaatgttacatctagaatcttaacaagaaaaacaagtcagttttgttcaccttgattccatgttctcagcaagagtagcaagccatactcttttaactttggattgacttacttctaacttattagggttgaggttgctgagatgtattgttgtataatatggttcatccaaaggccttcacctcctgcttaatgtatggaaatgacttggataatgaataaaaacggggaagatttttatctttgcatccatgtgattcgtttgtgaacattgtaccgccgattg

SEQ ID NO: 50044 - DNA, 981 bp, Glycine max
  Clone ID: PAT_MRT3847_16198C.1
aacacaaagccattttttttttccttttcaccaaatccaaaagatcagtcagcaaacacagatcataagaaattaaaaaaaaaaaagaagaaaaaaacctgtggcaaagcaacataacattttgctttgaaggaaatattcactccttgcatattaacattggttacaaagagagtaagtaaacaaaaataataatagtaatagcaatgctaaatgctaaatgctaataccactaagctaacatagattgagccatctagccaatatcaccaccaggagcaagatactaacaatcaagagaataggaagcacaacatagtgacaggcaagaattggagttcactgaaacccttttgcctcacaaggatatttgttgagtgaaagacaaagcatggttggatcccataatctgtggccatattccggtgctgctggtgttgctgttgctgttgctgcttcagccgccaccaaagccaaaagcaccctcccatcagtggtgccatgagtatcactcagaaaacaatgggagagagtggatggtgggttgggtgcagcaaaagggtgaaaagggggtgcatgtgttgaagggagggaataattgtgggggaaaggtagaagtgaggtaactaaactagctaaggacatgaaggagtgcctagttggttctgtggcactgcgattgtctgtggaaacataatgtgggatagtaaatgtgggcaaaaggaaatgaatggttggtgtgctttattgtgtagtacggttttgggcatggcatggtgggagagttctcttcttctgttttgtgtgtgtttaacctcttctttctctttctctttctctttctctcaaatctcaatctcaatccttttactttctctactggttgtcccagaaagcccagattagctagatttgcgcaagcaacctctgtcctctttttcccttcctcgcctaaccttcctcaatcaccataattccaac

SEQ ID NO: 50045 - DNA, 441 bp, Glycine max
  Clone ID: PAT_MRT3847_16199C.1
aatttttatataaaaattcaaaaatcacagccaccaccagtatggtctggtttcgtcttcaatgaaactagaatatgagagagaggaagaagaagataacaaaagggaaaatcagcttcttgactggactactatgaagattggcaatgcatttggaaagaagtggatatcaatgactaacgagaatggcgtggcggattttatggtagataacattgatgaaactttggtctttaaccaatctcaatgacatcatgtagctgacctatctggtgggataaagttttgttgttcttgttggaaggacaagatagtgcgtggggttttatcttggactccctcaaccacaacaactaccttttgtggagaaggttaaatactatgatatagcatcagaaaagcgtatagaatttgatagagcaatggcagaatttaacaata

SEQ ID NO: 50046 - DNA, 398 bp, Glycine max
  Clone ID: PAT_MRT3847_1619C.1
aacctttggtctgatttatgtgcttgcatggtcgtgagaagatgatagcaggggacgttcacgacgaagccgagccgcggcgtcgagccgcggtcggacgcgcgaactaaaacaagctccaagtctctccgaaccgcgccgcctaagacaaccgagtacaagtaaatataaaccgcaatcacttaagttccaagtaacacaaatatcatctccgaccctcaggccgaaactgtcggcgtcggtagtccgaatacaagaatccgcacaaaccatcgggaaccggctatcatgcgccccgagtcgaaacccccatcgaacccctcagatactcggattaaaaccacgaaaaaagaaataagtaacccggaaaaaagacgccccccttaaatccaaaaagt

SEQ ID NO: 50047 - DNA, 436 bp, Glycine max
  Clone ID: PAT_MRT3847_161C.1
ccaacccagtccacccaaaaatggagtggacgcttatcacatttcaaaatggattagccaaaaacattaatgttagttttccaccaaatcaaattaagagctcaatcaatcgccacaatcgatcccacaaggaagggttcagtaaacacggaacatatactttttatacaggaaattaatatatggagcacataatctcgagggggggaaattgcgtgagatcgagtgattccagtattccatttttctttatgaaatacatgataggggaatatatctaaagaaaagggagttacccccacacttacagtgcagttttcagctagtaactaaattctaagcttttgcagcttctgattctcgaatttgaagtttagtagttgaattgagaactagagtaaactatattattaattagatcacttaataaagttgt

SEQ ID NO: 50048 - DNA, 235 bp, Glycine max
  Clone ID: PAT_MRT3847_16200C.1
tacggctgcgagaagacgcagaaggggattgtgttgtgtgtgctcccttcaactcactcactcactcacaatggagcggaagcaagggttcttctctgcgctcaaagacgaggtggttcgcggcctctcgccggcgcggtcacgcgccaagagccccgccaggagtgcatcgcccatgtcctcgctgctccgccgccgcaagaagcaccacgcgccgccgcctgagctcttcatt

SEQ ID NO: 50049 - DNA, 257 bp, Glycine max
  unsure (1)..(257): unsure at all n locations
  Clone ID: PAT_MRT3847_16201C.1
atttttgtattgtctattgtgtgcgtcttctctctcactcccctaaaccctnnnnnnnnnnnnnnnnnnnnnnnnnnnnnnnnnnnnnctcactctaaaaccttgaattaggaagcaatcttggaacgccatgccctttgtacttctacggaaccgaatgatccattgcgtggtggtctaggtttcgtagatttttctgcaatattgcgcacattggctttggtttgaatgtgttttgcttcgactgcactgtacct

SEQ ID NO: 50050 - DNA, 162 bp, Glycine max
  Clone ID: PAT_MRT3847_16202C.1
aaacagttttcacccataccttctcactttattaaaagctgtccgcccttgttaccgatgcgctgagtactaatacctttcctgtgccttaaaacaacttcctaactattcacactttaagttcgtagaccacaccttttcaaattttccaacgcttttctc

SEQ ID NO: 50051 - DNA, 369 bp, Glycine max
  Clone ID: PAT_MRT3847_16203C.1
ctccgagctgctagaacccctcaagaagaccactgaaggaaggcctttccattggtgggggcttttgacaaggggggcaaataacatgatgctaagcttatggtgaataattgagctagtttgtgaaattttttgaaaaaatatattaaccaatttgtattctcccccgtctaaaaattgaggacttaatattagtggatatttaactaaaatggtaaaatcacaaacagacttcgcacggggaatttgcccatgcttgatataaaatgcactatacataaaaataatggtttactccgtgtacaacacttatatcttttaggtccctatacgcacacaaaccacatatgtgatgatcattttgtggca

SEQ ID NO: 50052 - DNA, 433 bp, Glycine max
  Clone ID: PAT_MRT3847_16204C.1
aaaaaaagggaaaattcctttggggagccccctcagtcttaaacctttggggagtcttttgggtcttaaacctttggggagttttttggggcttaaacctttgccggctttccaaggggtggggaagaaaaaaaaacgggtcggagggcccccccaccttttttttataaaccattaccttaaaaacaccatttttcccctgaaccctaagggacccggcggaaaaaaacttccccctcgggggggggggggggcccggagccccatcatgggtcatctggaacctacgggaacacacaaaatcttccggaaaaaaacaactaggccgggcaacaaaggagtttttttttttaaaaaaaacccgaccactggaccctgttgtgaaacccctatcaaggccacttggagcaggaggcccggaccccataaacct

SEQ ID NO: 50053 - DNA, 313 bp, Glycine max
  unsure (1)..(313): unsure at all n locations
  Clone ID: PAT_MRT3847_16205C.1
gtgagtgatcggcgttcactagatccttcataagccgtcatgatcatcatcatcatcaccgttgattgaagaagattccgatcagaaacatcgtcatcggaaggcctgaaaaggctactcaccccgacacgttgaacgcgtggttggctgagttcatgtgcaccttgatcttagtgttctgcggttcaaggtccggcatcgnctacgacatgctcaccgtcaacggtgccgncactgccgccggcctgatgtacgatttcattgtccatgctttcgccctgttcgtcgccgtcttcgtcggggccaacatctt

SEQ ID NO: 50054 - DNA, 433 bp, Glycine max
  Clone ID: PAT_MRT3847_16206C.1
ctcggggctgctggtggggctgtactggaaaggcgctactatcctgttcgttctcaaaggatgtccctatgggagtgccggcatccatcaaaagccgctctttattcatcgtcacaagccagtcgctattatctctgaagctggatcatctggcgtttctctgcatgcagattgacaagcctgacatcaaaaaagaagggttcatttaacacttgatctgccatggagtgctcaccccgcaatacatcaatttgaaagaacataccaatcacatcaagcttcaacaccataatacagcatactatttacaaatctagccggagaacgaagatttgcatcaatcggtgccaagagattataactcctaggtgcattgactcaacgggaccccagggctgcaccttcgataattgcttataactatgatagtgcc

SEQ ID NO: 50055 - DNA, 448 bp, Glycine max
  Clone ID: PAT_MRT3847_16207C.1
tcttgcttcaccactttccgtatccctcagcttcacgacaacaatggatttcacttacccttcacttctctccattttccttctcctactacttccttctctgatctcatcacaaatctgccagaaaaactgtggcaaagaaactgtcaagtacccttttggcagtggtcctggttgtggagaccctcgtttccaaccacatgtgacatgtagcaaccaaaagctcacattcaccactcacacaggctcctaccctgttacctcaattgactacaccaaccaagtcatatacatctcagatcccaccatgtcaacatgctcttgcactgtccctagcaaaggctttggccttaactgggatgcaccatttacctttgctgatagcaccatctttgctctagtagattgctcaatgaactcatcatccatatgccaatcaaatggctat

SEQ ID NO: 50056 - DNA, 229 bp, Glycine max
  Clone ID: PAT_MRT3847_16208C.1
cccccccccccccccccccccccccccctaaaaaggtattaaatattacttttctaggcattcactttactatcctattaacgtgtgattttgaagtaaaggcacgttaaataaaacttcataaaaattaatcggatagttttactataaactgattacagaataaaagactttgtataccaagcaagacaagagaaacagacccttctgtcgtcttctcgcagccgta

SEQ ID NO: 50057 - DNA, 324 bp, Glycine max
  Clone ID: PAT_MRT3847_16209C.1
aaatattcttttatttttaaaagtatttttttaatattttttaattattaatttttttttgtctaaaaaaaaaaagagtgtggaaaaaaaaacatttgtaatgaaagagataaaaaaaaagcggggggggtgaccatcatgaaaacaaaaaaggcggaaaaagtgttcaaaaaaaagaagaggaccttttttttggggaaagaactagcccccactaaagaaccttgaatgttaagaggaccgagagacccccacacccaattttattggggacaaaaccacctctccaaagaaacaaaatggggaggcttaaaacttttggga

SEQ ID NO: 50058 - DNA, 413 bp, Glycine max
  unsure (1)..(413): unsure at all n locations
  Clone ID: PAT_MRT3847_1620C.1
gcgtgggttctgtttcaacctcatgngtcatgaactactactacccatgttctgctcctttgcggatcgtgtccgngagtccttctctttctctctttattttttcttttaattgtttttttaataatctttgtttgcgttgattttggattaaaataaacaaaattcgtggatggatgattctggaacatggcgtgtctgatgatgatgcaaccgtgtgggttgttgttttatggtttgagtttgatttggtttttgtgatttgtgatttgtgctgtgtatggatctttgatggggttttgtttttgtttcgcttgggtgcttttgtttgtgggtttttttgttgcgtaactaactgtgcatgtgttggtgtttgagttcagtggattggttgaacttgttcgatttgttgg

SEQ ID NO: 50059 - DNA, 275 bp, Glycine max
  Clone ID: PAT_MRT3847_16210C.1
gaacaaaaagggattttgcttcgtttgacgattcctcctcaatagtgtgataactgagaatggcatgctatacatgatgatgcacatgtggattaagtatgagtttaattttcatgatgaaagatatgtactatctaagtcacaagcaatggtgggggacactgcgactaatgacctcttagaccccataattaatgcctgacctgtacatgcaagagtaccaattatgcctatgctgaaacggatcacagcttggaatattcttaggattctat

SEQ ID NO: 50060 - DNA, 429 bp, Glycine max
  Clone ID: PAT_MRT3847_16211C.1
cacagaaaaaggtgggtgtaggagtgagtgtatccacagcaatggttgcaactcttttcttggaagtgggattgaacactctaatcaaagcaccaaacaccaatggaaagagtaattttgatttcattgtctactcaaacttctaggctctcttcttacttataccctccaccttgctctaccacacgaaaagagctcctgccccaattccaagctcaattctctggagaatttttcttctttggtgcctcagtactgcagagcatacgttgacgtacactgggatcgcatatagctctcccacactaaactccgctatgtcggaccttgtacctgcttttaccttcatatctgccattatttccaggatggaaaatccgaatctgaaactgcgtagcagccatgcaaaaattattggcacagtgatct

SEQ ID NO: 50061 - DNA, 370 bp, Glycine max
  unsure (1)..(370): unsure at all n locations
  Clone ID: PAT_MRT3847_16212C.1
gcaaaaacccaaacactttgaatcanaattgaagagccttttctcaaacttaattaacattcttacacctcttttaattttaaaaacaaacacatttacatacattttttcaatttgcaaatataatctcacacaaactaattctaattcaaccttttttcctatccaatcattcctgtaaccatttactgccaaccatatacaacaaatgcaatccctacgaccttacattatttcttagactggttttaacagctttagttaataagatcacacattattacaaccaaagacccaaacattacttttatatcaacaaaattttttcttccataagaaagaaatgtttttatgaatatgacaccttttt

SEQ ID NO: 50062 - DNA, 257 bp, Glycine max
  unsure (1)..(257): unsure at all n locations
  Clone ID: PAT_MRT3847_16213C.1
agctatataggaacatatggaggaggccgatgtgtcttattaattgacttaacantgctgtctcagaatcacagcaattctaaaatgataggattatgagttgtcacagagaacaaaattgttagtgcacaagttttgtggttatctaatccttttgtttccactttccttttntatctctttccctacttattagcccacaaaatcattaactagcacttgttattaaatagtaacaattgtaagtgtaaatatga

SEQ ID NO: 50063 - DNA, 232 bp, Glycine max
  Clone ID: PAT_MRT3847_16214C.1
tcctctatagcggccgcttttttttttttttttttttttttttttttggcgaaaaattgccctagtcaccgcctttttaatcctagagctacggctccttaccaacagtggatgggtcccttcttagtgaaacattggctatacagaatcacttttgttattaattcaactatgccacccggctgggttgtcttatagcagacgtgcgggaccctctgggcgagatgcgcgg

SEQ ID NO: 50064 - DNA, 1368 bp, Glycine max
  Clone ID: PAT_MRT3847_16215C.1
caccgcgcgccggagcgatccagcctccgccttttgctttgccattttcaagtaatggcgctactacgtcccattctaaagttctgagtgctatttgcttattgcattgccattgccaagtaatggcgctactacgtcttgtttgcttaacttcaacaaatcagttatcaactcaatccacctctttctcttttcttcgcaaaacaccccattctcaatccatccatatcgatccctcttcctttcactttccacgcctatcccttatcacaaccactctcacacacgcccaacaagccaaccctgttgtcgccgaagaagaattttctcgcaccaggttactcgctcagaacgtgccctggacaagcacccccgaagatattcgctctttgttcgaaaaacatggaaaagtcctccaagtcgagctttctatgtataagaaaaacagaaaccggggtttggcctttgtcgaaatgggttccccagaagaagcacttgaagctctcaataatctcgaatcgtatgagtttgagggtcgagtaatcaaagtcaattatgctcggccgaaaaaggagaaaacgccgccccctgtgaaacccgtggtggtgacgtttaacttgtttgttgccaacttgtcctatgaagcgagcgccaaagatctcaaggagtttttttgattctggaactggtaaagttgtgtctgctgaggttgtgtatcgtgataatcctagaaggccgtctggttatggatttgtgtcctacaagtccaagaaagaagctgaggctgctcttgctgagttccaaggaaagatttttatgggaaggccaatcagggtggatcggggtcggcgatttgttcaacaacctggggacgggagtgcaaagtctgaagatacaccttctgatttgagtgtgaatggggcagaagctcaacaacctgcagagggcagtgcaaagtctgaagatactccttctgagttgagcgtgaatggggaagaagctgacaaagttgattgatatcagtttttccctgatgcatatcaatattatttatgttgtggttttcacctttatttaccagaggctcgtgagatacaaggagttgataggtgtaagcccaagcacttccgtgattcaagaatccatttatcttgattgcataatttgacaattgttggcaagctactatatcttaagaaagcgagaaatatatgtatatcagtggtgatgttgtttgcatctttgttggttagtgcctagtggttacttcacaagaacatgtgtatgccattcaatattttttttctttaactttaataaatatattgagtagtttaaggataaaaaaaaaaaaaaaaaaaaaaaaaa

SEQ ID NO: 50065 - DNA, 544 bp, Glycine max
  unsure (1)..(544): unsure at all n locations
  Clone ID: PAT_MRT3847_16216C.1
gtttaaaaaaaagannaatggggggcatcnnctgatncgnaanctattaagaanatattcgacgagctcactactcactaggccgcccttcgccctttttttttttattttttttggttttaatcatccttttatatttccaaaaaagggggagacaataaatacatgactttacaaaccgctgtgtaacttaaccccctatgctaccttcctcaccttatggcggtaaattagtgtaacaaagaaatggttcactcaatcccatgtttgggcaaacttaacacctttggacttctgttttgctgcctgaaaggccagcatcttttgatacttccgtgcctctttttcaacctgatattgcaaaaacccaaacaaagaaacgaatttacaagctccctggaaaacatgcaatactgtttaatgttaaccttaaacatcctatggatttaactaacagaagcaaaccttggacatgttacatttggctttaactatacgagctttggtatgaaactaattctaacgttcaagctctctttcccta

SEQ ID NO: 50066 - DNA, 519 bp, Glycine max
  Clone ID: PAT_MRT3847_16217C.1
agcattgccattttcaagtaatggcgctactacgtcttgtttgcttaccttcaacaaatcaattatccactcaaccccattcccattcccaatccacctctttctcttttcttcgcaaaacgccccattctcaacccatcaatttcagtctctcttcctttcactttccacgcctatcccttatcacaaccaaacaaacccttaacctcactcccacacatgcctccacttccgaacaacaaaccgaggagcctcttgtctctgaagaagaattttctcgcaccaggttgctcgctcagaacgtgccctggacaagcacccctgaagacattcgcaccctcttcgaaaaacatgggaaagtcctcgaagtcgagctttctatgtataagaaaaaccgaaaccggggtttggcctttgtcgaaatgggttccccagaagaggcactggaagctctcaataatctcgaatcgtatgagtttgagggtcgtgtaattaaagtcaattatgctcggccaaaaa

SEQ ID NO: 50067 - DNA, 119 bp, Glycine max
  unsure (1)..(119): unsure at all n locations
  Clone ID: PAT_MRT3847_16218C.1
gcaagctcagtgcagaggctattcgaaagnagaagctaagagcggctcgtcaaatgaagaggcaatgccaggatgaaaatggctcgtgngcctaattcttgaattgtgattcgtttgcc

SEQ ID NO: 50068 - DNA, 975 bp, Glycine max
  unsure (1)..(975): unsure at all n locations
  Clone ID: PAT_MRT3847_16219C.1
cttcccaccactcgtccaactctgcttccaacttcccagggttcacctatggttcctctctacttgcaatacccccactgtccactctctctcacttcgctctccctcttgaatagactgctttcatcttccttgcgtgtccatgcacctttacgcggctctgtcgcgacataggtgagtagccgggcttctcattgactccgatttccgcttggttttcatccacatgtgggcctccgcagtcctccgtgcccacctctccttcaactctgcttctaacttccaagtctcacatataattcctttcaactttcaatagcatcacataccacagtctctcatatctctttctcttctgaatataatgctatcatcatccaaacaagaataaacaacagaatatgagtcaaagtggctacatcaatgagaaatcaggcttgtccttgagacagaattcccataggaaatcaaacagaaatgggcaagtgaagagctgcatgttcaggattccttggcagtctgagagctctcccattgaacttgtgaaggatcttgcagaaagagtcacaaatgctctacgcttgatctctccaaagagatctttacaccaaggctcgtcttccttatcaagatcaaaatcaacagggtcctctattgattctcatagaactgctgctgttgaggactgcattgagttcatccactcttccttttccagatcaaattcatcaaccgaagcaccccgccaagattctattcaagctccttgagttgagatgcttgcaatcatgtgcttgctactatgcttaggtttatatcttccttttttttccccacaaataatagtgatgggaattaagtgattgtgttatgtttctgtacaaacagaagcagtgtatattcttctgatggatttcttacaaggtgcttttcatttcggctaaaatagcatttttcaatgaatcaattgcantc

SEQ ID NO: 50069 - DNA, 472 bp, Glycine max
  Clone ID: PAT_MRT3847_1621C.1
agcgaacgtacggcttagactcgaacgctgccgtgatgttcaccgaatgcttgcggggctacaacgcactcatcgcttacaagcctatatgggtatgcgcagagtgtgacctgtcatcagagaaggcgttgatacctctcgtcatacaacttgtccatgaaatcatatctcactatggcacgtgacgctatagtcacctgcccatgttcccggctccggaaactagaaccgcaccccatctgatggatcatggactgggacacacgctagtgcgtttgaccttgttcaacctcgacttcatatgcggctgtgatgactctactgcttccacgctcgggtcgaagccgggtgcctctactttcactacgtcctagcccctgttctccaaacggcgatcaccaaactcgcattctgcggtctccgaactgtcttcatcaccgccggcgtggacaccgaactctgcttgatgcgc

SEQ ID NO: 50070 - DNA, 422 bp, Glycine max
  unsure (1)..(422): unsure at all n locations
  Clone ID: PAT_MRT3847_16220C.1
aaaaaaaaaaaaaaaaaaaaaaaaaaaaaaaaaaaaaaaaaaaaaaaaaaaaaaaaaaaaaaaaaaaaaaaaaaaaaaaaaaaaaggggcccgcaaattaaaaagaaaaaaaaataaaaaacgtgggaagggaaaaaaaaaacatattatatggggccacctaaataaaatgcactggccgaaatttccaaccgtaacaactggaaaaaccttggggttaacaaacttattcctattggaggcaatttccattaggccgggtgccgaaatagaaaaaagaccataaccgaaccccttttccaatatgaaaccaccttaaatggtcaatgtaacgcgccctgtcccggggaattaaccatagggggcgtggtttttacgcgaannnnaacgggtaaacttgtcaaggtctaaacccctgtttc

SEQ ID NO: 50071 - DNA, 284 bp, Glycine max
  Clone ID: PAT_MRT3847_16221C.1
gttcgaaaggctgttctctgatttataagagctgcgggcaagatacaaagcccgataaaaaggaatcactaggaaaatccacaggcacggaaaggcaccacgctggggaaagcaaccgttaatgtacagcaatctggcgaaacacaaaagcaccggaaggcgggacaaacctaacctggacaaagaggaccccctggcccgcgccataaaaatgcaaatacacctatccccaaggggcactaattccccccgaaaaagggacgcaaaagcagcggtagaccccc

SEQ ID NO: 50072 - DNA, 635 bp, Glycine max
  Clone ID: PAT_MRT3847_16222C.1
ctttggtggttaatgataattcagccaagaaatgaaaagtttggttgcttttgagaaaaccacagggcatgaacataccaaagatgctagtcattggtgggggctgttgctcttgcttgtagtcttgataggggactggtgacaaagtatcttctatttggtgttgctagaagatttgctaatataggtaaaagatagttaaaaatagaggtggaaacagcattgtcttggatgccattcttttggacgatccacattacccttgtagtcacgttattattacctgaaaatttagaggctctattgtggaccaaataagttataattcaacaataaaccaagggaaatgagaaaaccccgggttgctggaggtagtagatgacgatttttttttcttggaccatagtagttgttggtcaagactatggaatttcaagctgtgtatggttgtataaactaagtagcaattaaaaaggaaatacaacaaatagtattttagttaattattcttccttttttctacatttttcagctactcctcttatgtaattgctttatgggtttatgaattatcaataccccacttattgtaacggcaatagtctattaatttttaaaccggtttcgatttttgg

SEQ ID NO: 50073 - DNA, 260 bp, Glycine max
  Clone ID: PAT_MRT3847_16223C.1
ccccatggcgaacaataaccgaacccccacccataacgcacaaaaggcaacagcgcaacacgaggcacaaagagaaccaagggggacatcacccagaaaggggcaaaaccaaggctcagacacaggacctaaacacaaccatagccaccaaaatgcccaaagaaaagacgcactctaatatggccggcgaaagtttggacatcgaggttgacgaaaccaataaaaaaaacccacgatgaacccgccctcgggaaaaaaca

SEQ ID NO: 50074 - DNA, 420 bp, Glycine max
  Clone ID: PAT_MRT3847_16224C.1
gacaatgtacttactttgctaacagatatcagaatattaaaaatatttatggggggggcatatcccaaaaaagggccacaacgaacattagtatacaacgccccaaaacaaaaactggttccgccaaggaggcatacatccattaaacccggaacaaaaaatttaacttcaagggggaacaggtttcaaaggaagagccccggggtttgcccaatccagacgagaacctagtttttaatccggccccccaacagcacttatattggcaccccgggggagggacaacccaagaacaagggggcgcacaccttccttgggggaataagcccgtcccggggacccaaaaaaaaaaatatttggtgccggggcaaaaccttccagggctcccccccccttggggccctcatttgcaaagacgga

SEQ ID NO: 50075 - DNA, 2014 bp, Glycine max
  Clone ID: PAT_MRT3847_16225C.1
aattcggctcgagaacgaagacgaaataattaacccatcagagagagagaggtaataatgggagtgataaaggatggcacaatctcaggggttctaccggaacctcaaggatttatggtgcactatcctgcttatccatcatccatctctcgagctgttgatactcttgggggaattcaagccatccagaaggctcgctgttccaaatccaacaaattagagcttcgtttccgtcctgaagacccctattctcaccctgcatttggggagcttcgtcccaccaactctctgcttctcaaaatatccaagacaaaaccaccaccacctgttcatgatgccgaagcttctagcagctctacaaatggggagcaagaccaagagggaagtctttgtgctgatatcgtcgctcgttttcccgaggcttattttttttatgggatggcggactaccaacatgtgattccagttcatgctgatgttgcccggaggaagaagcggaactggtcagagctagaagaactgcattttggtggtttcatggatctggatcacgaggatgttatgattatagtgcctccaattttcgctccaaaagatgtgccagaaaatttagtcttaagaccagctaccatgtcgagttcgaaaaagaaaccagaggaagttgtacaaccccattttgagatggacatggagccagttcttgcaattgattttgacattaaagagattcctaagaaagtgaattgggaggaatacataccccaaggctcagatcagtgggagttacagatggttgtatctagaatgtttgatgagcggcctatatggtccaaaaattcgcttaccgaactcttgcttgataagggcttaagcttttcgcacagcatgctcagaaggcttctatctagaatttcttactacttttctagtggaccatttctgaggttttggatcaagaaaggatatgatccacgcaaagatcctaattctcgaatttatcaaagaattgattatcgagtacctgttccattacgaagttactgtgatgctcattcagccaataaatcaaaacatagatggaaggatatatgtgcctttcgtgttttcccttacaagttccagacttctttacagtttttcgaccttgttgatgattatattcaatcagaaataaataagcctcctttccgaccaactaattctgctggaactgggtggttctcacaacacatgatcaattgtattagacaacgtcttatggtgcgatatctatcagtattccccaagcctggtgctgagaatttactcagagctgccactttaaagtttgaaaaattgaagagggagtgctataggcatgccatgaagctcgatggagaagaatgccaacaagctaatttaggtttggaagagaatgaagaacttgataatggtgaagatgaagaggaggcagctgagggtaatgatagtgatgaagaatgggaagaagagcatgatttggctggagataatgaaatgcctctgccatctgattcctacatcaactttgagaatctttcaaggactcatttacaggatctttttgttaacttccctcctaatgaaattgattgtgacaatgtgcaagcaaatggcagcgaagaagaatatcaaatatacggggaagatagtgaggacaattactctgatgaatgatttctggcatttggagtcatcaaatacacaggaatgtcaatatttgtagaagttacataggagggtagatatcatcttttagatttgttgattaaatatcatcatagatcctagtattcactgttacgtataagaacaagtatctctaattacattagagaaacacgggagaaaaaaatagtagaagtagatgatggaaaatagaagagaggctaaagggattgtaacatcattttttcatcccacaaatttttctgacgagacgatggaactaggaaattgcatgacatgattaacgtttcaacaaaaaaaaaagaag

SEQ ID NO: 50076 - DNA, 874 bp, Glycine max
  Clone ID: PAT_MRT3847_16226C.1
atggtgcgatatctatcagtattccccaagcctggtgctgagaatttactcagagctgccactttaaagtttgaaaaattgaagagggagtgctataggcatgccatgaagctcgatggagaagaatgccaacaagctaatttaggtttggaagagaatgaagaacttgataatggtgaagatgaagaggaggcagctgagggtaatgatagtgatgaagaatgggaagaagagcatgatttggctggagataatgaaatgcctctgccatctgattcctacatcaactttgagaatctttcaaggactcatttacaggatctttttgttaacttccctcctaatgaaattgattgtgacaatgtgcaagcaaatggcagcgaagaagaatatcaaatatacggggaagatagtgaggacaattactctgatgaatgatttctggcatttggagtcatcaaatacacaggaatgtcaatatttgtagaagttacataggagggtagatatcatcttttagatttgttgattaaatatcatcatagatcctagtattcactgttacgtataagaacaagtatctctaattacattagagaaacacgggagaaaaaaatagtagaagtagatgatggaaaatagaagagaaatggacatggttgattgaagaaaaccgtttttcattttattttctatttttaatttttattttgtttttcaagatgtctgcccagaaggatgaaaataattattagtaaatatgagaaaaaaaatttaaaatgtattttggtgttggaaacatgatttgtgaaggattagattgaacattgaacaatccaaagacttggcgcaaagggttgacataatagtttaa

SEQ ID NO: 50077 - DNA, 718 bp, Glycine max
  unsure (1)..(718): unsure at all n locations
  Clone ID: PAT_MRT3847_16227C.1
ccacgcgtccgaaaggatggcacaatctcaggggttctaccggaacctcaaggatttatggtgcactatcctgcttatccatcatccatctctcgagctgttgatactcttgggggaattcaagccatccagaaggtaaagcctagccaaatttcattttattcattcatctcattgccaatttctgttcatttttaggctcgctgttccaaatccaacaaattagagcttcgtttccgtcctgaagacccctattctcaccctgcatttggggagcttcgtcccaccaactctctgcttctcaaaatatccaagacaaaaccaccaccacctgttcatgatgccgaagcttctagcagctctacaaatggggagcaagaccaagagggaagtctttgtgctgatatcgtcgctcgttttcccgaggcttattttttttatggtttgacactttaaatgagtttttttcttttggtgttttgtgtataaattaattagctttatgcggtttcttaagcaagttacgtggttgcgtttgttttgtgtttctaaatgatgaagggatggcggactaccaacatgtgattccagttcatgctgatgttgcccggaggaagaagcggaactggtcagagctagaagaactgcattntgataaaggtggtttcatggatctggatcacgaggatgttatgattatagtgcctccaattttcgc

SEQ ID NO: 50078 - DNA, 435 bp, Glycine max
  Clone ID: PAT_MRT3847_16228C.1
ttcctatatcttggaaggtcttctatgctataaacttactacacatgcaaattcttaacatgtaatagggttctagaagattgtatttggtcacttgttgtttacaaaatgcatcaaaagacttccaaaatagacaataatgtggaaaaagtcaactgagttgtcttagaatactcttcatgcaagttaaaatcttgtccttcgtcatgttaaagtcttcttagaattctcatgaccaattaaatatcggttagcagaattgtccagtttaactgtatgaaatgagtcaataatattcctcacgaccaagtattatttttaaaaaataaaataaaaaatctcctccctcccttttcttttgctgagttcataaaaagctttaggttgtgtataatagaaaattgtagcatggctttatttagttcattaggactg

SEQ ID NO: 50079 - DNA, 562 bp, Glycine max
  Clone ID: PAT_MRT3847_16229C.1
aattcggcttgaaatttcacattcctttggtgcttccttcgtagatcccactctctctgcttcttcgctttacctcactctcagatggctgcgaattttgggaatatcttgtttacgtcgtctcagtctagctcacaggttcatggggccactgattctgtccaggttgcagtgtgttctctttgtcaaaaggccctatcacctgataatgagatggcaagcgatcttgctagcagtggtgtgtgtggtgattgtaaatttttgttacttgaagactttgggaatcatacacttacccaaagctcacgatggaggcttagaggaagattcaggcacaacagttctgcatgcagtgagaataatttctcacagcagatcccccatgttgaagatactgggaatcatacagttacccaaagctcacgaaggaggcttagaggaagattcaggcacaatagttctgaatccgttgagaatactttctcacaacagattccccatgtggttaatactgtgagacaacatcagtcagctgtgtctggggaggatgatcaacttgtag

SEQ ID NO: 50080 - DNA, 409 bp, Glycine max
  Clone ID: PAT_MRT3847_1622C.1
tattgctgggtcgacttttatattcgtcggtggacgcccttttcacttgggtttaaagaaaaaaacgcatagcgggtccacagtaacaacaatcggacacatgtctacggatgctttggaaaccataattaaatcgctgatacccatgtgatacaagaataaatgcattacaaagcgaacaacaccaaccaactttcaccaagccagctcttgaaaacaaccaagggcaacatatatgtgatgaccaatcacatgaaagagtgctttaaattgcacagatgcacaatgactgaagtcgcccaccgcatataacgatataataagcacaccgattaaaagggaagggaactcggatcattttatgatggaaccgggcgtaactgcatctgatggcatggaacttcaactt

SEQ ID NO: 50081 - DNA, 549 bp, Glycine max
  Clone ID: PAT_MRT3847_16230C.1
ctggaatgcgccgtgtgcctcaacgagttccgcgacgacgaaacgctgcgtttgatccccaagtgctgccacgtgttccactccgattgcatcgacgcgtggctggcgaatcactccacttgtcccgtttgccgcgccaacctcgcgcccaagcccgaggacgcgccatcttccgttgagattcagctttcagatccggcccggcccattgggcccaatgagcccggtcatgatccgaattacatcaacccggtggaggagcgcgaaggtgaacaaaacagaatcgttacggagcctccacgtgttttagatgatcccaaccgggcccgtccggttcggtctaaatcgaccgggtttggcattgcaaggctgtttccgcgatctcactcgacgggtcactcgttggttcgaccgggtgaggattgtgagcggttcacgctgcggttgccggaagaggtgcgggaccggctcgtgcgatccgcgacgctgaaccggacgaagagttgcgggatgacatggcagctggagagcagcgagagaaggggttac

SEQ ID NO: 50082 - DNA, 745 bp, Glycine max
  Clone ID: PAT_MRT3847_16231C.1
gaggctcgagaccaaaccacccaaggcacttaaaactccccaccagaaaaaaaaatgaattattctcttgccctagccctaggcctaatcctcatttcttgttctcctttgctagcaaacgctagaggccaccatcatgcaggtggccatcatctagggttggtagggcaaatctgcacggaactcatccaaaaccagacgacttgcacggaccttgtaaaggcagcagatcctaaaattgcacaggcaaagacattccaagagcttgcacaggcagtgctagaatttgccgtgaacaagggaatagagggccaaaccttcctcaagggcttggcactgattgagcaatcaccagccattaaggaatgtgcaaactttttctatgatggggtggttggatccttccgtagtgccttacgtgagttgaaagaagatgctcagaccgctagctatgatgccaaagcggcttatgatggccctgacggttgcaatagagccttggccgctgaaaatatcaataaccctgctattactgctcttaacagcgaaatagcgttgcttagccaaattgcattcgaggccatatgcaaatattctaattaagacaatttatgtatataccaatgcaaatatttatatgcatgggtatgggggttactattctttttgaatctcctttggtgtggtgggggagtaatcaataaaaccaaagctatttgttctctattgattaactttttaaaaa

SEQ ID NO: 50083 - DNA, 963 bp, Glycine max
  Clone ID: PAT_MRT3847_16232C.1
ggacagagacagaagaacaggtcttaaagcggttacgaaatgctcaggctgagattgagcaagggaagtcatcaggcatatttgatcacatcttatataatggcaaacttgaagagtgttacgagaatctgaagaaattattgggacttgatggatatgtcactcctcccaagtcagcaccaaaaaagatgaatctcccaagggatcattcagtgtcaaaaattgatgacaaaatcatcataggctgcatctcttcaggactagaaaaggaatcaaagaacttgatcatgttagatgtctcctcacttaaagggggcgcgcctggacggacaagagggctagattttcaagtcattgactcgttttcagatggcttcaatggcaatgaaccattttgacattcaatgaacttggtcaaactaacttggtttctctccattcatatacaattatttgagaaaataggtcacaggaagaggcactaggttcatttcttgatatgttttttttcatttgttgttgttggttagtcgttatggcagttgaaattgacttgacgtgtttggaacaattattttatcctacagtcaatgagaaattgtgtgatttttgcggctaaaaaaaaaaaaaaaaaaaaaaaaaaaaaaaaaaaaaaaaaaaaaaaaaaaaaaaaaaaaaaaaaaaaaaaaaaaaaaaaaaaaaaaaaaaaaaaaaaaaaaaaaaaaaaaaaaaaaacccaaaaaaaaaaaaaaaaaaaaaaaaaaaacgggggggccccccccccccttttttttttttttttaaggggggaaaaaccccccccccaaaaaaaaaaaaaaaaaattttttttttcgggaaaaaaatttccctcaaaaaaccaccaaaaaaaaaaagggggggaaaaaaaaagaggggccggggcggcgcccctgggggcgcgcccccccttattgggggggggg

SEQ ID NO: 50084 - DNA, 974 bp, Glycine max
  unsure (1)..(974): unsure at all n locations
  Clone ID: PAT_MRT3847_16233C.1
aaaaaaaattttaaaaattgttccttgtgtatcatgatttaaagaaataaaaaagcatttttgaatctcgaaaagaaaagatctaaaaaatttttagttttatgttacattataataaaaaaaaatttttttgaagtgaaaaactttcaattttctttatatctagttattttagaaaagaattaaattcagtttaaataaaaaaaaatatttaaaaaaaaaatttaagggattagctttaaatttaaataaaatttttagaattttaaaaaaaaaggaattaaattaaccaaaaatctaaaaattttaattttataaaaaaaattttataattttttatttttataaaataaatttaaaacgaaaaaaaaaataataaaattttaaaactagtaaatatataaaaaaaaacaagaactcggcaaaaagaatttcgaatgtttaacaaaaacattgtttcaagaagttttcggcaccaggacctgctcagtgaaaattaaacagcaattataaagtagcataataatttgtcttttaattgaagactagaatgaaaggataaacgaaaattcatcttttttattttttttaaaagaatctaacatttaagtaaaaaggcttaaataaatttaaaagacgataagaccctatagaccttcataccataaacaaaaataacataaaacattttactggggaagtaaaagaataaccatttttttaaaaattaactcttaaaaagaacaaaaaaaccttttaagaaagtaaaaagttaccttagggataacagagtaaaaatttttcacagatcaaatcaaaaaaactatatactacctcgatgttgaattaaggaataacttaatagaaaaaaattaagtataaggtctgttcgacctttaaaaccttacatgatttgagttaagaccggcgtaagccaggttggtttctatcttgnnnnnnaaaatttttatagt

SEQ ID NO: 50085 - DNA, 1335 bp, Glycine max
  Clone ID: PAT_MRT3847_16234C.1
ggaggaataatttacttgattatttatttttatctcacacaagaatattaggactaaactatgtccaattttctgaatactaaagacaatataattaagccatttttactttattgttgtacttctcccattatcctccccaccattggtattgcattctaccattctcccctcagcttcatttacacctccacaaagatttcttggatgatacacggtaattgttgttctcgcagacattgaacaccagctgtactactcatctgggatggatgatgccatcaaagttgaatcccaattcacattatcttttaatgctagagggttgaagcaatgaaaatcactctccaatctccaccactttgttaatgtggtagcaacgaatcaaatgacatcgattatttttgcatctgtacaaatggtctctgagaaactctcctatgtccgctaacatatgtttttctttataagatggtgggtttataaggatcagtgaatcgaatatcttccactctactttttggtttgattacatggagtccagtccgcacaacaagcggctctgttgggttccatttgaaatcaacatcaacgaagacccctacatgatcctggccctttttctgaaactacttcatccacattatcttcaaatttaatctgtccttcaccaaatgtaagtataggaccagttaatacggggaactcgaaataccccctgcccctttgagactccggcttcatttttttgccattaatggacacaataggtttaagtccaaaagggtgcttatgcatgagtccagcaagacagagagatatcactgggaacttgttacgaaaccaaaaggaaattgattgtcccctgctgcagtgctcaaaccattctggaatccttgttcctggcaaagaatatctcttatttccagcctcatgcaactcctgtttcagtagcattctcctacatgaggcagtcaaggatctgcagtttgttgcagacaaaaactctatgcttggtggaatccctctaatttcttgaagattctcacaatcatccaaaataagttctctcaaacagcaacctgctttggtggattcaagaggaactgcaaggtctaaatctttcaaggatgtgcaccgaattgcagataatgtttctaaattgggtggaatccccctaatttcttgaagatgcgtacagtagtccaaatatagtttcctcaaaaggcgacattcttggatgcatgaaggaagaattgtaaaattatttgctgaaagatctaagcttttcacattggcggcccgagcgagtcctgtatcaatgaattcatcaga

SEQ ID NO: 50086 - DNA, 458 bp, Glycine max
  Clone ID: PAT_MRT3847_16235C.1
caagcctaaaaaaaaaaaggggttttttaacccaaaaaaaacaaccgttttttggaaaaccccaaggccccaacccatttttggggcggaccaaaaaaccgggctgccccccaaaaactttggggctttgggggggccgtcccataccccaaaaaaaaaaaacttttaaacccaaactttttgggggagggaaaaaaaaaaccacagggggggaaaggctaaccctttaaaggctggaccccccaacaaaaaaaaaagggacaaaccccgggggcctaaaatccaacccgggaaagaaaaatcctttaaccccaagggccgtttttgtttttttaaaaaaaccctttgggcaaaaaaggacccttaacctttaacttttaattccaaattggccaataggggaccaccccttacccaaggggcagtaaataaccaccaccttttgaaatcaaattccc

SEQ ID NO: 50087 - DNA, 418 bp, Glycine max
  Clone ID: PAT_MRT3847_16236C.1
ctcaacacgactgatgttaaggacgaaactagtgcagagttgctgtttagaaagaaagcagattgagattcaataaagagaaactttgaacagcagtataaagaaggggggatggctcctgatgacaacaagagtttataacaaccactaacttatcataccagttagaatcatgtaagtcaacaagcttataacgacaatcctgggaatggatcacgcgaatagagttttgacagcccaaaaaaggctttgcaatgtggagggaaaggtctctatatcatacaatatcgcaatagagcttacttacctacacataccaaacagtgaacagtttcagatgatgcataggaagatgaatacgactgagtaaaatgataatatacttctacggcagagcattgagttgcacaggctacaa

SEQ ID NO: 50088 - DNA, 785 bp, Glycine max
  Clone ID: PAT_MRT3847_16237C.1
gcggccccatggcggaacgcaggcgacacaagaagcggatccaggaagttggtgaaccatctaaagaagagaaggctgtagccaaatatcttcgattcaactgtccaacaaaatccaccaacatgatgggtcatcgggttgactattttattgcttcaaaagcagtggagtgcctcttggattcaaagtgggccaaggccaagaaaggagaggacgctttatttacaaccagggagtctgtggtcgactactgcaacaggcttttaaagaaacagtttttccatcgggccctaaaagtaatgaaaatgaaatatgataaagacgtaaaaaaagaaaaagataaagggaaatcagaaagtgggaaagaagatgataaaaagagcaagaaagaaagtgttaaagaagaaaaaaacaaaaaaggaaaaagaaaaaaagaaagatggtgaaaaggaagattccaaaaaggaggaaactccaggaactccaaaaaagaaggaaactaagaaaaaattcaaacttgagccacatgatgatcaagtttttctggatggaaatgaggtttttgtgtggatctatgacccagttcacattaaaacatttgtcatgggattaattcttgtgattgcagtaatagcagccaccctcttccctctctggccagcagaaatgagagtaggtgtttattacctcagtgtgggcgcaggctgttttgtagccagcattcttctccttgctattgctcgctgcatcctgtttctcatcatctggctgataactggaggaag

SEQ ID NO: 50089 - DNA, 1874 bp, Glycine max
  Clone ID: PAT_MRT3847_16238C.1
tacggctgcgagaagacgacagaaggggatagtcagcaattctgaattgtcaaattcacccgctaccttttcccgtgtacgaacgaatccaatccaccaaatcggcggcgacgcctccgctctgtctcgaaaccacagatctgcggcggaaccgccgtctccgactatctccgattgatcttccgataaaagtggaccggaaatgccggttgccgcttccgccatttactttctcaacctccgcggcgacgttctcatcaaccgcctctatcgcgacgatgtcgggggaaatatggtggatgcttttaggacgcatgttatgcaaacgaaggagcttggtacttgccctgtgaggcagattggtggatgctctttcttttacatgaggatcagcaatgtctacattgtcattgttgttagcaacaatgccaatgtcgcttgcgctttcaagtttgttgttgaggctgttgcattgttccgatcgtactttggtggagtttttgacgaggatgcaattcgcaataattttgtactcatttatgagctcctagatgaaattatggactttggttacccacaaaatctttcaccagagatcttaaagctttatatcactcaggaaggagtgcgttccccattttcatccaagcccacagatagacctgttccaaatgcaactttacaagttactggtgctgttggttggcggagagaagggcttgtgtacaaaaagaatgaggtcttcctggatattgtggaaagtgtaaatcttcttatgtcttctaaaggtagtgttctgcgttgtgatgtcactgggaagattcttatgaagtgctttctttctggaatgcctgatttaaagttgggtttgaatgacaagattggtcttgagaaagaagcacaacttaagtcccgtcctactaaaagtggtaaaagtatcgagcttgatgatgtcactttccatcaatgtgtaaatttgacaaggttcaactcagagaagacagttagttttgtaccacctgatggtgaatttgaactaatgaagtatcgtataactgagggagttaatcttccgttcaaagtattgccaaccatcaaggaacttggtcgatcacggatagaagtgaacgttaaggtaaagagtgtttttggtgcaaaaatgtttgcacttggggttgtagtcaagattcctgttccaaaacaaacagcaaaaacaaatttcacagttacatctggccgggcaaaatacaatgcttctattgattgtttggtttggaagattagaaaattccctgggcaaaccgagtcaaccttaagtgcagaagttgaacttatttccacaacaacagaaaagaaatcttggactagaccaccaattcagatggagtttcaggttcccatgttcacagcatctggtttacgtgttcgtttcctcaaggtgtgggagaagagtgggtacaataccgttgagtgggttcgttacattacaaaagctggatcctacgagattaggtgctagacagagtttgtattttgctggatggagaatgaagcaaaatcccgaataaggcgcagtgcaggctagtcatcctagttttcgtattgtattaaacatgtaatgaaaggttcaggagttactcaatgtgctgtcagtatgattttttgtgtgaaaatctgtttttaatatttttgttccaaaaggccagcttgttattggaacctgaagttgagtgttctcttgtaaactttgtattttgttcttatatctctttttatataaaacatcatttattgtaatgataatatttattgagtgatgattcattgaaaaaaaaaaaaaaaaaaactcaagactagttctctctctctctctc

SEQ ID NO: 50090 - DNA, 251 bp, Glycine max
  Clone ID: PAT_MRT3847_16239C.1
acacaaccaaaggtgctgatcatcttgcatttcatcattttccttctggggaacacaatcagaatcttacatctaaacttccacacctcaatttctctgatgttactaccaccgtgtctgataatgtttctaaagcccaagcccattctttttctttaactggaaacacatgccaagatgtttataaagaatctccccccaaatctaaatctatacctacacagggcgacatcctgactgatatttaggac

SEQ ID NO: 50091 - DNA, 236 bp, Glycine max
  Clone ID: PAT_MRT3847_1623C.1
agcgcccacgcgtccgggagagacagagggagcaaaagcaagaggcgccgaggagagaggagaaccacgaaggggggaagagagttaggttaagggaagaggagaggtaggagagagcgcagatgtaccaagagaggggcagctaggccagaaggagcaaaatgcggagggtagtgagccgcagcagtccagagccagagcccgaggcagcggcccaagaggcagagaggttctac

SEQ ID NO: 50092 - DNA, 1696 bp, Glycine max
  Clone ID: PAT_MRT3847_16240C.1
ccacgcgtccgcccaattggggggagtgcagcgccctcgctaaagttgctgtgaatttgtctgaatggactgatcttggtgccgggcttgattgtggagcgcagccttgcgctttgggtgataatctgcctcacccgtatggacacttttatgtgatttctggattttatgttgtgtataggtttttcaacttgacttctgaggccacgcttgatgatgtgctggcaaagggtaagggtttttgtgagaagaggtgggatgttgcaaagagaagtgttgctccgcagccctttattgagcagtactgcttcagggcaccctatattgcctctctgctgagggagggtttgcacattaatgataaccagataactgttggctctggaaatatcacttggacgcttggtgttgccttgttggaagctggaaaggcgttttccactagatttgggcttcgtgacttggagtttttccagatgaagataaatcctcttgttcttgtgcccattttgttgctttcttttattctacttctttgtgctttatcatgtgttggcaattggatgccaaggtttttccggaggcaatatcttcccatttccaggcataacagtgttactggtgcttctgttcttaacataccatctccttttcggttccagcgatggagtccaatgtactctggggatggaagactaaagatgcctctgagcccaaaaattgcaagttcacaacaaagccaatttggtctagggcatagtcttgatgacaacagtggtggcatcgagcttatggagtcttcattgtacccatcagctaataatgtctctcatagttattcctcaaacaatttagggcagatgcagtttgacagtggcaacatgggtgctttctggtccccacatagaagtcagatgcgtctgcagagtaggagatcacagtctcgagaagacctgaattcctcattggctgaagttcatctgatgaagccgtgaaggttttcatgattggttgtgagttgttggccaataaaattgcagtgcccaagatgaattttttcatggcattgagtctaaacatcttgccattgtactgtcatcagtaatgatgcttctactagctaaaggggtatctcagtctttctaatgtttttttgtccaccctcaaactgaaacttctgaaagatatatatctgtcctagcatttcagatatttttgtcatggagatactgtagctaaaggtgaagccagatcaattgattccaaatgaatttgcatctcctggagatcacttctaaactggattgctccaccagttgcatagcacaaacaagcactcttaatcttggtatcggctcatctgaattactctccatagtgtcttcttgatgtctccatgttctgcctcagcggtttagtttttctggtgccactaagccttcagaagttaagtcgagcatcaaagactaacaagcacaacaaaggatttgcttcataacattgagactgttcttataccattctttagaaaagatgcttcattaactacattactacagagaatgccttattgtttcataggtgactcatgatgagttggaaaatcaattagaaaagatgaacatcacggagaagttgtaacatagcacaatccctcaccctcttatacgttaaaaaagctactgaattgacttcc

SEQ ID NO: 50093 - DNA, 160 bp, Glycine max
  Clone ID: PAT_MRT3847_16241C.1
actactccgcggccgccctttattaattttttttctttcttttttataaaccataatgcataatagagatcatttggggaataagtattcaccaagcaatttatggatacaaaaggcggctcctctaaaatttaatgttattaagcacacaaggggaaaa

SEQ ID NO: 50094 - DNA, 267 bp, Glycine max
  Clone ID: PAT_MRT3847_16242C.1
ttcctctctctcttcattcagatcttcctagctttcactgctttcaaaagcaaatacgaaagaacctgcacttgcacatagcacacccttcttttatttatccctatctattaccaagtccctttcactggatctcatctctgctccttctttccccctcgaactgtgtgcaaaaccaaacccggttcttcagttgcttctcctacaagatcttatcctaccccagcttagtccctaagctgaaaaacaaaacacacacacacacac

SEQ ID NO: 50095 - DNA, 536 bp, Glycine max
  unsure (1)..(536): unsure at all n locations
  Clone ID: PAT_MRT3847_16243C.1
cacgcgtccggcgatagcaattataaattcctaattacttgtctccttgattcaattccataaaccaattgttaaaactacgtgtaacaatttaaattgttatttctatgtccaaagccaattgagataattctattatatcccataattatatttagccatcttataactcccaatccgtgaagctggcatgccaaccttctcgtataaaccactgccacctcataataaacacaccttaatgaccttttagctccatcgtataaccactactgccacggccattcctttcaaccttatgatttaagctttgtaattacgaaccatgtatcgcttaggcctaacaaaacttgaattttttttttgtgcatgataataactcntnttttttttttttttttttttttttttttntggaaaaaaggattggtagttactcgttgggatttttcaggccatttaccggacgtaggagtgtttaatttaaaaataaaatatcttttacgtgcacccggatatggggtttttttttttta

SEQ ID NO: 50096 - DNA, 465 bp, Glycine max
  Clone ID: PAT_MRT3847_16244C.1
atttatgccgttttgtttatgtatgctgtatcataatatctattttatgttaattgttgtttactaattcctttgtacttctataccataattttctttggtagcatattgtggaacatggtaaaccacatgaacggactaccattatcagcaagcttgctggtcagattgttaagatgagccagcaaaagtttgcttcaaatgttattgagaaatgtttggcttttggtagtcctgaagaacgtcagattttggtgaatgaaatgcttggcacttctgatgagaatgagcccttacaggtatggctcctttcatctcttgttcaaagcttcagcttttccaaggctggagatgatctgttactcaaactattttcatgtcatttaatttagtattagctgagggaggttagtttgtaacttttattactgtgcaatgattgttcaaaaatctgttcctgtgtgt

SEQ ID NO: 50097 - DNA, 297 bp, Glycine max
  unsure (1)..(297): unsure at all n locations
  Clone ID: PAT_MRT3847_16245C.1
cccacgcgtccgcggacgcgtgggcnattagtagttttatnnngggnncnggnaggcgaagtgactgatttatgatacttgttgcctgcaaagacaatttcagttgaggccaagtttttagtactgaagacttaagcaatccgttgagttttttttttttattattgagtttagattacactttgttgagaaaagatgtaacttgtatgctcagttactttatcgagaaatagatgtcaatggtgacttcactttttgtataagagagaaaatttccatcttaaaaaaaaaaataaa

SEQ ID NO: 50098 - DNA, 188 bp, Glycine max
  Clone ID: PAT_MRT3847_16246C.1
cgacactccctacggtacccccacgttcgagccaagacaattctcttgcctgaaagcttgatcactccaacactactccctttcgcgacgcgcgcagagtgtatccaagcctggcgctggaccttggctgcgaccgcctagagccgagccgacctactctgtctgcaacatgaagttcacctctgtca

SEQ ID NO: 50099 - DNA, 367 bp, Glycine max
  Clone ID: PAT_MRT3847_16247C.1
gagcaagaacaaagaactaaagcaccttggatttagcaggatagctgctattcacacttttgtgattgggtcaaatctgtatgacatcccaaaacacaattctgcgcctttgagatccactgattgaacggttgagaacactgttaccaccagtcttgctcctgtctgcaacatatacaaggacttccctgatgatgtcctgctttatgttgacaaaaacgtggatgaagcttcccacaagttcgacgagcatgctcctatctgttgcaagcaccttgcggatcaagccaatggtgtagattcacaagtgactcgtgaggcaccgaaaagctgcagcgaagcttcatttggcgggtcaagagctgct

SEQ ID NO: 50100 - DNA, 501 bp, Glycine max
  Clone ID: PAT_MRT3847_16248C.1
ccacgccgtccgaaaaaaaaaaaaaaaaaaaaaaaaaaaaaaaaaaaaaaaaaaaaaaaaaaaaaaaaaaaaaaaaaaaaaaaaaaaaaaaaaaaaaaaaaaaaaaaaaaaaaaaaaaaaaaaaaaaaaaaaaaaaaaaaaagggggggccgttttaaagaaccaaagtttactaacccgggcatgcaacgaaaaagtttttttatagggcccccaaaattaaattcattggccgggttttaacaacgggggaatgggaaaaaccttggggtaaccaaattaaatccctttgaaaaaaatccccttttccccagttggggaaaaagaaaaaaggccccacccaatcccctttccaaaaagttgcccaccctaaagggaaaagggaaccccccctgaaccgcccaataaaccgcggggggggggggggttacccccaggggaaccgttacatttgccaggcccttagcccccgctcttttggtttttttcctttcttttttc

SEQ ID NO: 50101 - DNA, 567 bp, Glycine max
  Clone ID: PAT_MRT3847_16249C.1
gatttaatgaaatgataatcagaaattggagtaaaaaaaaaaaaaaaaaaaaaaaaaaaaaaaaaaaaaaaaaaaaaaaaaaaaaaaaaaaaaaaaaaaaaaaaaaaaaaaaaaaaaaaaaaaaaaaaaaaaaaaaaaaaaaaaaaaaagggggcgcccgtttaaaaaaaccaaatttaacaaccccgtccatgcaaagaaaaattttttttatagggcccccaaaataaaattcactgcccggctttaaaaaacggcggaacggaaaaaaccttggggtacccaaattaaatcgctttgaaaaaaatccccttttccccagttgggaaaaaaaaaaaaagcccccaaccaatcccctttccaaaaatttgcccaccctaaatggaaaagggaaccccccttgaaccggccaataaaccccggggggggggggggtaaccccaaggggaaccgttacatttgcaagcccccaagcccccgttcttttcgtttttttcctttcttttttggccacgttccccggtttcccccgaaaagttaaaaagggggggctccttttagggtccc

SEQ ID NO: 50102 - DNA, 1123 bp, Glycine max
  unsure (1)..(1123): unsure at all n locations
  Clone ID: PAT_MRT3847_1624C.1
caccgatcgaaaagtttccttgacaatctaattctgcaaaaatggcaagcaataaggagtctaagttcccagcacagagccagaaaactcagccaggaaaagaacatgtaatgaatccactcccacaagccacaaatcctgatcacaaggccgccaataaactccagggaaaggtggcgttggtgacaggaggtgactcaggaattggcagagcggtttgcctgtgtttcgcaaaagagggtgcaaccgtggcctttacatacgtaaagggccatgaggacagggataaagatgatactctgaagatgctgcttgaagctaagacaagtggtgcagacaatccattggcaatagcagcggatattggctttgatgagaactgcaaacaggtcattgaccttgttgtcaaagaatatggccgccttgatgttctggtcaacaatgcagctgagcagcatttgacaaactctgttgaggaaatcacacaacagcagcttgagagagtcttcggaaccaacatcttttctcagttctttttggtcaagcatgctctgaagcacatgaaagaagggagctgcatcataaactctacttcagttaatgcatacaatgggaatccagaagcgttggactacactgctaccaagggagcaattgtggccttcaccagaggtctttctcagcagctagcgagtaggggaattagggtgaatggtgtggcacctggcccagtttggacgccaatacaaccagcttcaaagcctgctgagatgattcagaacttggggtgtgaggtgccaatgaaccgcgtggctcagccttgtgagattgcaccatgttatttgttcttggcaacttgtcaggactcttcctactttactggccaagtcctccatccaaatggtgggatggtcgtcaacgcttaagctatagtgtgccttcacctatttcctattgaactggtttttctagcttacccctcctgaataagcagtgttacgttcggatgcatattttacgttgaaatacattgtgtttgtagcatatatgccttgagatgaataaacctttacgtgagttatttatcttccnaangnaaaaaaaaaaaaaaaaaaaaggacgg

SEQ ID NO: 50103 - DNA, 2013 bp, Glycine max
  Clone ID: PAT_MRT3847_16250C.1
aaaaattagtgtctccggcggttagtgcttcttctaattctgcatctgtaaagcgacaatcttggtcaccaattcaatgtagtgtgacgaatgtttctgaggaggtggagcaaagtcaaagtgtgagctcttccgagaggcatgaagccaatgacacggatggagccaaaccaaaactgaaagctctgcattgggataaagtgcgtgcgacctcagaccgtgctactgtgtgggaccagatcaaatcaagctcgttaatttcctttcagttaaatgaggacatgatggaatcgttgtttggatgcaaagccacgaattttacccccaaagaacctcccagaaaaaaatcagttcttccttcggttgatcaggagaacagggtgttagacccgaagaagtcacagaacatagctattcttctcagggctttgaatgtgaccagagatgaggtgtctgaagctcttttagatgggaatcctgaaggtttgggcactgagctattggaaaccctagtgaagatggctcctactaaagaggaagagataaaacttaaaaactatgacggcgatctctcaaaacttggagctgcagaaagatttcttaaagcagtgcttgatatcccttttgcctttaaaagagttgaagctatgctatatagagccaactttgacgcagaagttaactaccttagacagtcttttcaaaccatggaggctgcaagcgaggaaataaagaacagccggttattcctcaaactccttgaagctgttctaaggacaggaaacagaatgaatgttggcactaatcgaggggatgctaaagctttcaaattggacacacttctaaaacttgtagatataaagggaacagatggaaagaccacattgctccacttttgtggtccaagaaaatcattaaatctgaaggtgctggagctgaatctgcaaatgataatgtgaagatggattccaaatttaatgaggatgagtttaagaagcaaggtttgcgggttgtggcagggctcagtagagatcttagtgatgggcaagaggcagcaggaatggattcagatgtcttgagcagctatctttcaaagcttgaaacaggccttgataaagtgcgattggttttgcaatatgaaaagccagatatgcaaggcaatttctttaactccacaaagctatttctgaaatatgctgaagatgaaattgtaaggattaaagcagatgagagaaaagccttgtaccttgtaaaagaagttacagagtactttcatgggaatgcaacaaaggaagaagcccaccctctcagaattttcatgattgtaagagactttctgaatatcttggatctagtgtgcaaagaagtggaaaagatgcacgatagaatcgttggtggttctggcagatccttccgaatacctccaaatgcatcattacctgttctcaacagatacaatcatccaaagcaggatagaagctcagatgaggagagctcatccccctagtgttgtgaatatgaaagaaaccataggctttcagaataacagtgaaagtaaatgaatgaatgttttgcaaatttaagttgatagcctgcattccaggattggattcattgggttttatgccattacactattaatggtgaaagaaagtcttccctgagactgaacatcaaacacttcaaatgcatggtggggggtggggataagaaagtgaacccactgttgaacgaatttcctggtttacagaaatgggctgcaaaggttcatagcatcctcatcctacttcatatgaagaagaataaataaaattttaaatggggggtggagtgaatgcatcattttgtttcttcagctccaatacatattctacagtcaaaataggttttattaggtcaaagttccacacaattgtcatattgtagaacgtttccattttacttaagaggttcttatgtgtattttttaaaccaattattaataataaatagcagttttgcagctattccttt

SEQ ID NO: 50104 - DNA, 524 bp, Glycine max
  unsure (1)..(524): unsure at all n locations
  Clone ID: PAT_MRT3847_16251C.1
ccagcgtccgatccaacctttgtctcangtttaaaaaaaaaaaaaaaaaaaaaaaaaaaaaaaaaaaaaaaaaaaaaaaaaaaaaaaaaaaaaaaaaaaaaaaaaaaaaaaaaaaaaaaaaaaaaaaaaaaaaaaaaaaaaaaaaaaaaaaaaaaaaaaaaaaagggggggccgcttttaaagaaccaaattttacgaccgggggcttgcaacttaaaattttttttttagggcccccaaaattaaattcattggccgggttttaaaaacgtcggaattggaaaaaccttggggtacccaaattaaatccctttgaaaaaaatccccttttccccagttggggaaaaaccaaaaagcccccacccaatcccctttccaaaaatttgcccaccctaaatggaaaatggaacccccctttaaccggccctttaaccccggggggggggggggttacccccaggggaacctttacatttgcaaggcccttaacccccgttcttttcgtttttttcctttcttttttc

SEQ ID NO: 50105 - DNA, 1519 bp, Glycine max
  Clone ID: PAT_MRT3847_16252C.1
catgtctatacatgtaccagtacctgtcccaactcctacaccctcacccacacatgcacctacacctacacctacacctacacctacacccaggaagggtgtgactccacccaaagttggttctcctgctgcctcaaaaagtgcacctgcaccaggaaaaagttctcaatctgagcctcctaattgtcattttagaaaaaggtctacacataattctgggaagcatgctcatcctccaatgcctgcagttgcccctattatcaatccacatcatcccgttcctgttgcatcaccaaaactacaggttgaacccccaacacatgtctctcattcagtacctgctttgagtcctttaccaaatgtagcttttgctcatgctgagccccctcctaagaatgaaccagcccctgaacgttctcaaacacattctcatgggccaccactgtcttcatcttctgcaggttgtcttagaactgttaaatgggcatctttaatgcttatagtactcgtgttacatgtataacatagtactggaattgtatcactcggccaagacaaaactagagttccactacaaatgtgagctacgcaaaaggcaagctgcacattcatctgagtggatataagctgtgtcatcatgtgtgtaaatagttgattaaaaagatccagacggtgtatgtatgtgttttcaggtcaaattccccaagtggcaggccttgatcacacacattgccgctgtttgtgatgtaagatgaaaaaagaaaatgaaagaaagaaaaacagaagaaagtaacaatttccttttttggttctcaccatcccttgcaataaaatcattatgtatgcttctctaagccagctaaaggttatgttggccgagaaaaaaaaaaaaaaaaaaaaaaaaaaaaaaaaaaaaaaaaaaaaaaaaaaaaaaaaaaaaaaaaaaaaaaaaaaaaaaaaaaaaaaaaaaaaaaaaaaaaaaaaaaaaaaaaaaaaaaaaaaaaaaaggggggggccgttttaaagaaccaaattttacttccccgtgcttgcaaggtaaaattttttttttagggcccccaaaattaaattcccgggccgccttttaaaaacgtgggaattggaaaaaccttgggttacccaaattaaatccctttgaaaaaaatccccttttccccagttgggtaaaaaaaaaaaaggcccgaaccaatcccctttccaaaaatttgcccaccctaaatggaaaagggaacccccctttaaccggccaataaaccccggggggtggggggtttccccccaggggaacctttaattttgcaagccccttagcccccgctcttttcgtttttttcctttcttttttcgccaatttcgccggttttccccgaaaagttttaaatggggggctccttttagggttccaattaaaggtttaacggcccttgaccccaaaaaaatttaataggggggagggttaacttaggggcccatccccctgaaaaacggttttccccct

SEQ ID NO: 50106 - DNA, 139 bp, Glycine max
  unsure (1)..(139): unsure at all n locations
  Clone ID: PAT_MRT3847_16253C.1
tgctgcggcgagtacgcaagacaagagcnaaagatgttaaannaagnnctctcatccagaaaaagaccgaggaagaccaaggcacncaacaacattacatctcagatgttgaaaagatgaaaagctctagcaatgcacg

SEQ ID NO: 50107 - DNA, 1028 bp, Glycine max
  Clone ID: PAT_MRT3847_16254C.1
aggtgccggtggtggtggaggtcggccaggtgtccgctctgctcatggtggaggctttggtgcaggaggtggggtaggagggggaggtgttgccggtgccggtgcccgtggtggtggtggagggattgggattggcattggagtaggagttggggttggagccggcgccggtcatggttccggtgttggtggaggagttggaggtaaacactaagcatgcatgcatgcatgaggttatggagctttagctaaaccacatttggatgttcctccaaaaaagtcctttatgtgatgactatgatttagtgcatgttgtcttgtgaacaaagttataaggttttgaacaatcctattacaattaagggagatccatgttacttagtcactcaactatatccactcgggagttggcaattttcttttgtaataatgggtaacttcttgtcaacagttattgatattgagaaaaatgtaataaactacttatttgcatacaaaaaaaaaaaaaaaaaaaaaaaaaaaaaaaaaaaaaaaaaaaaaaaaaaaaaaaaaaaaaaaaaaaaaaaaaaaaaaaaaaaaaaaaaaaaaaaaaaaaaaaaaaaaaaaaaaaaaaaaaaagggggggccgtttaaaagaaccaaatttaactaacccgggcttgcaaagaaaaattttttttatagggcaaccaaaataaaatcaatgggccgggttttaaaaacgtgggaatgggaaaaacctgggggtacccaaattaaatcgctttgaaaaaaatccccttttcccaagttgggtaaaaacaaaaaaggccccaaccaatcgcctttccaaaaatttgcccaccctaaatggcaaagggaaccccccctgaaccggcccataaaccgcggggggggggggggttaccccaaggggaaccgttaaatttgcaaggccctaagccccggttcttttggtttttttcctttcttttttggcaagtttcgcgggttttccccgtaaagtttaaaaaggggggcccctttaa

SEQ ID NO: 50108 - DNA, 636 bp, Glycine max
  Clone ID: PAT_MRT3847_16255C.1
cccacgcgtccgtacggctggagaagacgacagaagggacatttgactatttcactgattagaacaggcaaagatgtctcttttgggttgatctttttatgtttcgatcaattgaattttccattatgacaccgtcctgaaaaaaaaaaaaaaaaaaaaaaaaaaaaaaaaaaaaaaaaaaaaaaaaaaaaaaaaaaaaaaaaaaaattaaaaaaaaaaaaaaaaaaaaaaaaaaagggggggccgttttaaaggatcaaagtttactaacccgggcatgcaacgaaaaagtttttttatagggccaccaaaattaaattcatgggccggggtttaaaaacgtgggaatgggaaaaaccctggggtaaccaaattaaatcgctttgaaaaaaatccccttttccccagttggggaaaaaacaaaaaggccccaaccgatcgcctttccaaaaatttgcccaccctaaatggaaaagggaaccccccctgaaaccggccaataaaccccggggggggggggggttaccccaaggggaaccgttaaatttgcaaggcccttagcccccgctcttttggtttttttcctttcttttttggccacgttcgcgggttttccccgtaaagttttaaatgggg

SEQ ID NO: 50109 - DNA, 318 bp, Glycine max
  unsure (1)..(318): unsure at all n locations
  Clone ID: PAT_MRT3847_16256C.1
tggttggnncaattacagaatnaattttntcaaaagtttcgtgancaagnatacattttgggaacanatatccattctgcttgggaantatatncaanantccagaaacganccccgggcatgttcagcanntggcccaccantccttgctnggccaaattnctancgttcggggnagtccnttcccccgttcgttncgccgtttagnnnaggttatgccccaancccctngntntggaatntttnctagngcangggttncccacnggttcgcaaaaccttgngccaaaaaaaagngcgaatngangacggttccta

SEQ ID NO: 50110 - DNA, 279 bp, Glycine max
  unsure (1)..(279): unsure at all n locations
  Clone ID: PAT_MRT3847_16257C.1
cttatgganataactcgaaaganggttcgaccaagcgtganatnccatggttagtgaancatgtgcctgttgcatgccagnagggcggggtggaagctttagagacgtccttctcaaagattgaacagcaaatctgtcggcttcttgnaanaatggaccaaaannccagannctgaaaaacccaagtcgtgggccagaattnatgacnagggttgagncatcgtatgtgtgagtaatcttgatttnggganngagnnanntgnaccnnnntngnggagt

SEQ ID NO: 50111 - DNA, 1181 bp, Glycine max
  Clone ID: PAT_MRT3847_16258C.1
cacgcgtccgtccaaaattcggctcgagcttcaaaatccaaaaacatcttcagccaacttgattctcattttgaaccttattcagttggcatggggacttctgatacacacttgtttctttctcttatgcagattttcattctatgcttcatctgtttcatagccaaagttgaagcttcaaacaaaaagctttcaggcttttatgtgtttggagactccacggtagacccaggaaacaataactacataaagacaccttttaggagcaattttccaccgtacgggagggactttcccaaccaagttccaacagggagatttacaaatgggaggcttgccactgattacattgcttcacacgtaggtctcaagaaagatgttcttccaccttatttggacccaaacctcagaattgaggagctgatgacaggagttagttttgcctccgctggttctggctttgacccacttacaccaagcatgactaacgtaattccaatagaaaaacagttggagtatttcagagaatgcagaaagaggatggaggatgcattgggaaagcgaagaattgaaaatcatgtgaagaatgcagcgttcttcatcagtgccggtacgaatgacttcgttcttaattattttgctctaccagtacgaagaaagagccacagtatcctggcgtaccaacagttcttaatccaacacgtgaaacaatttatacaggatttgttggtagaaggtgctcgaaaaattgcaataactggagtacctccaatgggatgcctaccgttgatgatcaccttgaattcccctaatgcctttttccagcgtggttgtattgacaaatattcctccattgcaagagattacaatctactccttcaacatgaattacacggaatgcaattgcagctcaatatgtctactccagatgctaagatctattatgttgacacatataaacccatagccgatatgattcaagcgcgaaaaagatttggctttgatgaggttgatagtggctgcttgagatgtggattttttgtagcatcaaatttgtgtaataagctttcacgatcccgccttgatttatctttgtttgtctttgttaggctttgatgaggttgatagtggctgttgtggaagtgggtcctgtgtagcatcaattttgtgtaattcattgc

SEQ ID NO: 50112 - DNA, 407 bp, Glycine max
  Clone ID: PAT_MRT3847_16259C.1
tggtatgtgaatttggaagttgcaggcatagggacaaatgcaacattcagtaaattaggactggtggggaagatccctttgtagctaagttcatagggttttgtttatgttctttctctatcaatcagaatggtatatggaaccaaaaccccaacaagttatgcattctccactgctgctagctgcaatctgctatgtatctgccattctttttcatttgcaccaatgcccaattacgtagccacttgatggcattgaacatcaaatgcaccgtgtggccccatccattttcaaaggatggagatagttaatgcttttgtgcactttgttttaaatgattttagttttatataattaatcttaattaaaattactgattaaaagtgtattaaaaacatatcaaaatc

SEQ ID NO: 50113 - DNA, 1200 bp, Glycine max
  Clone ID: PAT_MRT3847_1625C.1
taagcattgaatgaagatgaagttattaggtttacttgtgttggtattgggcagtacaatcagtgccaatggtgcagtttctgaagtttcttggagagtttgcagcagcctcgatgggctcggtccctccggtggtcgagcggttccagccgccgttgagctgtgtcctcttcttccttcaccttgctctgcgcctctcatctggtttccttcccttgactttgccggaaaacactttcgcattggtgtattggaaaaaaagagggttatagttgtgatgacatttttgagtatgctaaatgcaggcatttctacccaactgttgcttactctgttcgatatagaaggagttgtccattatggaattgcaggaaacgcaaatcctaaactccaaattggagatgttactattccccagtattgggctcacacgggactttggaattggcagagatttggagatggtcctaaggatgcactagctttagaagccagtggagattatagcagaagatttggttatcttaagtttgccgattacaataacaacacaaaacattccaagtccgcgacaaatcttctgaacaacgtctggtttcaagcagaggaaattttccccgtgaatggaactgctgaagttaggcaacatgctttttgggtttcagttgacaacacttactttgagattgcaagagagctcaagaatgttaaattaagtaattgtgtcaatacaacttgcttgccaagaaggcctattgtggtgagagtagagaaaggggttagtgctaatgtgtttgttgacaacaaagcttacagagagtttttgcactctaaatttgatgtcactgctattgacatggaaagtgccgccgttgctttaatctgtctccaacaaaagaaacccttcattgccattagatcactatctgatttagctggtgacagttctactttgtctaatgaagtggatgtgtttgcctcgttagcatcgcaaaacgctctagatgttgttgtcagatttatctcctttttaaatcagtagctctaatgtgtttctcaaaaaatgttaacaagggatgtatttgagatgggcaaataatgtgttaaaattttaaaagtctatgtcatgtatgcactccatcgtacttcaaaataaaagcataaccaaacaggttaagactttttgatatgctccccaaa

SEQ ID NO: 50114 - DNA, 284 bp, Glycine max
  Clone ID: PAT_MRT3847_16260C.1
ctccgagcatccacaagcgacatcatgccaggcaagtctgacgacacggtcatcgaggagttcaacgagtatgtgaacatgtccgtcaaggagctcgaggagtggctcgagacggaggactcgcagggcgccggctggggcgacggcgatgagagcgtatgacatcaaagtggacgaaagatcgttgacatccttcagcgtaacccgaagaaggacccgagcaagtacacggacgaagatctggcccacatgcgcaaggtcgcctcgtactgcaagcgccacct

SEQ ID NO: 50115 - DNA, 426 bp, Glycine max
  Clone ID: PAT_MRT3847_16261C.1
gggggggaaaaaaaaacccccctttcccccttggaatttgccattttaaaaagccttccccctttaaacaaaggggggaacaaaaccccctcgaaaaaaaaaaggcccccaaatattttggcaaattcaaaagggaaatttttggtccccaaacccaggccggggaaccaaaagggggggggcacccaattccttttttttgtaccaagggaagaacccccccaaaacgatgggccaaaaaaaacccattgtttaaaaaagttaaattgcccgccccccccaaaaaaggacggttactggttggggcatccaaaaaaccctttcccccaatttgttcccttaaaaacctttgggagggtttttttttaggggaaagaagcccccttgggggccccaaaaaaatcccattaaagggggattttgttt

SEQ ID NO: 50116 - DNA, 464 bp, Glycine max
  unsure (1)..(464): unsure at all n locations
  Clone ID: PAT_MRT3847_16262C.1
tcttatctatctgtccaagattggcttctttctagtaatcaaagtgttcaaaaaaccattttatgacttttggaatttagatgctttgacctagttaagaaatgctatagtaacgtaatttctaacacactctttgttattaggtgaaattcataagggacccatgtgtcacttccccatttattgagtcctgtttattattatgagactaagataaatttcactcgtgaaggaagagtaggttaaaagaatgagttataaaatatgttgctaacacctagcacttttctaaccaagttgtatatgctctacaatccattagaacttggaacaatctgggaattttcattatgtatttatgatgttcttattcatacaggtacctgaaacactgcctcaagaggtccttgggaaaatgggagcacctncaaagagtgatgtaccaattattacacccaatgagc

SEQ ID NO: 50117 - DNA, 331 bp, Glycine max
  unsure (1)..(331): unsure at all n locations
  Clone ID: PAT_MRT3847_16263C.1
cacaannaacgaaaaggnncataaccagatttttacgggaaaaaaaatacaagcgtttttnnnnctaaaagggaccgtggttatgggatggcgtcgtaaaaaaaacttggttacgccggaaaagcctgggcgggtnaaancggggcaggaagccgggnngnccgtcttttattaagttatgcccccgttaaaacnncggagaaacgaacagggggagggnnnaagactggcccaggtggganctnnaggcnaatggcgagtctgggtatggggnnatncaaanncgcagcttggctanagggtgaccgaaatncaaggccncccccccctn

SEQ ID NO: 50118 - DNA, 1356 bp, Glycine max
  Clone ID: PAT_MRT3847_16264C.1
acttatgcttatatttaaaattatcctttaaactattattttaaagataaaggttatttaaaataatagttaaaaggataattttaaaaataattattacttatgcttatatttaaggttatactttatatatgtgtatatatacatatcagaataattatatttctcttatcctatttaacaaatatataatttatataaaattattgttttaaacattaatattagatcatatatgattaaaatcattgactattatgaaatataagtttggttaatggttgtgatagttttaagtgaactttagatcaacaacatggagttaaaattttgatccaaaacttaaatatagttagattaacgttttcatcttttttgcaaactaacaaatgtcatctctattttcaactccatggaacaaaaacattgataaagtataaccttaaatataagcataagtaataattatatttctcttatcctatttaacaaatatataatttatataaaattattgttttaaacattaatattagatcatatatgattaaaatcattgactattatgaaatataagtttggttaatggttgtgatagttttaagtgaactttagatcaacaacatggagttaaaattttgatccaaaacttaaatatagttagattaacgttttcatcttttttgcaaactaacaaatgtcatctctattttcaactccatggaacaaaaacattgatgtggttgagaatgaagcccaaacaatgcttattgcaaaaaatcctaatttctccttcaaatagagatgaccaatggatgaaaagacgactttcgttgtgccatgagtccctcgcttgcaccatcgcaaggatgtaagctgaatgtgcgctagctctcttttgcttcccctgttgcaaggacccccgcggtcccttgaccaccaagaagggcttcttccccttgatctcactactacagtgcgtgacaacactgttaaggaaagttgtttatccaatcgcatgtgtagatcttcgcccattattcaggccacacaccacaagaggagtttgcacattggttttggcgatgaaagtgatgttgccatgatggagtcgggctttgttcgagggcaagggttgctaggtttctgtgtgcctttgcttctttttttctttttcttgaattaattatcaatcaaaactattggttttgattgttgaaacaatgttgttcagttctgaattgatgagtcatgagtgatttaagttcttgctttgggattatgtatctttttaatctaattttttaagctagttttaatttgcttatagcaatttattttgaaaatttattagtt

SEQ ID NO: 50119 - DNA, 1246 bp, Glycine max
  unsure (1)..(1246): unsure at all n locations
  Clone ID: PAT_MRT3847_16265C.1
ggaccgtttgggtgggattcccaagggcccaattcggctcgaggcgcttgctccagctaggtgtatgtccctgaatttggctgtcaagtatgccaatgtcattcattctattgttttgcaggatgatttcttgccaagaacggccactccattggaagatatattcaaatcaatattctgcttgccctgcttgttgttcttggtttgcctgagagacaccttcatacctgagggtagaaagcttagagatccaaggagactttatgcacctggaagaatgtaccatattgtggagagaaaattctgcagatgtgggagatttcctcctgaagtgaggactgctattcctgttgatggaagatttgagcatattgtcttgtcctgtaatgcaacatcggatcatggaattatttggattgaaagggaggctgagaaagccttacaattaatgaaggctcagagctctgaaactgtgacagaccctccaacagtacaaaagtttcagaggttgaagaccatagagaaagaacatagagatgctttggaaagagctgttagcctgaatgtacctcatgcagtggacactgctgagaaagaaacatctgagaacaatgaaggtgacgacgatgcatccgccagtgcaaacaataacgtctcaagtaaccaatcaaaatctagtggtggaaggtcgaactgggatgaggtagttgaaaaacttctaaagaagaagagtgaaacgggagaacaaaacctggaaagggatacgaatgtcacacaataacgtctttttctctcttgtttaaaactctagatatccacacccattcatatatttggttcttgagtttgttaattcgtgatgtaaaaagatagttacaattgcttggacccccaggcgtataccagaggagtgctatttgttttagtcctgaattttttgttgaacccgacgtttcccatgtataagataaaaaaaaaaaaaaaaaaaaaaaannaaaaaaaaaaaaaaaaaaaaaaaaaaaaaaaaaaaancttgggggggggcgccggccccaatttccccttatgggggggnaattaaccccccctaatgggccgggttttaaaaccgngggaatgggaaaacccttgggttacccaatttaaatcccttgggaaaacacccccttttccccggtggggaaaaaacaaaaaggccccgcccggatgccctttccaaacagtggccaaccttaatgggaaatgg

SEQ ID NO: 50120 - DNA, 1410 bp, Glycine max
  unsure (1)..(1410): unsure at all n locations
  Clone ID: PAT_MRT3847_16266C.1
tacggctgcgagaagacgacagaagggggggaagtggtaaccgacacagcagaaatgatatgatgggttgtggcggtgcattctcagtgtggctgccagtgtttgtgtcttgttttacagcaatagcattggctgggactgggtgcgataaggcaccggtggtgttcgtgttcggcgattcgaactcggacacgggtggactcgcttccggtctgggtttccctatcaatcttcccaatggccgcaatttctttcacagatccactggccgcttgtccgatggacgcctcgtcatcgacctactctgccaaagtttgaatgcaagtttgttggtaccatatttggacgccttgtctggaacctcattcacaaatggagcaaactttgcagtggtggggtcctctactctcccaaaatatgttcctttctccctcaatatacaggtcatgcagttccggcgtttcaaagctcgttcccttgaacttgttaccacaggtacaagaaatttgatcaatgatgaaggcttccacggtgcactctacttgattgatattgggcaaaacgaccttgctgattcatttgccaaaaatctgtcatatgtgccagtcatcaagaggatcccagtagttataactgaaattgagaatgctgtaagagtttatataatgaaagtgcccagaaattntgggttcacaatactgggccgttgggctgtcttccaaaagtacttgcactggctcagaagaaggatctagattcattgggatgtctttctagttataactctgcagccagattgtttaatgaagccctgcttcattcaagtcagaaactaagatctgaacttaaggatgctactttagtctatgttgatatttatgccattaagtatgatctcatcacaaatgccgcgaaatatggtttctcaaatccgttgatggtatgttgcggttatggaggaccaccttacaattttgatgtaaagggtgacatgtggtcaacctggttatcaggtttgtgatgaaggggctcggtatgtgagctgggatggaattcatcaaactgaggctgcaaatacattgatagcttctaagatactttccatggcttattccacaccacggattccttttgatttcttctgccaccactgattatgcacggttagttcattagttgttggtttaccatcaatatgtagttctccaagaacagagtttgtcatgtagtaacacccatgctgaagttctaaaaaattagggggtcctatgttgccagaaattgtatttttctttgccaatggggatgtatgttgtattatgtaaacaattgatgactcaaacgaatgcatttttggcctgttttagaaatttggactggtaatggaataactgctgtgaaagtacttgt

SEQ ID NO: 50121 - DNA, 2045 bp, Glycine max
  Clone ID: PAT_MRT3847_16267C.1
tatcgagccgaattggctcgagacggctgcgagaaacgacagatactggacagtatgatgggttgtggcggtgcaatctcagtgtcactgctgctgctgcttctctcttgttttacagaaatagccttggctggctgcgataaggctccagtgctgttcgtcttcggcgattccaactcggacacgggtggactcgcctccggactcggtttccctataaatcctcccaatggccgcaatttctttcacagatccactggccgcttgtccgatggtcgcctcctcatcgacctactctgtctgtctaagttcccttcttcgctttttcataattctttttttcgactttaaaatttcattacattacatgttcttagtttttcaaatgtatcgtttatttttttctctgtgttaaaaattttagtattttgttaattttaaaatttaaaaacaattaatttactataacgagtgtaaaaatttacactttctttaatttagtcgtattcttctattttcccattcctctctttcttcatctaacgccatagattccaacctcggaaccttccatctcccctcctgcaccctgtcctcccttccctccgattccgaccaattcgacatcgagcagccacgggtcacggagatcgagggccaaatgccgcacctctggctagtgacgacgtgcgattacgaggttggtggtggttatcgctcgcggacctgcttcttccaccgtcagatttgatctctgatacagttttcttattattattatcgaacaaatctatgtacaagttatggataagaaagtccttattcaaatttgaaaggtaccggtcatgatatctctagcattctcttattcaaaatacatttgcaggcctgagtttgaatgcaagtttgttggtaccatacttggacgccttgtctggaacctcattcacaaatggagcaaactttgcagtggtggggtcctctactctcccaaaatatgttcctttctccctcaatatacaggtcatgcagttccggcgtttcaaagctcgctcccttgaacttgttaccgcaggtgcaagaaatttgatcaatgatgaaggcttccgtgatgcactctacttgattgatattggacaaaatgaccttgctgattcatttgccaaaaatctgtcatatgcgcaagtcatcaagaaaatcccagcagttataactgaaattgagaatgctgttaagaatttatataatgatggtgccaggaagttttgggttcacaatactgggccgttgggctgtcttccaaaaatactcgcactggctcagaagaaggatctagattcattgggatgtctttctagttataactctgcagcaagattgtttaatgaagagctgcttcattcaactcagaaactaagatctgaactgaaagatgctactttagtctatgttgatatttataccattaagtatgacctcatcacaaatgccgcgaaatatggtttctcgaatccgttgatggtatgttgcggctatggagggcctccttacaattttgacgtaagggtgacatgtggtcaacctggttatcgggtttgtgatgaaggggctcggtatgtgagttgggatggaattcatcaaactgaggctgcaaatacattgatagcttctaagatactttccatggcttattccacaccacggacaccttttgatttcttctgccaccaatgattatgcacactgagtgtgcaaaacagtgaatccactgttagttcattagttgttgatttaccatcaatatagttctccaagaacagagtttgttatgtagtaacgcccacgctgaagttctaaaagattagggtcttgcaattgggctgtaactagtggcctatgttaccagaaattgtatttttctttgccaacttggatgtatgctgtattatgtaaacaattgatgactaaaacgatttttggcctgttttagaaatttggactggtaatggaataagtgaaactacttgcttacattttactggttt

SEQ ID NO: 50122 - DNA, 509 bp, Glycine max
  Clone ID: PAT_MRT3847_16268C.1
tacggctgagaagacgacagaagggggttgcaatgcattgagaaactacacaagttacaacagagaatgagaaaagatgcagtagaaaaactacaaaaaaaacacttaaattttcacaaacagtttaatacaagaatcaagatggactcccaaaatatgagctacaatgctggacaagccaagggccaaactcaggaaaaggctaacaccatgatggacaaggctagcaatgctgctcaatctgctgaagaatccttgcaagaggttggacagcaaatgcaggctaaagcacaaggagctgctgatgctgtaaagaatgcaacaggatgaacaaatgaagctaaatggatcgttatgcatgctggacttggtttcccttgaaatataccctatattttgctgatttattgatgtattttgcagaaacattattccattttttttcaaatgtaatcactttctaagttcggataaaccagtttcattaatgatgaaagtttctaattgct

SEQ ID NO: 50123 - DNA, 445 bp, Glycine max
  Clone ID: PAT_MRT3847_16269C.1
ggctcgagctcgagcctgttcggcatcgtgctccatcctaatcacttctagcttgaacaacgcggagaggataaggctaacctccttgttcccattagagaaccttgtgacctatgggtcacctagacacttccctgcgatgatcatagggacgatgcgccctgctactatcttgacagcgaggatgactgggaacctgagcatttgggcttggtcatggatgccgcggactgcagagatcataccactgaacatatacagagacatgtcgcgacgtagcgtgaatttgcttggcatgcaaaaggacatggacaacaaaacccttgaactatgctttgagatagatgagaacaaagaggattgcgacaagtgctatgaagcttactacaagaacatggagctatgtctccctgaggcatcacatatcaaggggatgattgctgaa

SEQ ID NO: 50124 - DNA, 710 bp, Glycine max
  Clone ID: PAT_MRT3847_1626C.1
ctcttctctctcttcgccgttggtttcactcagctctcactctcatccccatcccaaaccctagcctcgctatttttcatgattcctctcgatctcttccactgaactctctctcaaatcggtcgtatacggagaattatcggagacactcggaggtctgctaaaattaacattcgcgatggcggcttccactaccagccaggtctacatcgatgtaatcgaggatgtcatggtcaaggtccgtgacgagttcgtgaacaacggtggtcctggagaggaagttctcaaggagcttcaagctatgtgggaatcgaagatgatgcaagctggtgctgtgctcggtcccatagaaaggtccactgcagctaagccaactcctggtggtccaattactccggttcatgatctcaacgtaccgtatgaggggaccgatgagtatgagactcctacagcggatatgcttttcccccctacaccattgcaaactccaattcaaacccctctaccaggaactggggataactcaacgtataacattcctactggaccaagtgactacccctcttctggaaatgacccaggaggaaatgctgatggaaaaggagccagacctgctccatatatggcatctccttctccttgggtgaaccaaaggcctccacttgagtcaatgttgcttatgtgggaagccgggatgaagcagacagggg

SEQ ID NO: 50125 - DNA, 277 bp, Glycine max
  unsure (1)..(277): unsure at all n locations
  Clone ID: PAT_MRT3847_16270C.1
aaaccatacccattnctacttgatcagccacattattactatgatcactcatacctacaaccatcccatcattcaactctataaaccattcantttttttgcttcaaaaccgttctttgaatctacccaataatatagtttccttcattgatcaagcatccaaaccccctattgttatggaaatttcaaatgtccatcctcaatttaagcctcctttttttgtgttcactaatactccataaatattgaactctaaatacttcattattgtaatcat

SEQ ID NO: 50126 - DNA, 401 bp, Glycine max
  unsure (1)..(401): unsure at all n locations
  Clone ID: PAT_MRT3847_16271C.1
ctgatatcgatgagaatatcattaactgtccacggagggcaactggctatactgtatctctactgattttgaaatcacgggaaggctaanagagacattatgactcgctcacacactacgggctgataatatttgatttggcagtaacctcagcatgatactggtatgtatgcaactgtttgccttgttcttcgagaggaatgcaataaaggctatatggcgcgaccctgttggcaggggttcgatacctatcaagatcaatgccaccccactgtattcgtcgccaaagacctttgacgtgccggcctcttgtacttcatttccaacgttccaaaaaatggaagacccccgctggtgtagtcgctgatcttcgaagcgagcgcgagaacggtgctccccgt

SEQ ID NO: 50127 - DNA, 377 bp, Glycine max
  unsure (1)..(377): unsure at all n locations
  Clone ID: PAT_MRT3847_16272C.1
gntccttctgccgcncctggcaagggcccgctcaacaactgggccacccacttgagtgacccactccacacaaccatcattgacaccttctcatcctcctcttaagaagaagcaaaagaagaagaatagtctttcttgtgcctggtcattctagttatattgtaaaagtctttttcttcttcgtgggctttgggttgtatttaatcattttctacgtagctggattagtagggcttgtgaaaaacttgtgtcgggaaattggggaggctgagcggaaatgcttctgcttggtgttgaggggtctgctgcgaatgggggttgtggcgcggggtggggagggggggacggcgggggggggtgctggtgggggcggcatc

SEQ ID NO: 50128 - DNA, 1462 bp, Glycine max
  Clone ID: PAT_MRT3847_16273C.1
gatatttcaaaaggttaaaattgctaaaaattaatttagttcttaaaatgtttttttacttagacttggtctggttcacttggtcttttagatggtctcgccttattctttttacatggtcttgggtggttttagaaacacttttttttccctttataaatatcaatatttctgaaccctcatcttaagagttcttgctcccatgtctttttccttttccgagttcccaagccattacttgaaaagtttcctagttctgtcgcaccaactattgttgggaagagagtatcttgtttacatcttaagggactttggagggatgtgcataataagttcttgaggagaatgtgaattcatatacgtattgatcacaattcgtgtataagaagggatgtgctagttccctatggtacaagagattcatgaactccaatctcaagaacttatggacgtgatgtgctagtccctatggtacaagagattcatccaacaatgggaggggcaatagaactagcaatctgttagtgagactaacccaaaaattcactagggaggagaaagaaaatgtgagaatcactggagaccaagtcaaagataagactcaatccaaaagattaagtgaacaagatcaagtcaatgtaaaatatctctcttgataagcaataagttaatcaattaattaaaggtatatccttttgaaatatcaatcaataaaatctctgttgctcttttctagcattccaatttcccaagtattttgtagatttacataaacactgttatgaagcctctgctgccagaaatgcaaagtgtaaccgtaccatgtatttcagtgatcttccccagcttttctgtaaagaattacaaagttcatgtctgcaaaaggccaagttcaagggaatgttttattcatcaatgttgaggtagccttctcaatttgagttaatgaagttccatattatggtttatctttcagtttctggaatagttctaaattggtcttttgtttcattttgttgtacattggaaaaattgcatgtgcagaagatcccctcacctttcaattttatctttcatacattaaaggttaatggaatatagcgatcctgtagaaactttgctgactgcagggaaaataaagagttgcccacttccctgtctacacgatataggcatttggttttattttgaatgttgcatatcaaaaaacagtacagttgcatgttttcaaatggagattttcttaatgtgatcctaaattgaatttccaatttgagtacaaattgtgaattgaatatttcgtgcatggattttgatcactgtcattaaggggattatcgtaagtgagaaagaaagtttgtttcatccctattatctactttacaggaaataaatcatttttaaatgcaatataacaggacacaccgtctattacctagcttatgttgaaatgtgggattga

SEQ ID NO: 50129 - DNA, 302 bp, Glycine max
  Clone ID: PAT_MRT3847_16274C.1
cttgatttttagaatctactagcattgcactaggttgggagtctttgtgaggattagttccctgattctgttctgaaccaaaggtgtttgaagaattgctttgaaacactggttccatctgcatgagagatgcgtttggctgaaaatcagagtcattgcaaaaatgacactgctgctgtgtgacccaatttgaagcaaacttagcactaaaaatttgcataatgaccgcagcctctgccgccttcacgacgacctccaacacggccaaagccattgcctcctcgactgcagccaccgctgtg

SEQ ID NO: 50130 - DNA, 457 bp, Glycine max
  Clone ID: PAT_MRT3847_16275C.1
atacttaaacgcataggtacttgagttgaccatgcacaatggacatagttacattaccggtcccccacacttaacgaaagggcaaagaagcacttgcatctttgaaactactgaccactgataccaggctagctagagcccaaaaggacacaagcgagccagaccttgcttaaagggcgcaaataagccgctgctgtcctgtgggactcctgatgcggaaccaagaagctgacaaggtggatgttttcaacctggcaggcctggtggggtctaacgcaaaaagagtgctgaataactacctgaggccatgcgttcaacagggagatagcccctgcatgggatccgactgaggttctatcaccggccctgctggactcattgtcaaagagatagctgtgggattctgaacaccccgcaaaggctcagaaaacaatcagcaccccctcctctggcaggt

SEQ ID NO: 50131 - DNA, 481 bp, Glycine max
  Clone ID: PAT_MRT3847_16276C.1
ggctcgaggcgagcggccgccctggctcggcactccttgctcttatttctccgcctctaccaacgccctggacaccggggcgatggcagtggccgggcaccacgccgacgacggcccgatccgtcaggtgctgccagaagctggcgaagcggcccaggaggacaacctgctggacgcctagcaccaatccgggagctgcaaggtcgtggtggccatgacctaggcctacaaagcggagcacggatgatccgccaagcgtgttcaacacaacgcacgcagagcgcagcctgaacgccaagctcggcccctcccacgaacacggcgtgaccaaattatgcgcactgactccgggcgacttaagccgtccgaatgttggccgcgagccaattgggtttccgaaggacgcccaaaacgcgcacatgcaacccacccaagatagagccatggaacccgataggcgagacaaaggagccgtccctta

SEQ ID NO: 50132 - DNA, 1056 bp, Glycine max
  Clone ID: PAT_MRT3847_16277C.1
acaaaacttccacttgagagaaaagtagtgtattaagactacaaattttcaatttttcaatggcgtcgaggcaacaaaaagaggatcgagctgaggcagctgcgaaagttgctgcgaaagaactcgaacaactcaaccgagaaaaagaccgtgatttcagtgttggtgttgcagaccaacaccaacaagaagaacatcagttagatcaacaaaagcgtggtgtaatcggatccatgttcaaggcggtgcaagacacctacgagaacgccaaggaagctgtcgttggcaagaaagaaccttcgacgacgactaactcgtacagtaccagagaggttattcacgacgttgacattcaacccgatgacgcggctgcagcgagggaagtgagagacaaatcagcctcaaagtcaccaggtatctacaattctgccactgctgacaacaaaaccggttccaaggtcggagagtacgcagattatggttctcagaaggcgaaagaaacaaaagatgcaacgaaggaaaaagctggagagtacacagattatgcttcgcagaaggcgaaggaaacgaaggacaagacaatggaaaaggctggagagtacactgattatgcttcgcagaaggcgaaggaaacgaaggacaagacaatggagaaggctggagagtacacagattatgcttcgcagaaggcgaaagaagccaaggacaaaaaaaccggttccaaggtcggagagtacgcagattatggttctcagaaggcgaaagaaacaaaagatgcaacgaaggaaaaagctggagagtacacagattatgcttcgcagaaggcgaaggaaacgaaggacaagacaatggaaaaggctggagagtacactgattatgcttcgcagaaggcgaaggaaacgaaggacaagacaatggagaaggctggagagtacacagattatgcttcgcagaaggcgaaagaagccaaggacaagacaatggagaagggaggggaatataaagactatgctgcaaagaagccgaacgaaggaacacaaatttatattagatctg

SEQ ID NO: 50133 - DNA, 1792 bp, Glycine max
  Clone ID: PAT_MRT3847_16278C.1
gccgccccctctcgtcgccggggcggtgggcaaaaagcaaaagcccctcaacccaacacacctaagacggttatctccaagcctcactccctcgtttcttccgcccccttcactcaccttctatctgccaattctcttctattaataacacccacctctttggttcctcttcccttcaattcatcacataataacgacactacaaaacattgtttttagctcttttttgttgcagcgaaaccaaaatgtctttcactgcaactaagtttgcaccttctcctctccctctcaattccaccacccccagatccaatgacaagcctctctctttctccttcgatcactccaagcccaacccttcttcctccttccttggatccactcgcaagcttcttcgcttcaatgctctcgctaggcctcatgctcacactcgtgcttcttcttcccctgctgctgctgttcttctcgaacgaacctccaatctgcttgtcacaaaagaggaagggttggaactctatgaagacatgatattagggaggttttttgaggacaagtgcgctgagatgtattataggggcaaaatgtttggttttgttcacttgtacaatggccaagaggctgtgtcaactgggttcatcaagcttctgaagaaggaagattctgtggtgagcacctacagagatcatgttcatgcattgagtaagggggtcccgtctcgggaagtgatgagtgaactgtttgggaaggcaacagggtgctgccgaggtcaaggtggttcaatgcatatgttctcgaaagagcacaacttgctcggtgggtttgcctttattggtgaaggaattccggtggccaccggggctgcattttcgagcaagtacagaagagaggttttgaagcaggcagattgtgatcatgtgacgttggcattttttggagatgggacttgtaataatgggcagttctatgaatgcctgaacatggcagctctgtggaaattgccaattgtgtttgtggtggagaataatttgtgggctattgggatgtcgcatctcagagcaacctcagatcctcagatatggaagaaagggccagcatttggaatgccaggggttcatgtagatgggatggatgttttgaaggtcagagaggtggcaaaggaggcagttggaagggctagaagaggtgagggaccaactctagtggaatgcgagacctatagatttagagggcattcattggctgatcctgatgagcttcgtgaccctgctgagaaggaacactatgccggtagggaccccatcactgcattgaagaaatacctttttgagaacaatttagccaatgagcaagaattgaagaccatagagaagaaaatcgatgagatcctcgaggacgctgttgagtttgcagacaaaagccctcttccaccccgcagtcagcttctggagaatgtctttgctgatccaaaaggctttggaatcggaccagatggaagctatagatgtgaggatccaaagttcactcaaggcacagctcatgtctaatcttttcttgcttgcaagttggaactttcatttttgtatgactcttctttttcatatgccttatttagtgatcaaatgttacacaatgtctaatataaacaggatttgctctttaggttggtaatttggttttacgtgtcttatatttatcattgtttgtgaaactagtggcaagaatcacaatctccagaattagattgtagcctctaccaacggtgtataataaaatattgctattattctcttta

SEQ ID NO: 50134 - DNA, 690 bp, Glycine max
  Clone ID: PAT_MRT3847_16279C.1
aggttcatgtagatgggatggatgttttgaaggtcagagaggtggcaaaggaggcagttgaaagggctagaagaggagatggaccaactctagtggaatgtgagacctatagatttagagggcattcattggctgatcccgatgagcttcgtgaccctgctgagaaggaacactatgctggtagggaccccatcaccgcattgaagcaataccttattgagaacaatttagccaatgagcaagaattgaaggccatagagaagaaaatcgacgagatcctcgaggacgctgttgagtttgcagacagcagccctcttccaccccgcagtcagcttctggagaatgtctttgctgatccgaaaggctttggaatcggaccagatggcaggtatagatgtgaggatccaaaattcactgaaggcacagctcatgtctaatctttcagtattgtatgagtgttcttttcatatggcttatttagtgatcaaatgttacacaatgtctaatataaacaggatttgttctttaggttggtaatttggttttacgtgtcttatatttatcattgtttgtggaactagtggcaagaatgacaatctccagaattagattgtagcctctaccaacgctgtataataaaattttagttgttcctctatataaaaatcattttaaaaaaaaaaagggcgg

SEQ ID NO: 50135 - DNA, 487 bp, Glycine max
  Clone ID: PAT_MRT3847_1627C.1
ccaaatctgaacaatgtcacatggaaatgccacagaagagaaagtaaagtgcaattgccgaatgttttggaacactatgcaacagatagactagaaagagaaattagagatagacaacgaaaattccatgcaaaaatcagataaatcgtcgaatttgtttttattgtcaattaagctcgagatgtcccgtgtgttgagaagcttgctagctatcattaccatcatcaaccactttccctgtcagttttcatagactcgatataggttatgtttgaaaaaaattagctaaaaaattaattataagttaaaaaattaattagaagttaaaaaaaaataacttattaagttataaatattcaataaaactaacggttaaaatagatgcaaaatataaaatgacagataaataataaaatcataatttatttaaaaaagataataaaaaataaataaatatattaaacataaaagtgaaagaaaatataaa

SEQ ID NO: 50136 - DNA, 1507 bp, Glycine max
  Clone ID: PAT_MRT3847_16280C.1
tcgtcgtcgacggggaagaacgtgttcaagacggagatttgcaaagcgcgagaagaatctggtaacagtcgttacaactccaaaagccagtatggacgcgtaccagaagagtatcgtagcattattttggccaggaaaagaaaatctgaggaagagacaagcagctcttctgttggagcagggtcaagcatgcatgacccaagcagccatgttcatcagcactatgcagcagctgaatctgatcccgtagtcgtaacatcccaaccaacttcagctgaacctcataatgcccttaccgattccaacgctttcaatgactggtcacccctagatgatattactgaggttgttctgccagcttcggataaagctccatcaagggaagaagttgatgcttatatttctgggattcagcatggccggactggtaaaaagagattaccagtgtttgaagcaatttgcaagggggattgatccccattattcataatacgcctcttcactgatccaagttactcaaaagtaaaaccctgtttttttttttcctgccatttaaataatttttcccaattttaaaataaataaagtcatatttggggcgttttggaagagggcgagccctggtacagcggtaaagttgtgccttggtgacttgttggtcatgggttcgaatccggaaacagcctctttgcatatgcaagggtaaggctgcgtacaatatccctcccccataccttcgcatagcgaagagcctctgggcaatggggtacggtagtttatctgttctcagtgttctgtgaagaacagttattatactttatgtagttatcataacatatctgatgtaggtattaatgtctcaagggctattggttccaaacttccaagttaacggctgatacttagaaatgactaaatgcagtcaacaataatactcaagaatttataaatgttcaatcattgttggtgtcttcttgcttttactgtcttgagttctttgcagatctaggagctctgggaaactatcctggttcaccatttttgccatctgattcagacattttgctagaatctcctgatcaacaggatatagtggatgacttctttgttaattctgagcccccatgctctcaatcagatgaggagaaatcttgaggtgaggcgagttgcatgtttcacattaattgttaggttagggaaaattagtattaataaatgtcatctagcttacatggcatacaggtttactgttacctaagtgtaggcagcctgatttatatcatcagggtgaagatagagaatgtcaattttccatgtagtagcaaactagcaatcttttgcattcttttaagaaatctgttatcaggatgagttgggacagtggttaggatgtaattgatttgatgcatttggattatatatgtatattgtttggatccttgtcagtccattggttggtgtgatatctgattcacattgtttcagagcaatattttatttccttgac

SEQ ID NO: 50137 - DNA, 505 bp, Glycine max
  Clone ID: PAT_MRT3847_16281C.1
caaagaatgtgtgattaacaattcctggagccctggacaggaatccataacatgattcgaccccaaaatagcaagaatcagaatttgaggaaccctcgtctcatcgaagcaaaaattcttcaacacagagaaaatgaaaaagtgagattctattctaccattctttgtatcctctgacgttctctgttctcccctcaccgtactctcccgcggaggatccaccgtacgccggagaataccaccgcacaccatatccctctctctcacgatgaacgatttcgatggtctcttagccaccgatttcgggttcaaaccccaaggcaaatcagcgccaatggctgcttccaaagtctcctccaacaacaaaacttcttctctcaacttcgatttaggttcccgatccactcgcacctccaattcttccgtcaacgccgccgccgccgccgcctcctttgacgatctcttcggcgactcctccgtctttcgggcctccgccgatttccgt

SEQ ID NO: 50138 - DNA, 562 bp, Glycine max
  Clone ID: PAT_MRT3847_16282C.1
gagtcccttctttgcatgttatccactgcctcagtcccggaccttggctaccggaacggggaggacaactaattccggaagtggcactttccttctcacaatgtgagtgtctcattgtactggtccccttttcttgtgcaaggtgtagaaaagtcaaactcagggccaaatcataataagttgtatttggatcatgttgatgagaggtgggcaagggatatggatcaaatggacctgattgtgttatcaattgggcactggtttttgcatcctgcagtgtactatgagggtggttcagttttaggttgccattactgtcctggccttaattacactgaaattgggttttatgatgtgctaagaaagggcctaaggactacccttaatagcataattgataggagagtgggtaaagggtatggaattgatgtaattgtgacaacattttcacctgcacatttcgaaggtgagtgggataaggctggtgcttgtccaaagaccaagccttataggaatggggagaagcaacttgaagggatggatgctgacatgagaaaaattg

SEQ ID NO: 50139 - DNA, 313 bp, Glycine max
  Clone ID: PAT_MRT3847_16283C.1
accacgcgtccggtgtttttttataagaaaaatgaataaattaataaaaatgtattaaaatacaaaaaaaatcaattgaaaaaataaaaaaaaaagcataaaataaaataaaaaatgaagaaacattaaaatgaaaaaaataaaaaggggggggccgttttaaaaggtcgaaattaacttcccctgatactgaattaaaaaaatttttattaattggcaattaaattaattctacggtcctgcatttaaaaacgaagttgtagaaaaaaccatggaatacccaaacttaatggccttttagaaaatccctttt

SEQ ID NO: 50140 - DNA, 397 bp, Glycine max
  Clone ID: PAT_MRT3847_16284C.1
tttcagaactgttccatggtggtaagaaggtcagtggagaactagcagaatcatcattacattcaagggatgctcgacaagcaggagaatactgtcttcgttcttcagaaatgcttgattaaggccgacaccgacttggtaccttttaaagacacaattaagaactactttggaaggccgtggaaggagtattcaagaaccatcattatggagtactcatattgatgacctaatttactctgatgggtttttttattgggaagggaactttgccttaagtacactttactatggtgagtacaacaactatgtggttggttctaataccactgctagggttaattggtctggtcgcaatgttattaataaggatgaggtttctatgtacatggttgag

SEQ ID NO: 50141 - DNA, 628 bp, Glycine max
  Clone ID: PAT_MRT3847_16285C.1
gtatgtgcccccagaaagaccagatcctcatacagattatatgagagcacaagtgtcccgacgcttcatgatttatgttcatgccaagatgatgatagttgatgatgaatacataatcattggatctgccaacataaaccagagatcaatggatggtgcgagagactctgaggtggcgatggctgcttatcaaccctatcatttggctaccaagcagccagcaaggggacaaatccacggtttccgcatgtcattgtggtatgagcaccttggcttgcttcatgactccttcctccatcctgagagtgaagaatgtattgagaaggttaaccagattgcagacaagtattgggatctctatactactgagccacacttgagcaagaccttcctggccatttgcttcgctaccctgttgcgatttccagccaaggaaatgtgacacaactgcaagcatttgaattcttccctgacacaaaagctcctattcttggggctaaatctgactacattccacctatccttactacttaatagtttcatcttgtatactttgttcacaaaatatagcaagagcttgtggggttaagttcccattcgtttgcatagaaagagggtgacaaaaccc

SEQ ID NO: 50142 - DNA, 880 bp, Glycine max
  unsure (1)..(880): unsure at all n locations
  Clone ID: PAT_MRT3847_16286C.1
ttttttgtttcattttaattaaaggaaaaataatggaaatcacatagtntccttcaaacatgtatatntagagataaaacataatagaagaaataaaaatgagtctatgagaatgttaaaaacaaaagaggtttccacccatatttaggtcctctaaaaaatatataattaatggatctaaaacaaataatagtaagtttttaattccaaaggcaagagaaactttaccaaccccagaaggtccaatcagggaagacaatgtcatatgaattttcttctccacaataatggaaaacaggtggaggtgacatttttggtacttggaaatcttttttgaatacaacagtcctgtccccacattgaaacattagctccaaatctggtatctttcccgggtacaaccttagaagttgcaaaattccccatattgtaaacacatcccttgtttgatacgatttggcaaacttttctatataagcttttccgtttacaattacaagcctaaaatgtgaaatatgttttcctctttcaaccatgtcccttgtgattcctgtactctcccatggttttaaatcttcatggatccatctaaagtactctggacatgatgtattagatgaatcatcatcaaactcaagttttgttggatagtatgatggacatgttgatgctgacttcccattggtgcaattaagtgggaattgaggttgttgattattgaatactataattgtcttgagaatagtagtgcttgtaattctagactggtcaacccagttgacgatgaaattggttgcagcaaacacaaagaggaaggcgagggagaataagccataggttgaaacccatcttttgtctttgttagatgatgattggtgat

SEQ ID NO: 50143 - DNA, 371 bp, Glycine max
  Clone ID: PAT_MRT3847_16287C.1
ggctcgagagcctacacactggacattttctttaaagatgagaggggatgctaacaaacaaagtgtatgtgctaaccacttacattggtcttttataatgtgcagtatgaggcaacaagggctacatgaagtcatgcttggccacaacatagaggatattcaggaccatactcttgtgttaaaggtcacaacgacaacaacatctgccatgagcaacgggatcatcagggaagacaccaccatgactgtcactacaagttgaatgcaagtattactgactggcgaagagggttctcaacaagaccatgggaattggctgagacaacatcaacaccatccccatcaggactccgtgaacaagcgtcatgtac

SEQ ID NO: 50144 - DNA, 627 bp, Glycine max
  Clone ID: PAT_MRT3847_16288C.1
ccacgccgtccgaaaaaaaaaaaaaaaaaaaaaaaaaaaaaaaaaaaaaaaaaaaaaaaaaaaaaaaaaaaaaaaaaaaaaaaaaaaaaaaaaaaaaaaaaaaaaaaaaaaaaaaaaaaaaaaaaaaaaaaaaaaaaaaaaaaaaaaaaaaaaaaaggggggggccgtttaaaaggaccaaattttacgccccggggctgggaaggttaaattttttttttggggcccccaaaattaatttccggggccgggttttaaaaccggggggaggggaaaaccctgggggtccccaaattaaatcccttggaaaaaaatccccttttcccaagtgggggaaaaaaaaaaaaggccccccccaatcccctttccaaaaattggcccaccctaaagggaaaagggaccccccctttaacgggccattaaaccggggggggggggggggggttccccgaaaggggacccgttacttttgcaaggccctaaggccccgtttttttggttttttccctttcttttttgccccgtttggggggttttccccgaaaagtttaaattggggggttccttttggggtcccaattaagggttttacggccccttcccccaaaaaaatttttttaggggggg

SEQ ID NO: 50145 - DNA, 537 bp, Glycine max
  Clone ID: PAT_MRT3847_16289C.1
atgaaactaatgccaaatctgctcaataataataaaaaaaaagcatgtgcttggtgggtggtggggtagtattactgaccaaaaattaaaatagaaaattacaccactaagtcacaaactaaactaccaatttaaatgtattttacagaaatagttgtttatatttatcaactttttgatagaattaaaaaaatttattttttagaagaataaaaaaaagtaaagatattttttgttagaattaaaaaaattaattttctaagttttgctaaacacgttcttgtgatattttttttaatgattcttttaatgattgacttttaaaataattatcttaaaatttaataattatatcatacaattgttatataaaacttttaaaattttagatgtataactcatttttttcatttctttttctcctattggttagaacagcaagtaaagatattttggtttgtgagtaaggcaattggcattatcacgagaaatttaatgccacaaaaatcaggtctggaagcaactagcaataataat

SEQ ID NO: 50146 - DNA, 249 bp, Glycine max
  Clone ID: PAT_MRT3847_1628C.1
agcgcttgaattcgaaaatcaggatggactaccatagcaaaaacataatatgagtcacaggcattcttttgttttttaaatctataatttcttcatttttcttatagcttagtaataatggaggttgcacacttatctcgttggaaaagaaattcagatattggaattgtaaatcaaacgttagttatattgaaaaagtagtagtactactatatcactactactattgtttgaaaaaaaaaaaaaaaa

SEQ ID NO: 50147 - DNA, 505 bp, Glycine max
  Clone ID: PAT_MRT3847_16290C.1
gggacggggccaaccaaccccaaaacaagcttccccattttaaaaaacccgggcataaaaaaaccgggggcagggggcaggaaattcccaaagccaaaaaacattggaaaaataggcggggcccacccctttttattattaaaaaacctaaaacccttttatttttccctcccaagggtttttataaaacaacccaaaaaagcccggatcaaaaccaacggggggggggcacaaacaaaggaaaattcttggcccggaaaacgggggtaaaaaaatgcgaatgtggccccccaaaaaaaaaacccactggttccccaggggccttggttttgaaaccaggggccaaaaatttgggtcggaagggggcaaaatttccccacaaaagggaaaaaccacaggacccttcccaaatactcttttaattttataaaccggccaaaaaaaatttttgggggacatgaacccaccaccaaactcccaatggaatattttttggaggcccccc

SEQ ID NO: 50148 - DNA, 748 bp, Glycine max
  Clone ID: PAT_MRT3847_16291C.1
ggagtcgccaccaggaggaatcaaactcttcgtcaaagcactagcgtttgcaaacacacaaccctctcctctcctaatccataaaaactatctttcatttggcctcgagtagaagagaaagatgagtgtagaaattttggatggtgccaccattgtcaacttccttcaggatgaagaagcattcagtgcctcagttcttaaccggttcgcctaccttgacacagacaatgatggccttctctcgtatgcggagatgttgaaggagctccaaagcttgagggtgttggaaacgcactttggtattgatgtggagccagacccagatgagcttgctcgtgtttatgaatccttgttcgtacaattcgatcacaacttgaatggcaccattgatctcgacgaattcaagaaggaaacgaagcagatgatgcttgccatggcaaatggattgggcttcttgccggttcagatggtcttggaagaagacagcatcctcaaaaaagctgttgaaagggagttcccaaaagtggcttcttaagtactaatttactcaagcctgtaattcaaaaagttctagtattgtaatatttttaatgtcctgttttatattactgtttccagtataacgacttacactggcttttttgtaataaattcctcatggtcgtgaactgatcttaatgactttttacacatccataaaggaaaaattacacctgagaatgatgaaattattactgtctaaatccac

SEQ ID NO: 50149 - DNA, 509 bp, Glycine max
  unsure (1)..(509): unsure at all n locations
  Clone ID: PAT_MRT3847_16292C.1
ttttgacccaacgcccaatgaacagatgcgagaccgagtgaagaaggacatcatcgaggcggtggaacgtcgtcaaaatgcgaattcactggcaaacagagacgaggaggtggacacgatcaagaaccatctgtcgaagatggcacccgacccgaatctgaacaaactcatcggatcgcggaagcccttcttttacacgcccaaggaatttggggattggcgttccgtcatcagcagcgttttgcgtaagcaatatgtgctccaactgttcgaggcgctttgccccgaattcaccggctcaaatgtggtggatttggcagtgaaaaatccaagccgtgccgacttcatccaaaagtcgctgaacttcgtcttcgatgccgaaaatgaacttttcggctcttncacttttcgcgactcttattttatggcaatcgctgagaaaatctttacattgcgcgaggcgaaagaccgtcaaaatttggagaaaagttgccaaaatgggacgactg

SEQ ID NO: 50150 - DNA, 845 bp, Glycine max
  Clone ID: PAT_MRT3847_16293C.1
gcaccagaggaaatggagatggaagagacattgatactcatgatttcttagctataactctaatagtaaaccatgatttcacgttgtttatgaggaccttcgagtcgctgctgtcaggagatgcacatcaacctccatcatcttctgcattcacatcaagtgcacacatgaaacaacaccacaatatcataagttactataactagttaggggtgatatgcaagtagtgctcacttctcctatgtctgtcaagtgattcaacagattttgggtatgctttcatcttatctatttaaactaattaaagggatgatattttctatacttttatagggtatgagattctctagtggagtcttttgtattttcacaaatttcagttctgtctagactacttccattagaagctcaactcagcaaaaaattatccgatcctgcactcttgtgcatatgtaccatgttcttcctatatgcatcacaagttgtaatgtgtgaataaaatagtttattttaaaaaaaaaaaaaaaaaaaaaaaaaaaaaaaaaaaaaaaaaaaaaaaaaaaaaaaaaaaaaaaaaaaaaaaagaaaaaaaaaaaaaaaaaggaaaaaaaaaaaagggggggccattttaggggggcgccgcttttaaaggtccaattttcacgtccccggccttgcaatggtttaccttttttttagtgccccgaaagtcaatttcccgggccgggcttgaaaaacccttggcttggaaaaaccttgtggtctcccaattaattccctttgagcaaaatccccttttacccagttggcttaataccaaagggccctaccccaatggccctccc

SEQ ID NO: 50151 - DNA, 499 bp, Glycine max
  unsure (1)..(499): unsure at all n locations
  Clone ID: PAT_MRT3847_16294C.1
attctcccaaaattcaatccccacccgtaaaagggctggcctttgattaaacgaaattttgattacatccgtcacatatcctcacatgcatattggtgtcaatatcatgggggtgggttatttaatagatgaattgttgctcatggcaaaatccagaatataacaatttataattggcagcatattgtgcataattgtcaatgtgatcattcatcccatatggactggtttcgaattctttgttttagtcacagggaacctcgaaaaactgaccaactccttgcaacgttactacatcaatatacaatctcatattgggaaagctatattgtgaacactatggtacaatgcatacacagggaaaccaagaatactcgtgtaaactaaaattcaagaaacaatctataattgatagaaatcctcatcaagtgctttatatctattgcaatgataatattttttcacatttaatatattattatttccattaaaanaaaaa

SEQ ID NO: 50152 - DNA, 245 bp, Glycine max
  Clone ID: PAT_MRT3847_16295C.1
ggcaaaggaaaagcaaatgtgaccgcactctctccgccgatgcaaaaacgaacctaagaaccgtgcttcccgtgcaatccaattcatcttcgtttggggattagcaaccctaattcaccttttctgataatcaaccaggtcatggctgctatgaagataattgcaatatgtcagtcgggaggtaagtttgtgactggcaaagatggttgtctgtcatataaacgtggtgatgctcatgctataga

SEQ ID NO: 50153 - DNA, 594 bp, Glycine max
  Clone ID: PAT_MRT3847_16296C.1
cacaatgtcacactaaggaactcataacaaacccattaagccacggtgcccaaaagattagggaagcaattgagttgctaaatgatgagtacataaggtcacaattggacttcattaggtgccatgagcaattggataggataagggcctcgtatttggaccaaggggagccaaaaaatgcacccttttatggaaaccctaatctcactattgtgagttggatgagcatgcccgtttatgaggctgattttgggtgggggaagccggggtattttggtcctggtgctgtgtaccctgatggaaaggcttacattattcgaagctcggatgaggatggctcactcgttgtgtcggctcacttgcaaacagcacacaaggagcttttcaaaaagttcttctatgaggacatatgaggattttgtgaacgactttttttttatttttttatatatcttatgcttgatgcatgctaattttcatttgtacaacttggtttcgtcgtgttttgtgttactttttcttttgtcattgttaatttaatgaaaattttgccttgtttggtataatgttgatgaaattttgtcttgttttatt

SEQ ID NO: 50154 - DNA, 422 bp, Glycine max
  unsure (1)..(422): unsure at all n locations
  Clone ID: PAT_MRT3847_16297C.1
ggcaattggttatcggatttttgtttncattttatttgttttcttcatggggagaaaaatatcgctgcgtaaatgtttcaagtgtaataatagggacacaacagatacaagttgataggaaggaacgttgttcagccatttactttgtataattccttttgatcgagttttgcttgttaactctttagttttgtgaatttatctttgattaatgaagagcaaatgtaatattattattagcattnaaaaaaaaaaaaaaaaaaaaaaannnnnnnnnaaaaaaaaaaaaaaaaaaaaaaaaaaaaaaaaaaaaaaaaaaaaaaaaaaaaaaaaaaaaaanggggggggccgttttaaaggatccaaatttacgtacccgtgcatgcgaacgaatagtttttttttaggggcacctaaattaa

SEQ ID NO: 50155 - DNA, 598 bp, Glycine max
  Clone ID: PAT_MRT3847_16298C.1
gatgtctcttagagagaaagaatcccttgaattgcgtatacacagtgaatcttattctgattcttctgacagcgggtgtgaagattcaatcgcaaaaaaggataacatagatgtgactgtggaacaaaactcatgtttggttgttgaaaaaaatgctatgaattcatccacctcagaagtgttgagttcccagtctcttgacggtgaagaatcaattaaagtttccttgttcagtgaatcatctgatgctgttgatgaggatacccatgacatactagctgaagtttcacctgatgcttctgtgtcaagcgaaagacctattatcacaatgacagaacctttatgctccagaaacttcataacttctgacagtctatattcaaagtcactcggaagctaccccttggaaattgaatcttgcaaaaacaattcaggtgatgctactctgtgtatttcagatagttccatgatgcatatatgttgtgaatcatccccccatgtagctcgtcaaatcatggaatcccaggatggacttgctttctctggctactgccaatctctgggatcaaatgataaatcaactgtcaactctgttgaa

SEQ ID NO: 50156 - DNA, 293 bp, Glycine max
  unsure (1)..(293): unsure at all n locations
  Clone ID: PAT_MRT3847_16299C.1
gaaaattaaacaaaagctagatttgggcaattatcaaagtctacgaggcccaattactacatcaatttttaggactttcccccggggagcaacaacttaatatttactaattgcccactcattcatcctacatttattatcttatacccccttcactattaaagagtcgnccgagaactgacaaggaattgtataacatttggtcagcattctcataagactggaacattatcgaaaaaactatttgcatttcgtccaaacatgtttctatctatcatacaatatacatttac

SEQ ID NO: 50157 - DNA, 337 bp, Glycine max
  Clone ID: PAT_MRT3847_1629C.1
atcaaaaaaaacttcttctgcaaaaactaaaaatgccttttcccataccaggccctctgattttaaagtatacatttacctgggccccctggaccggatggaaggaatgaaaaacccccaaggagggggaaatgatccctaatgtcttggaaaacatggaacactcacgactttccaattgtagaaatttcggtgtccttatgccaaacacaagagggcttttcctaaaacttcccttccctggccaaagaactgggctccccgctaagggccccttatctctaaaggggcctcgctccggtagcctttcccggcccgctgattgctggcccaataa

SEQ ID NO: 50158 - DNA, 245 bp, Glycine max
  Clone ID: PAT_MRT3847_162C.1
cttaccatctttccttatatcaggccaaccagagcggggcccaaaaatagcaaagcggaacccggggggaaaccgttatcccctaaaaatggcacacaacaaacaagccggaaaaataaagaaaaagcctggggggccaaaaaagggagcgaacaaaaattaatagcgaagcgctaactgcccgctaaaaagaaaaaaaaccgggcccgccaggagaataaaagaaccagccaacgggcggggag

SEQ ID NO: 50159 - DNA, 470 bp, Glycine max
  Clone ID: PAT_MRT3847_16300C.1
ttgatctccaaaaattgttcagaaacccaagaatcaaatcaaaattgggtttcatttctctctttctctcccactgtagagctgctagctaggcttggttacttcaaaccctctctgcttttcttcacttttctgttttgtgacttttgtccactgattccaacattaaacaaaaattggtccaagttcatttgtatatgcaatatctggttcaacagtaaaaaggtctttaaattttatttatactatagtatcagagtagcctctgaagaactctgaatcaagagaaagaaaaacaaaggacaacttggaataccaaaacctcaattttgagagatttttgaagatagatagagtcaaagagagatcaaggggtagcttaaatttttcagcttttggagaaagagacatcactcacgcaccaccgagatccattttttcaagacagttgaagaaaaaaaaatggaaac

SEQ ID NO: 50160 - DNA, 597 bp, Glycine max
  Clone ID: PAT_MRT3847_16301C.1
tactttgttgagtggattcccaacaatgtcaagtctagcgtgtgtgatatcccaccaaagggtcttaagatgtcatccactttcattgggaattcaccatcaattcaggagatgttcaggagagttagtgagcagttcacggcgatgttcaggcgcaaggctttcttgcatttgtacactggtgagggaatggacgaaatggagttcaccgaggccgagagtaacatgaacgatctggtggcagagtaccagcaatatcaggatgctactgctgatgaggaagagtatgaggatgaagaggaggaggcttaaggcatctgagttgccaaggttgtatcgaattgtaacgtggatggatggctttcagcgagtttaaaatgtggagcagtaaaaaaacattgacttgttcatgtgtttgctgtatgaattgatgagggtcattgtttaacctgggttctgttgagaatgcttatttttaagtcgtcgaatgttctacaggtagatgaatatatacatcgacgatggcagttctcgtatttatattccatttaccctttttctgtcgatatgttgattatgtttggtcggcattgaatc

SEQ ID NO: 50161 - DNA, 1907 bp, Glycine max
  Clone ID: PAT_MRT3847_16302C.1
cccacgcgtccgcccacgcgtccgcccacgcgtccgatttttagaagaacagcaagaaaagggaagggaggagaggggagagaaaatgccaatattagaaggttgtagatggaattagtgaacatacccgctcaaagcgacacccaaattacacgcacaaccacacctttaaattctccgcagaaggaaaaaaaggaaaaaagataaagaagccaaaagtccctcgttccatttccccctttcctccgcccggcgagaaaatgagagaaatcctccacatccagggcggccaatgcggcaaccagatcggagccaagttctgggaagtaatctgcgacgagcacggcatcgaccacaccggaaagtacagcggcgactccgaactccaattggaacgcatcaatgtctactacaacgaggccagcggcggaaggtacgttcctcgcgccgtcctcatggatctggagcctggcacgatggactcggtcagatccgggcctttcgggcagatattccgccccgataattttgtgttcgggcagtccggcgccggcaacaactgggccaagggtcactacacggaaggtgccgagctcatcgattccgtcttggatgtcgtgaggaaggaggccgagaattgcgattgcttacaagggtttcaagtgtgccactctttgggaggtggaactggctcgggcatgggaacgcttctcatctctaagattcgggaagagtaccctgatcgtatgatgttgacgttttccgtttttccttcccctaaggtgtcggacactgttgtggagccgtacaatgccacgctttctgtgcaccagcttgttgaaaacgcggatgagtgcatggtcttggacaatgaggctctctatgatatctgtttccgtacattgaagcttgctacaccaacttttggggaccttaaccacctcatttctgctaccatgagtggagttacttgttgtctacgtttccctgggcagctgaactctgatcttaggaagcttgccgtgaatctgatcccattccctcgtctccatttcttcatggttggatttgcaccattgacatctagaggatcccagcagtaccgcaacctgactgtgccagaactgactcagcagatgtgggattctaagaacatgatgtgtgcggcagatcctcgccacggtcgttatttgaccgcatctgcgatgttccgtggtaagatgagcaccaaggaagtggatgagcagatgatcaatgtgcagaacaagaactcttcctactttgtcgagtggattcccaacaatgtcaagtctagcgtgtgtgatatcccaccaaagggccttaagatgtcatccactttcattgggaattcaacatcaatccaggagatgttccggagagttagcgagcagttcacggcgatgttcaggcgcaaggctttcttgcattggtacaccggtgagggaatggacgaaatggagttcaccgaggccgagagtaacatgaatgatctggtggcagagtaccagcaataccaggatgctactgttgacgaggaagagtatgaggatgaagaggaggaggaggcttaaggcgtctgagttgtcaaggtggtatcaaattgcaatgtggatgaatggctttcaacaagtttaaaatgtggagcagtcaaaaaacattgacttgttcttgggattgttgtatgaattgatgaggatcgttgtttaacctgggttttgttgataaagcgtattattaagtcatcgaatgttttagtaggtagatgattatatacatcgacgaccgcagttctcgtatttatattccatttaccctttttctgtcgatatgttgattatgtttggtcggcattgaattaaacaagaattcatccgtttgccattatc

SEQ ID NO: 50162 - DNA, 1002 bp, Glycine max
  unsure (1)..(1002): unsure at all n locations
  Clone ID: PAT_MRT3847_16303C.1
tatgtgttaaacaataatgtatcaaatttcatttgagcccaaaactgaatttgatatttttagaagaacggcaagaaaatgcaaatattggaggagatgaggtggttttggacactcccaaattacatgcacaaccacaccttttaattctccgcaccaatcttttagtagataaaaagcgaaaagaggttcgttccatttcccgcttcttcttttttccctcacttttccccggcgagaaaatgagagaaatcctccacattcagggcggccagtgcggcaaccagatcggagccaagttctgggaggtgatctgcgatgagcacggcatcgaccacaccggaaagtacagcggcgactccgaactccaattggaacgcatcaatgtctactacaacgaggccagcggtggaaggtacgttccacgcgccgttctcatggatctggagcccggcacaatggactcggtcagatccgggccgttcgggcagattttccgccccgataacttcgtcttcgggcagtccggcgccggcaacaactgggccaagggtcactacacggagggcgccgagctcatcgactccgtcttggatgttgtgaggaaggaggccgagaattgcgattgcatgcaagggtttcaggtgtgccactctttggggggtggaactggctcgggcatgggaacacttctcatctcgaagataagggaagagtaccctgatcgtatgatgttgactttttccgtttttccttcccctaaggtgtcggacacagttgtggagcgcggacaatgccaccctttctgtgcaccagctcgttgaaaatgccgatgaatgcatggtcttggacaatgaggctctctatgatatctngtttcgcaccttgaagctcgctacaccaacttttggggaccttaaccacctcatttctgctaccatgagcggagttacctgttggctacgttttcctgggcagcttaactctgatctaagaagcttg

SEQ ID NO: 50163 - DNA, 2205 bp, Glycine max
  Clone ID: PAT_MRT3847_16304C.1
ggctcgaggatgaagaagaaaccgtgtcgacttcggaggacgcaatttacggggagaaggtggagcctgagtttgatttgatgaagacaatgctgcgaaagtcgtatacgccgaagaagcattaagcggaggaaaaaaacgttgaattggaggtggggaatagcagtaaggacactcttgtgaacgaggaaaggaaggaagtgaagggctcaagttcgggttcggtttcgaacaggaaggacggaccgaggtttaaggatttgggtgggatgaaggaggttttggaggaactgaagatggaagtgatcgtgcctttgttccacccccaattgccaagacagttgggagtgagaccaatggctggcattttgttgcatggaccacctggctgtgggaagactaaacttgctcatgccatagctcatgagactggtcttcctttctatcagatttcagctactgaggtggtttctggagtttcaggtgcatctgaagaaaatattagagagctttttgctaaagcgtacaggtctgcgcctgctattgtctttattgacgagattgatgcaattgcatctaaaagagagaatttgcagcgtgagatggagaaacgtattgtgacgcaattaatgacttgcatggatcaatcaaataggcttcttcaaccagcggatgatgtggagagttctggtgatgatcatcatcctggctatgttcttgtaattggagctactaataggcctgatgctgttgaccctgccctaagaaggcccggccggtttgatcgtgagattatcattggcaatcccgatgaatctgccagggaggagatcctttctgtgctcacttgcgatcttagacttgagggtttatttgatctacggaaaatagccagggctacatcaggattcgttggtgctgatttggcggctctggttgacaagctcgagccgaatcggctcgagagaagaagacagaaaaggaaacgtgaattatctcaagatctcacgagtgagcatgctgaagactggtggagggaaccttggtcggttgaagaaataaacaagcttgccatcaaaatgtccgatttcgaggaagcagctaataaggtgcaaccttcattaagaagagaagggttctcttccattcctaatgtaaaatgggacgacgttggagggcttgatcttttaagaaaggagtttgaacgttacattgtaagacgtataaaatatcctgaagattatgaggagcttggggtggatctcgagacgggatttttgctttatggacctcctgggtgtggtaaaacactgattgccaaagctgttgccaatgaggcaggggctacttttattcatattaagggacctgaacttttaaataaatatgttggagaaagtgagcttgcagttcgtacaatgtttagccgtgcaaggacatgtgcgccttgcatacttttttttgatgagattgatgctttgacaaccaaacgtggtaaagaaggtggttgggttgttgaacgactattgaaccagttgcttgttgagttagatggcgctgaacaacgaaaaggtgtttttgtgattggtgctacaaataggcctgaggtgatggatcgtgctgtcctacggcccggaaggtttggtaaacttctttatgttccacttccaagcccagatgaacgagttttgatattgaaagctcttgcaaggaagaaggctgttgatgcctctgtggatttgagtgccatagcaaaaatggaagcttgtgaaaacctaagtggcgcagatcttgctgcattgatgaatgaagcagcaatggctgctcttgaagagagattgacctctattgagacaacttgtgatacattgaccatcaagaggaccatcaagaggcaccattttgaggtagcactgagtaaagtgtctccgtctgtgtcagacaggcaaaagcagtattatcagcatttgtcagagggctttaaagcagcatgagcagcatgacattcactttgttattttagcaggtgtcgacattcctttaaagaatggggtgaaagaaatcatttatatgagcgtcaagtatttagagtatttgcttttgtaatgagatgtacatgtttcctgcagtcaggacataatttttggcaaatggttataatttatggttcactttatccaataatattgttccaaattttttgtt

SEQ ID NO: 50164 - DNA, 522 bp, Glycine max
  Clone ID: PAT_MRT3847_16305C.1
gcagaggaaaacacaaggatcatgcatgagcaaacatgaaaacgaaaggtatgcagtttgtagaacaaaaagtatgttgaacgcttatgcatgatggtgcaatgactcatgcaaaatgcaatgctggaatatgataacagacaaatgtaggaacaatatgttcattatgatgccttgaagagatgcttatgcggtgcatgatatgaatgcatttaccgacacgagagaccgaaaaatcatatcttcttacttgcgcatttgggggcgcagtgccccatgtgtacagttaagaaggtgatatggaccttccggcttcccgtgacaaaagacgagaccaacatataatgcatgtgtgacgacatgatgcagacgcgcaaaagcgaaacacacagcaaaggcgtacatgacatttaggctatatgcatggcagtgtttaaaaggcacgcaacgtgttcgcttcgtgcccttatcttagggacctacacggggaggaaactaaaagggctttttagtggataattc

SEQ ID NO: 50165 - DNA, 384 bp, Glycine max
  Clone ID: PAT_MRT3847_16306C.1
attggcaactcagaaattagtgttgcgtaaattttaagaaaatgattgtaaagtcaacaattttttttttgggaaaatgaaaggggcctaagcccagggatagttacaaagcaataatactaccaggggttgtcacccctaaaacatcataaaacagaaacactgtcaaatgagaagaaggttgcgctaagagcataaattctacccccacgaatgtgctagattggctaaccttccttccacctaaactttttgtacaacacaattagttaatgaatttcagcgcagataacagaacacaaaaggcttttgcatacccatggaaaaaattgagattctagctaactagtaggcactattatgtgtcaatctgcatcttccacc

SEQ ID NO: 50166 - DNA, 458 bp, Glycine max
  Clone ID: PAT_MRT3847_16307C.1
cagaagcagaattcggtgacggagcgcggcgttggtttggagattgatgaagatcacaccggatctgatattgtgcgtgatcatcatcatgatggggaggagagtgaagaaaacaagggaagccacatggtgtttgaggttgatcagggtttggatagaaaagatgaggaggcagagaagagttgtgattgttctgtgtgtgatgctagtgtggagatactgtgtgatgaaatttgcaagttggatttgggtgtggagaaaggaaaagaaacaattgaagaggaaagtttgaatgtccctaatcctaatgttgatgatggtgatgatgatgttggtgttgctgatgatgatgatcaagcttgcgagaaattcagtgctcaagttgattgcactagagagataactgtggagactttcacccatacatcttgaatttttcattcatggtgatgattgca

SEQ ID NO: 50167 - DNA, 1139 bp, Glycine max
  Clone ID: PAT_MRT3847_16308C.1
ccacgcgtccgggcagttgggagtgaggccaatggctggcattttgttgcatggaccacctggctgtgggaagactaaacttgctcatgctatagcaaatgagactggtcttcctttctatcatatatcagatcctcttgatacaaagtcaggtgattggtcagaattatcaatatatatttttttccctcaagttcaagagttactattctagatcaaccttacaattagatgcccttccttatctttaagtttggggtgaatcttgagacaggatttttgctttatggacctcctggttgtggtaaaacactgattgccaaagctgttgtcaatgaggcaggggctaattttattcatattaagggacctgaacttttaaataaatatgttggagaaagtgagcttcaagtttgtaaaatgtttagccgtgcaaggacatgtgcaccttgcatactttttttttctgagattgacactttgacaaccaaacgtggtaaagaaggtggttgggttattgaacgactattgaaccaggtcaaatacatagccattttagctgataacaacatggaaaaatgacagttatatgaaattgcagttgcttgttgggttagatggcgcagaggaacgaagagatgtttttgtggttggtgctacaaataggcctgaggtgatggatcgtgctgtactactacggcctggtaggtttggtaaacttctttatgttccacttccaagcccagatgaacgagttttgatattaaaggctcttgcaaggaaggaggctgttgatgcctctgtggatttgagtgacatagccaaaatggaagcttgtgaaaacctaagtggcgctgatcttgctgcattggtttgtctctgctctttattgatgttgtctgtttcatccctttaccattgttgcatgttgtgcatgtatgtgtatggttgtttgattctgggcgggtacaaagtactacaactacaaaggttggactatagaaaaagtggtagtcagtttgagagagatactgattttatggactatacagatgaatgaagcagcaatggctgctcttgttgagaatttggactcaattgagacaacttgtgatacattgaccatcaagagtccaatc

SEQ ID NO: 50168 - DNA, 209 bp, Glycine max
  unsure (1)..(209): unsure at all n locations
  Clone ID: PAT_MRT3847_16309C.1
gcgagcgtgcctcagcgtctgaacacctgtnntccatgcgtgttaaagcgctctcgttcacaccctctcacaccgattcaatgttcagagtgtttcnctgtcataactcgcgagttgtgcgggcaccgcaaactcgagtgaattacgcgccatggtcgcctctccatccctctgccctcgcttctatcccttcaaacagccggtgcgag

SEQ ID NO: 50169 - DNA, 278 bp, Glycine max
  unsure (1)..(278): unsure at all n locations
  Clone ID: PAT_MRT3847_1630C.1
caattactactttctctctctttgtaacttgtaagcatggagtcctcaaagatctatgcttacctcttcctttgcatgctcttcctctcctccgccactcccattctcggttgtggctactgtggcaaaccccccaaaaagnacaagnctggnaaaacnncnaaganaaccnnagnaaccggtnntaanncnacanntacaatccctcccattgntaatccancagtnncnatcccttccnatggtaatcaacangggngntncnaccggttgngttc

SEQ ID NO: 50170 - DNA, 268 bp, Glycine max
  Clone ID: PAT_MRT3847_16310C.1
gacacctaaggtcaaactgcgatacccggtgagggtaagcatatcaataagcggagaagttacaacacatacattaactaaaaatgactctatatacaggatatatgcgttcttacactatcatacaacgtcattaaatgtctatacttgcatatatatgaaattcattgtaactatcgataaactaaacgcactgtgcacccttagccattaatgatcttattaatcttgcctgacattcacatattgatagcttaactcatacctt

SEQ ID NO: 50171 - DNA, 211 bp, Glycine max
  unsure (1)..(211): unsure at all n locations
  Clone ID: PAT_MRT3847_16311C.1
gcgtagcctttgatcatattccgaggttgatattctgaaagtgctggacattcttctcataggatgttntcggaagaggacgttgtattgaagctctgggggggccgtgaaaaaggggggaggcttataggcaaaggcgggtctggggggcgggctggtgcagggcgaaactggggcgtgggtgcgagagtgggggggggtggggctggtg

SEQ ID NO: 50172 - DNA, 145 bp, Glycine max
  Clone ID: PAT_MRT3847_16312C.1
cgatccaaccgaggacacttgtacaccagagcggtgcttactcttatggcctatagaagacctaggctactacacaaatgcgctactattccagagaaggatgtactctggcatgataagctcctcttacaaactgaaccttccg

SEQ ID NO: 50173 - DNA, 297 bp, Glycine max
  Clone ID: PAT_MRT3847_16313C.1
ggaacaagggaagggaaaagggggaaataaactataaggggagccttttgcccgtcccaattacttcaaaaaaaaaaaatagaaatagaattttgggggggggaatttgaaaaaagaaatcatgggggggggggggcaatcttgaaagaggggaaataacccccctggaaaaattggcgggaaacaaacgacaaaagggacattttataaaagctcatgtaaccctgggagaacaaaagggcctttgggggccaggggtatccccaaatattattttttttctttttggggctaaaa

SEQ ID NO: 50174 - DNA, 231 bp, Glycine max
  Clone ID: PAT_MRT3847_16314C.1
tgcagacgtttgggcccaaccttactatcgagacggattcatgcgacctgcgcaccatacgccatgtcatgtgcaagtatgttcaccgcccaagtcatggacttgccgtattgcacgagtcgcgacggcatgtaagatgatcgctgccaggggtgtttcgggtactaccaataccattatcaacttgctgatgaacagcaccttacacaggactcatgtgacgctctatga

SEQ ID NO: 50175 - DNA, 293 bp, Glycine max
  Clone ID: PAT_MRT3847_16315C.1
aaatgctaacatattccaatggggtttattgagacatggcaaagaccttattaaacggattaataggcactcactaggtactaatgtctgaaacagtttctattgtcttggaacggcaacattgcatactcaatagactaattgtacgtaaaatgctctaaggaatatatagcaccagtgtacatctttaagttatggcatatctggctgacacttgaaaatatttctggggctcaaacccgtatgtctgtgacccgtatgataacttcactcagcgggtctcattggctacc

SEQ ID NO: 50176 - DNA, 1982 bp, Glycine max
  unsure (1)..(1982): unsure at all n locations
  Clone ID: PAT_MRT3847_16316C.1
ggccaaagggtgatgctgatgggtatgacctagttgttgttgatgccatgcacatggctaattatgccagtcgaatatgtcattcttgccgacctaattgtgaagccaaggttaccgctgttgatggtcaatatcaaattggtatttatagtcttcgtgaaattcaacatggtgaggagatcactttcgactataattctgtaacagagagcaaggaggagtatgaagcgtcagtttgtttgtgtggaagccaagtatgccgagggagctatctgaatctgactggtgaaggagctttccaaaaggttctgaaggactctcatggaattctcgatcggcattgtttgatgctagaagcttgtgaattaaattctgtgtctgaagaggactataatgacctgggaagagctggtttaggcagttgtttgctcggaggcctgccggattggcttgttgcgtatgcggctcgccttgtgagattcatcaattttgaaagaacaaaacttcctgaagaaattctaaagcataatctagaagaaaaaagaaaatatttttcagatataattcttgaagttgaaaggagtgatgccgaggttcaggctgagggagtatacaaccaaaggcttcagaatcttgctgtcactcttgataaggtgattctgcactctgctatccatatttcctttttcactattcttgtttttgatgttgataagaagaaaaacactttgcatttaaaatatgatcatagaggagagaaatggtaaaggccaatgcttttggtgtgggcttgttgttaaccattaatgactgagccgatactgttaagataaagaagctacatggtaaggtatgttatgagatgtatttttggcgatccacggaaagcaccacctcctcttgagaagctcagtcctgaagcaactgtttcctttctctggaaaggagagggttcatttgttgaggagcttgttcagtgcataactcctcatgttgaagaaggcatcttgaatgatctcaagtttaaaattcatgctcacgatccttcaaattctggagatattcaaaaagagcttcgtaaatctctgttatggttgagggatgaggtccgaaatcttccttgtacatataaatgtcggcatgatgctgctgctgacttaatccatatttacgcttataccaagtacttctttagaatacggaattatcaaaccattacatcaccacctgtctatattagtccacttgacttaggtcccaagtacactaacaagctgggagcagaatttcaggagtatcgaaagatatatggtgaaaattattgtttaggacagctgatattttggcataaccagagtaatgcagatcctgatcgtagcctggctagagccagcaggggttgcttgtctttaccagacaccaattccttttatgccaaggctcagaagccatcacgacattgtgtttatggtccaaggaccgttagatctatgctggctagaatggagaagctgccgcagagatcttggcccaaagaccggatatggtcattcaaaagttctccgaaattctttggtagcccaatgttagatgctgtagttaataactctccgctggacagggagatggttcattggtttaagcacagacctgccatattccaagccatgtgggatcgttaaatttttgcatggtttggggaattttggtcagagcacactcgataatttatagatatggaggatggttcatcattcagagctgcctgcctgttttagcttggggggaggaggtatgtaattattaaaatccaaaagcgtcattccttgtaccgcttttcagtcattcttgtgtacagttttttttgccattgatttgtaattcttttgattgtagggaattgtttaacacttatgtaatattaaatgaaagttaggaagaaaaaaaaaaggttaattccagtcatccnagcttacgtacgc

SEQ ID NO: 50177 - DNA, 2835 bp, Glycine max
  Clone ID: PAT_MRT3847_16317C.1
ggagtaaggagaatagattgttatctgagaggaagcataggaataatgaaacacatggtggtttggataatggagattatgcttctgatagagaaagcaggaggcgtttatcaaagttgaataagaaatatttcaactcggagagtgagacatctgatgactgtgatagatcttcggtagatggcaagagtgatagtgatactaccaccactgacattgaaagcgaccaagatgtctattcagaaaatggaattggggactcgaggggagatgtgtatttcacacctgatgatgggttggatttcattactgatgagcgtgaatggggggctcgcatgacgaaagcaagtttggttcctcctgttactcggaagtatgatgtcattgatcaatatatcattgtagctgatgaagaggatgtgcgaaggaagatgcgggtttcattaccagatggctatgcagagaagctgagtgtgcaaaagaatggcattgatgagtctgacatggaactgcctgaagtcaaggattacaaacctagaaaacagcttgaaaatgaggttgttgagcaagaagtttatggaattgatccctatacccacaatctcttactagattctatgccgaaggagttggattggtctctacaagagaagcatttgtttgtagaagacaagctccttcggatgttgaataagcaggttaatcattttactggaactggaaacactccaatgagctaccctttgcagcctgctattgaagaaattgaaaggtatgcagaggagcagtgcgatgtgagaacagtaagaatgtgtcaaggtatcttaaaagccatagcaagtcgtccggatgacaaatatgtagcttatagaaaggggcttggtgttgtttgcaacaaggaagaaggctttgctgaagatgattttgttgtggagtttttgggagaggtttatcctgtgtggaagtggtttgagaaacaagacgggattcgatctctgcagaaagatagtaaagatccagcaccagaattctataacatctaccttgagaggccaaagggtgatgctgatgggtatgacctagttgttgttgatgccatgcacatggctaattatgccagtcgaatatgtcattcttgccgacctaattgtgaagccaaggttactgctgttgatggtcaatatcaaattggtatttatagtcttcgtgaaattcaacatggtgaggagatcactttcgactataattctgtaacagagagcaaggaggagtatgaagcgtcagtttgtttgtgtggaagccaagtttgccgtgggagctatctgaatctgactggcgaaggggctttcgaaaaggtactgaaggagtggcatggaattcttgatcgtcattatttgatgctagaagcttgtgaattaaactctgtttctgaagaggactataatgacctgggaagagctggtttaggcagttgtttgcttggaggcctgccagattggctagtttcctatgcagctcgccttgtgagatttatcaattttgaacgaacaaaacttcctgaggaaattctaaagcataatcttgaagaaaaaagaaaatatttttcagatataattcttgaagttgaaaggagtgatgccgaggttcaggctgagggagtatacaaccaaaggcttcagaatcttgctgtcactcttgataaggtaaggtatgttatgagatgtatttttggcgatccacggaaagcaccacctcctcttgagaagctcagtcctgaagcaactgtttcctttctctggaaaggagagggttcatttgttgaggagcttcttcagtgcataactcctcatgttgaagaaggcatcttgaatgatctcaagtttaaaattcatgctcatgatccttcaaattctggagatattcaaaaagagcttcgaaaatctctgttatggttgagggatgaggttcgaaaccttccttgtacatacaaatgtcggcatgatgctgctgctgacttaattcatatttatgcttataccaagtacttctttagaatacaggattatcaaactattacttcgccacctgtctatattagtccacttgacttaggtcctaagtatgctgacaaattgggagcaggatttcaggagtatcgaaagatatatggtgaaaattattgtttagggcaactggttttttggcataatcagagtaatgcggagccagattgtaccctggctagaataagccggggttgcttgtcattaccagacatcagttccttttatgccaaagctcagaagccttcacgacatcgtgtttatggtccaaggactgtcagatctatgctggcaagaatggagaagcagccccagaaaccttggcccaaagaccggatttggtcattcaaaaattctccgaaattttttggtagcccaatgttagacgctgtaattaataactctccacttgacagagagatggttcattggttgaagcacagacctgcaatattccaggccatgtgggaccagtgaagttttgcttgcatggtttggggaaaacccttgttagagattagagagtggttcatcattcagaactgcctgcctcttttagcgtggggagtctaattattaatccatagcataagttcttgtttcgctttgtccttcattcttgtgtatagttttcttgacctttgatttgtaattcatttggttgtagggcattgttttactcttgtctaatgtgaaaagaaatgaagggaaaataggtttaattcaaaataggtttatttcaagccatctgtcttatctgacttgagtcaaa

SEQ ID NO: 50178 - DNA, 971 bp, Glycine max
  Clone ID: PAT_MRT3847_16318C.1
ccacgcgtccggtcttctactgtgctgtgcggcgaagcaatggcggaagaagcaattctgggatacctagagaagaacgatgagattagagactcgggtgaattcgcagctgaacgtggcattgaccacaacgagatcgtgaatgtgataaagagcttgcacgggttcagatacgttgacgcacaagacattaagagggaaacatgggtactcactgatgaggggaaaacgtatgctactgttggatcccctgaagttcaactctttttggccataccgcaagagggtatctctaaggaagagcttcagaaaaagctggatccttctgtcttcaagataggttgtgctcaggctgcgaagaacaaatgggtggagatggggaaacagctgatatctagaaaggtccaacatgtggatgataaggtcaaagatcttcttcttcaaatacaacaggggctgaacattggttcagacgaaatcaaagcactcaaagtgagaaagctcatattaccacagacgtggaagggttactcattgaaaaggggtcctaattatgcacccaaaagaaagaaggttgtcactgatctgactcgtgataattttcagagtggtgagtggaaggaactagagttcaaggagtacaattatagtgctaaaggtgctcctcttgagggtggcaatcttcatccgttgctgaaggtacgtgctcagctgaaacagattttcctctgcatggggtttgaggagatgccaacaaataatttcgttgagagcaggttattattgtttggatcatgttcctttttgtcatcaagttctccattcacatgtgggtgttcttcccaataacgattaacttccaatccattaaatgtgttgcaaaattttaaataaatatccacatatcatcttttaattgaagatgttgatggcaatgatgtaagtaacttgatcttatttttgtcttgtcg

SEQ ID NO: 50179 - DNA, 107 bp, Glycine max
  Clone ID: PAT_MRT3847_16319C.1
caatctcttcccctatattcacgccgtgctgatcacttccaacttcacactttctcctgctatttccaaaagcaacatcatctccacaatgccacacaacatagcga

SEQ ID NO: 50180 - DNA, 325 bp, Glycine max
  unsure (1)..(325): unsure at all n locations
  Clone ID: PAT_MRT3847_1631C.1
caancctgttctcattcccacttgcttggaattcaatctgaaaaacatcaataccttttattattcaatcttaataatctggctgggaataaggaaaaaaaaactagaaggggggtacctttccaaattggggggggacaaaaggggagatttcccaaagctttttttataaaactttcccaaactgggaacgggggggacctttcaaaccttttactggggactttattaatggggggcataatacatgcatccagactttttacacttccccaatatcatccatgggctttggtcttttgactgaaatgggggccacatttcc

SEQ ID NO: 50181 - DNA, 484 bp, Glycine max
  unsure (1)..(484): unsure at all n locations
  Clone ID: PAT_MRT3847_16320C.1
gagagaagagggaggagcatggncatgaggctggccatgacagggggagnaggagggacagggatgaaagtgggggatgacctatatatttaaaagggttatgggaccatagtagggagggctgtgccttaatttgtctctgtgtgtgtgtctgtctgtgtgtgtgggggtggtttttctttttttttttcttgngatctatttatgagtgagaaaaacagaggtgggagtttgtgggtgtatctggttgttatttggagtgctattagggtgtggttggggtggtttgtaagcntggtacttggggtttgggtgattgggtattatggtaggggggtgggggttgtgttttgttgggtggggggggggggggggggggggggggtgtgggtggggtggtgggtgtggtgtgggtggggggggggggtggtgggggggtgggtgtggtgggttggttgggggggggggtgtgggggcttggggg

SEQ ID NO: 50182 - DNA, 602 bp, Glycine max
  unsure (1)..(602): unsure at all n locations
  Clone ID: PAT_MRT3847_16321C.1
ggctcgagattttcatcatgattgccaatattaatactgtaaggtttacacgcaatgcggaacgcagatacaatgtttcaaactctgtttaaacaacttgataatactacaataaatttaattttgtcactcattgcagtattatgattagtttattaagtgaattgcaatcaaaccttacaaaatttttatccaatatatatatatatatatatatatatatatatatatttaattttgttattttctaaaaaaaaaatttgttacgtatatttgcattatcttatcagaatcattttgtacatagattgataaaacaaatttttgtaggacatctcttccaaaacctgaccgaaattttcaattccgagttgtttgttcgatgtgtttaattaatggcaagcattttttgacagtctgtttgaccaaaagctaaaggttggcggaatagttattacggtttaattgataccagtgttgactaaacgcgttattggaagtttcttttaatttttttttcagatgtttattatatatttctatctttagtttataaatcaanaaaaacatatgtcaagcatttatttaccattgaaattaac

SEQ ID NO: 50183 - DNA, 374 bp, Glycine max
  Clone ID: PAT_MRT3847_16322C.1
accaggttaattttattttataaatagttaacaataaataaattttttatttttgtggttaatattgactaaatgtgattaatttatctgtgtaaatatgattaaatttgtttcacaagtgacaaaatgtattgtgaggtaaaattaatcatcattttatctcataattaattgagagtaaataaacgtggctgtatcatatatcaacgtgattaataatatcacaaggttattgaaataaaataacatatgagaaagaaaaggtgtacctcaacttagccttgatcaaattattgtgctccaattttaaaaaaaaaaaaaaaaaaaaaaaaaaaaaaaaaaaaaaaaaaaaaaaaaaaaaaaaaaaaaaaaaa

SEQ ID NO: 50184 - DNA, 243 bp, Glycine max
  Clone ID: PAT_MRT3847_16323C.1
gcctcaacaacccagttgagtaactaacatagttcatgtgaagaacaagcatgtgctactaagaggactagtgcaccgaccatgcgaacgaatccgacctgaatatcggcgaaagtaccataccattacaacttccacatggtcccaacgatgtcttgctcaaaaatcatgcacttgtctcgccatccgcatatgaagaatatcatcaacaagccccaaagccctctcaatagacatgcttac

SEQ ID NO: 50185 - DNA, 388 bp, Glycine max
  Clone ID: PAT_MRT3847_16324C.1
gcagtaagtttgtatattatttattttctgatgaagctaacttgaaaatcctcaaaatgggggtgaaccaattcttacaattttaaatgccacattttcttattacggaaactttgattccatttttaacccgggttctgcaaaggcttggtaataaaaggttggtttcctaaaaaacaaaccctaccataatgttatgggaaccggccaaaaaaggggggggaactttgaaatgggagaaatcaaagttagattgcatacacgggcttaaacccattttccgatcctgacattattggcatagacattgactgcctacgggtcaatggggccctaaaactttggaatcttgaggccttaagggggggaggaatcccccaataacaga

SEQ ID NO: 50186 - DNA, 773 bp, Glycine max
  unsure (1)..(773): unsure at all n locations
  Clone ID: PAT_MRT3847_16325C.1
attacccggngtcgacccacgcgtccgcgcgccgtggacacgtgtcgacggttgagggagaaggccatgaaggcgaagggagaattgtcacgcttttttggacaatcacgtgcgggtgcaacagattatagtgctgctgcacgtgtggatccggctgttcaggatagtgaagaactcatggaggaaacagaaacagaagaacaatctgaagagaataaagatgaggagggaatggttgaggaaagtgaaaaactcgtggagggaaaagaaacagaagctgaagagaataaagaggaggtagagggtaaggttcgggatagtgaagaactcgtggaggaaatgcaaacagaaacagaaggacaaactgaagagaataaagatgaggagggagaggcacgtgtgggtgcagattccagtgctgctgcacgtaagaatccggttcaggatggggaagaaattgtggtggaggggatggagacagaactagaagcacaatctggagagaataaagatgaggagggaaaggttcgggacagcaaagaactcgtggaggaaatggaaacagaaacaggagcagaagtgcaacctgaagagaataaagatgagggtaaggttcaggatagtgaagaactcgcagaggaaaccggaacagaaacagaaggacaatctgaagagaagaaagatgaggagggaaaaggtggctgtgatgagtagttctgtgagtgagaccaatgattcngaatctgtgggccgagcagtgaagaaaaggaagg

SEQ ID NO: 50187 - DNA, 418 bp, Glycine max
  unsure (1)..(418): unsure at all n locations
  Clone ID: PAT_MRT3847_16326C.1
gcggggaccctctagcgcggccgctttttttttttttttttttttttttntcccactaaggaaacaaccaagcgatttcacaaatgggggatgcgcactggcaggataacgtttcttcctttttagccgacctccacaactgtactttttcgttaacccaaaccggaataaaaaactcctccacaatgttcattatcatgttgaaaaacacagtctcttgttctgaaccctactcataacaatacaaattgatatggagcgagctttcactccatgagcctagctcatgccgcttgactccggcctgtaaagaaaacctagcacccaagtaagactcgaggtctggaacattctcaatggcctttaacagagtagtgtccacggatttttggtcatctatcttttctgggggaagcac

SEQ ID NO: 50188 - DNA, 251 bp, Glycine max
  unsure (1)..(251): unsure at all n locations
  Clone ID: PAT_MRT3847_16327C.1
caaannagnggttcctcgacaagantaaggngtagctaccagggnncaagaagacnganggggccacagctactactccctcctccaccancacctgttgcatcattggagcntggtganggtgctcatcatgaaggagaggccanggagangacangtatattagaanagttagnagagnancttcctggttatcnctccaagacncnggacgaanagganaaggncaaggnnnctggtgctcattgata

SEQ ID NO: 50189 - DNA, 175 bp, Glycine max
  Clone ID: PAT_MRT3847_16328C.1
ggctcgagcactgtcgttcatgcggccaacaggttgtctttgtcggaccctgatgaggtcccgcctcccatcaggcggaactttatgccgcattggatcgcctatgacctggcctcttagggaagccagcgtcttgttggcggctcattcttcttggctggccatgacttgatct

SEQ ID NO: 50190 - DNA, 258 bp, Glycine max
  Clone ID: PAT_MRT3847_16329C.1
aatccgcaccaaccagcaccatgcccatgatactggggtactgggacatccgcgggctggcccacgccatccgcctgctcctggaatacacagactcaagctatgaggaaaagaagtacacgatgggggacgctcctgattatgacagaagccagtggctgaatgaaaaattcaagctgggccggactttcccaatctgccctacttgattgatggggctcacaagatcacccagagcaacgccatcttgtgctacat

SEQ ID NO: 50191 - DNA, 671 bp, Glycine max
  Clone ID: PAT_MRT3847_1632C.1
ttcccgggtcgacccacgcgtccgtacggctgcgagaagacgacagaagggtccggctgcgagaagacgacagaagggtacggctgcgagaagacgacagaagggtacggctgcgagaagacgacagaagggtacggctgcgagaagacgacataagggcgagccaggccgcgacaaaaatgttgcctttccgtggtatgttccgctagccttaactaactgtgttcaatggtcttcgtttatatttcgtctacttgtggtcgtcagtagggatgtcgtggagtttccgtgggcgatttcgcaaaggttttccacccatcgctcttcgttcgttcttcgtcgttctccggtcttcaaccggtaagttcctgaaataaaacttttcaattcattctatgtacccttagaggtccccatttttttcgcatgcttttatttttatttcatttattttccgtacccccttttgatgtgctttagtcatttatttaagtcgttttctcgtctaatcaaaaataaaataaatttccaccgctcatttgaattgtaacatcttttaatttttgttaaaatgaaattcgaccattctgtcatgccgtaaccacgtttaaaaccaaaaagaggcaaaataataatataataataaaaaaatatcttttaataaaataatc

SEQ ID NO: 50192 - DNA, 1750 bp, Glycine max
  Clone ID: PAT_MRT3847_16330C.1
ccaatccactgttgttgttgttgtctaaagcaaaataaagtggctagtgtacgtgtggattcgattttcgtttggtccaaaattaacattaggattttatagtagtgcttctcaaaatttctagaacccacgtcacacttactctgggaaggatggggttggaaaatgtctggttccgtattatataagagtctcgccctagaatcctcgagcagaagaatttaattcactgtactttatccttttgtgtggggaattatggtaattgattttgagggtttgactactcatggattatgatggtatgagaaaaccttccaaaaacttatttcactctcgcttcttcctttttgggttctattgctgggattgggagttcttgaccgctctcctcctttttagttcttccccttaatcttctttcttcacaatttttatttccttccttattagacgtattagatcagattgaacaaaagggtttttctttctttctttcttggggaataatagaaataagaaaagattagtgaggttgaaatgtcgcaacgatcggtgccggcgccgttcttgacgaagacgtatcagttggtggaggatcaggggacggaccaggtgatatcgtggggtgaaagtgggaacacttttgtggtgtggaagcatgcggattttgcaaaggatttgcttccaaaatatttcaagcacaacaacttctccagctttgttcgacagctcaatacctatggattccgaaaaattgtgccagacaaatgggaattcgcgaacgagcatttcaagcgagggcagaaggagcttctctccgagatcaaacgccgcaagaccgtgcctcaatcgtcggcacatcccccggaggccggaaagtccggcggcgacggcaactctccgttgaactccggcagcgacgacgcgggctccacctcaacctcgtcctcgtcctccggttccaagaaccagggatcggtggaaacaaacacaacgccttctcaccagttatcgagcgagaacgagaaactgaagaaggataacgaaacgctgagttgcgagctggcacgtgcgaggaagcagtgcgatgagctcgtggcttttctcagggaccgtctgatggtgggtcccgatcagatcgatcgcatcatgcggcaaggaagttgcggatctgaaaacgcggtaggtgaaggcggtggtggaggacactgtttgaaactgtttggtgtttggttaaaaggggatacactaacagacaaaagaaacaaccacaagagaggccgcgaagaccaaatgggcttcggtgggcctcgcctcaaggagtcaaagcccgttgttgactttagtaggaataggatgatgatgattaatgaaaaaggaaaaggctaagcggtaatcatgtttgggtaaaaagaccaaatgcgctagcctatgcttcctaaacatgttgaggctgtgtaatttttaatgtacgtaggtaaatgcctctatgaatattgattgggaaattaaacaggttttaataatcaatttatggccttttatgtcaatgcatgtaatgcttaaatggcagcattctgtagactgtagtttggtttgatgatatagtggagctgcacgatccctgccaacgaggttctctgccttcattacatatggagaactaaggaatttataatagtgactatgattatatgcacaccacgttagctaaacattttcaaataatagtgggcatagtattttc

SEQ ID NO: 50193 - DNA, 1120 bp, Glycine max
  Clone ID: PAT_MRT3847_16331C.1
gacggcagtgatgatgataaattggtgcaatctttagaaattatgattctcaacatttgatgcaaataaagaatatgctgtgaggctggcagaagtcatacaataaaattttgatatagcttctttttaaggatgcattgctgttacttccctttcacttcttagtttgtacgattcaatactgctttaagtttgcgtgatttatctcagctaaaggatatactgttttctttacacctagcttgaccttgaataatggccttatcttacgtgaattcctttgatgaatcaaagacaattaggcaaagcatttttgttataattagcaaaagcaagacataggtcctagtttctccaatttgatttggatcttgaagcgaaatctaaatgttattttcactgagcaattttacttttatatgattcacttcttcaccccaaccccctaatgcctcattattggggtgatcaatggggaatgataaacttcttccttttatgatttcagaggaaaactgccaaacaataattcaagtatctttccttttccccgtctgtcctgaccttccctttactcaccaatcaccatgtgtatgtacacttgccctcagcctgcctgatcgttaggaaagtttgaactgcatctgcattctagttttatatttgaactatttaaaatgtcagggttttgtaatttgtagaaattgacaagcttttaaagacagtgaagcaaatggctggtcctaggattgctcatgctactttgaaaggaccaagtgttgtgaaggagatatgtatcggaatggtgcttggtttagctgccggcagtgtctggaagatgcatcactggaacgaacagagaaaaacccgggcattttatgatttgctggaaaaggatgagattagtgttgttgcggatgaagaataaaagtggccacgttttatgccaaaggcccagatctctccatttttatacatttttctctctgtatattctattggctcttaatttgtagttgagctgacttactctaatattccaaggcaataagttttttgcaccaaatcttggacattgttacccggtagaaattctataaagcctgttttgttgcttttt

SEQ ID NO: 50194 - DNA, 465 bp, Glycine max
  Clone ID: PAT_MRT3847_16332C.1
gggtctcttttggatctacctcgcccacaacgcctacagcggcaccgtcatggtactccagcatgccgtctgcgccttaccggacctaaaattccagaaaggcgacgagggactgcagctccactacgcctacggaacacggaaaaaagtcattgaggcctacgaagtgcgcgccagatgcaccgtaatccaaaagccactccgattccccgacacctccaacgactacgtaatcaacgaattccgataagcccttgagaggggcaacgtgcctacgtaacaaaattcgcttagcagttatggaccacgtgacttacatgcccagcgtggacatcctcattaaagacttggttaacacctgcacataggactatgttgagcctgtatatatggacgccggacactctattgtgtgcacgcgcgcggacatgcacgaaatcggagcggacttatacaccatcaact

SEQ ID NO: 50195 - DNA, 493 bp, Glycine max
  Clone ID: PAT_MRT3847_16333C.1
tgctcgagccgattctctctctctctctgtctctttctttcaatctgtgttcgtatggaaaagtcaatggcatgtttggttggtgccattgtgatcctgtggtgctgcataagccatgtcacatctgatgcatcggatcaccgttacatgaaatgactcaccgttcccttttatgccaacaaggtgggaccctttcacaatcccagtgagacataccgatatttggatcttgccttttgctcgccagctaatgtggaagaaaagagggaagatcttggtgaagttttgaatggggatcagactagtagctgctccttacaaattggacttccaaattgacatagaacctgaaagttactgcaaaaagaggcttacaatacaagaggttgctcaattcacgcatgctgtcttgaaggactatttctaccaaatgtactatgatgacttgcccatttgggcgttccttgtataatttgacagtgaagacactgat

SEQ ID NO: 50196 - DNA, 192 bp, Glycine max
  unsure (1)..(192): unsure at all n locations
  Clone ID: PAT_MRT3847_16334C.1
gccagtagtcatatgcttgtctcaaagattaagccatgcatgtgnngtatgaactaattcagactgtgaaatgcgaatggtcattaatagtaagttgttgtgactcaccggtacgagtatcaagtataggncaaccgntctgaggnnattagtacacanagcntcgtntnnnnngnacngcgngagcttnng

SEQ ID NO: 50197 - DNA, 583 bp, Glycine max
  Clone ID: PAT_MRT3847_16335C.1
attgatctgtctgaacaacccccagctgttccatctaatcaacaatcctggccggtggctgtgccatcgtcatctatgggtactggtggaattaattctcacgcgtcgaatctacttaaagagcttgaggagatgggttttaaacaggttgatttgaacaaggagatcttgaggaagaatgagtacgatctggaccaatccctagacgctctctgtggtgttgatgtctgtggtgtttctgagtgggaccatatgcttgaagagttacaggagatgggttttcgtgacaaagagatgaataagagactgcttgagaaaaacaatggaagcctcaaacgtgttgttatggatttaataaacggcgagtagttttagttgaaatgttagttaatagtttatgtaaaggtgacgacttgtgctcctagggtgcctgatacttgcctggcagtcataattatcttatttcctatctcgatcttgagttgtggtgattcatcacaattgaacaatttgatctatcctatgtttggatttaagtatgttatgaactcaaaagtatatagctaaatcattttggttattt

SEQ ID NO: 50198 - DNA, 378 bp, Glycine max
  Clone ID: PAT_MRT3847_16336C.1
gattggaggacagcaacttgcagcgaatgtaccttcagggatctcttcctgggggtggaaggtccaatggtttttcaaatatgcctgggatatgaggcttttggtttgtatcattgctgatagaaccctgagttgtcagccttgaagacaagaactcgcatgatgattttatttagccatctatcttgatccatcatcatggactattaactcccggcacgatgatcagaatcaggagatgacatgccattattgcaccacagggttagatgctagaacgagaggcactcgatttcagaagatagatccatttctgcaaccgtaatgcttatccaggacttttccggaagcagaaactttgtcgaagtgtgggagccg

SEQ ID NO: 50199 - DNA, 381 bp, Glycine max
  Clone ID: PAT_MRT3847_16337C.1
aattccaattccacattttcaagatataaggaggcaaatatgttcatatagtaattggaattagttgttttcttatgtaggcctatcctgaagccaaaggaaatgagatcgggattcctcggggaattccaattccacactttcaagaggtatggaggcaaaaatgttcatatatggattggcattatttgttttcttagtaggcctatcatgaagccaaaggacatgagatcggaattcgtcggggaattccaattccacattttcacgatatacggaggcaaatatgttcatatatgaattggcatcaggtgatttcttattaagcctagcctgaatccataggaaatgagatccgcattcctcagtggtaccgagctc

SEQ ID NO: 50200 - DNA, 410 bp, Glycine max
  Clone ID: PAT_MRT3847_16338C.1
acccacgcattcgttcttgcaggcgttcggggatggcaagtggatctacctggacccaaaattcctgagtgatgagactacaaccggtgatatgaacggatgggacagtacactaaggatgtgaccctatatatgggggaattcactaactggcgcctacaatgatgcccctagaagaagaaatagattctaagggggcacagcatgtgactgaagaatggacagaatgcgtttatgaggaggcctgctttgtggaaatttcactaagggacatacttaaaggtcgtggcaggagtggactatatagcatggatcattttaggccacatgactgtggttgtcatgctcttatcaacacaaatgggaacgaaggtgtaaggacaaatattgatgattatggtgatcatgac

SEQ ID NO: 50201 - DNA, 752 bp, Glycine max
  Clone ID: PAT_MRT3847_16339C.1
acgagcgtccgatcgaacgtccggttggaagcttctggtccaccctcaaattcaaaaccgaaccaaccaacttacccttttttattttgctcgtgttgatcgcaaatcctcatctctattcgtgttgcaatccccactgcgccacttccaggttaaccctaattcttgtattctccgactttcaattattattctttttcctcatcacgttcttgttcaatatccaatttatttgtgatgctgcctaaacaaattaggtcatcgcgtggtttcatgctttctgccaaacgaattgccgtgttctttgtgtgtgtgtccgtgatttatttattattatttttttaaaataactatctgattagtgatcaattaaattgcaacactgcatgcaatcgtgaaacattttttaaagcgttttttttttttttttttgtcaaattctgtttcttcgtaaggtgcactgcattgtgaaggacgagatttttaagccgttgctttgttcttggaggtgttagactgttaggggccgattcttaaagacgggggcacttgtttatttatatgcctaattctttatagcaaaaaacctaaaactactccgaagtagaaggaatagacgcacccagtgattgctaatggcactaaaaattagaaaaatgccgtttcattgaaagtaaccttcttatgttgaaagagtaaattgttttggaggacaattaaaaagcgatcgatgcctcccacttatgcagcaa

SEQ ID NO: 50202 - DNA, 305 bp, Glycine max
  unsure (1)..(305): unsure at all n locations
  Clone ID: PAT_MRT3847_1633C.1
ccgtnngaacggcgttaggacagtgttgactgtacgttgtgtgaaaaaaaacagagagaatatatatgtttttttttttgttttttgaaaaaaatattaaattttttttttatctatttacacaatacnnnnntaatctttccacttgtccatggtcctgtgcgcgagccaaaaattaacggttgtgcgcgcccttttcgaaattcttaagctttcgtgaccggttcgtgcaaaacgacgccgcattggatatgtggtgggccccacccccgtcctgttcctgcgccaaccctttattnnnnatg

SEQ ID NO: 50203 - DNA, 607 bp, Glycine max
  Clone ID: PAT_MRT3847_16340C.1
cctcgtgccgaattcggcacgaggctcgtgcgctggcacgccacgcgcgccgggcccctcgctcgtcctgagcggtctccgacgcgactggactgcagcgctcggctcccacgcccacacgcagctccgagtgcatcacgttgcgtgagcacaagcggcgaccgacgcaggcatgctgctcccgtcgttgcgcacggttgccttatgtttcttctcgttcgtggcgggcattctaatgaccgctgcggtcattcggcccactacggccaggcacacgaagatcgagacgatacagcccacgttgccgctgacgaccatgcctccgctacccgaatgcccgcaaaagacatgtccacaaacacctcggccattatgtgccacgacacggctgccagcggttccttgtgcatgcaactttagcttgggcttggatctgatgcgcaacggccggcccctgcagacccctaacaagaagatggcgatgatcgttccctttaggaacagagaagcacatttgcaggtcttctcgcagtacatgcactcttatctcaaggattaccaccttccgcatgtttgtcatcgagcaagtagagaagcagcccttcaa

SEQ ID NO: 50204 - DNA, 797 bp, Glycine max
  Clone ID: PAT_MRT3847_16341C.1
aagacaataatattttcctgttgaattcaggctccccccttcgttctctttcggccaacactctaccgatcctctcttcagtcttcatttctctttttttctcttcatatcttcctttctctttctctgtgtagcttctttcgttctctttttcactctctccctctgcctttgaatttctgtattttgcaacatggccagcgacgaagcatggagaacctctgaagagcagaacgagtcaaacataatcggcactagcatatcgcccaacaacgtggaatctgggataactgatgatacagaggtagtagggcaacaacaacctgatcgtccaatgcgtgataattacttgcggatattctctatgttggacgactataggagacagacacagcgccttccgatggaacgccatacgcgatacacaccaaatgatgttcagtggcgttggatgggcatgttcttacgctggatggaaatggccatgatgtacgtgaccgtcccaccaggaaatccttctagcttaatgagcttcatggcctatagttgtgtgcactcgtgtgaatttaattagaaaaatagtaaataatgtggagcactgatgatagtccaatacatgatattgacttgcagagacagacacagcgccttccgatggaacgccatagggtaagcaataaaactcatgagccattaccctctctgttttagtatcttaaaatcaataactgttcaaagaaacgatcgcgataggtgtttatcattccaactagaagaaagtttttattgtcaggggg

SEQ ID NO: 50205 - DNA, 453 bp, Glycine max
  Clone ID: PAT_MRT3847_16342C.1
gattcatgctttactgataaccggttttgtgaccaccctaaaaagtaaacctaaaccctgaaggactggcggcatacatactaaataaatctattggattcgggccagacatttaatttgggcaccattacatggttctaggaaacggcaagatcctcttgatttctccctgaaataccctactctgaccattgtgccacttatccataacctaattacggatgagatatataaaatatcacagtgggcgtagcaccatcagctacaaaaaatgcaattggacgcactgacattatgcttcaccatctttgaataattatgagtgctccgtaccatattttaatcgtccaattctaaaatcattgccttacctgcttttcgggccaagatagcccatgatgaacttccttcaggatttgaacagggcataatcgttgaattatgagcaaataa

SEQ ID NO: 50206 - DNA, 1471 bp, Glycine max
  unsure (1)..(1471): unsure at all n locations
  Clone ID: PAT_MRT3847_16343C.1
aattaagcaaccgttcaaatgtggaattttattatttaatttgtttgaatccactgcccattttccatcatagcataatgaatagaagacaaaaccaatatccattattttttgttgaaaaaaatactgaacgaaaagctcatgaatatttcacaacttcctaatgtagaaaatccgaacagcttttctacatataagtgaaatactgaaaattgaaatagaaaagtttatacactaacaagactctttccaagaattatgtcatctgttaagaaatcagcctctttccggtatgttcctctaccaaagtccaggttgtacgagtctgcaagaccctctacaagcccaaattcaggttcccacccaagcactctctttgctttctcaattgatgcaaagaaatgctggtcacggaatggaaatgatttctttttcccaaagtcaaaatctttagggttgtagtgaatgatctctggctctgggaacccaccagccttagcacatgctcttgctaatccgtcaaacgtgacatacttctctcccgagatgttgaatacttccttgctggccttctcattaccaagaacttggataaaagctgtcgccaaatccttaacatgaccaagttgggttatctgtagtcctgagctggggataggaattgggcgtccggctttcaatctatggaagaaccactcttcaacagggttgtagttcaagggtccatagatatagactggccttatagaagtccaattaacaccccttgcttgcagcaaactctctgtctcaagctttcccttgtgtctgctcttaggatcaactgcatctgtctctgcatgaggtaatagatcagatttgagatagacaccagcagaagagcagtaaataaactgttccagattaggcagcgcatccagtatgggctcaacttcatctgcctcacgtccatttatgtcataaacaacatcaaatccctctgccgagagactggattttacaaagtcaaagtccttcctgtctcctttcaaatgcaagatcttggaagaaaaatcagcataatcattgtctgattcacctggcaactgttgagtgacaggcgctttacctcttgtgaataaagtcacctggtgaccctctttaacaaggagcctagataaaaacacaccaataaacctggtgcctcccattattaggattttcttggtgctcgatgccgagacgtagaaagacccttttggatggcatagttttctcttgaactgaagttgagtttgaagtctggttccactgaagtcaaaaagagaggaagctaagggagagaaagatagttggttctgttggagtgccaccactcttgccatgcttactttccacacagtgcagtgtgttgctgtgtgtgtgtgaaattggaagtggcttctctttccctcacccaactaaactaactaactccccacctctacntgct

SEQ ID NO: 50207 - DNA, 396 bp, Glycine max
  Clone ID: PAT_MRT3847_16344C.1
ggctcgaggtacaagaactagggtttgatctttgtcatcacttaacgacaatgatcgacgacgttaactattctgacctccgatccttgctgagacagacgggaggctactatgatgacaggataactgacgtgcaataaccaaccgagaagacacccagtgcaagggagatcacagccataacgaccgagtgatagcaggtgctctgaatgcagtcgctgaatgaaaatgggtggttggtatcgcatctgctgctaaagcaaaagcttagcgggtgcgagatgatgcatctgcacgtgatgttcggcatcagcgttgagatgatgcgaatttctatatctgtgtaacgagcgcttatgatggagacatgacgagacttgtggaacgcactacaca

SEQ ID NO: 50208 - DNA, 172 bp, Glycine max
  Clone ID: PAT_MRT3847_16345C.1
ggacgctggcggaaggatcaagaagggcgccggaggtgtaaagggcggtggtccacagaagaagccgggttcaaggcccgtcatagccggtctccaatttcccgtcggaagatttggccgctatttgtctgaaggaaggctcgctcagcgtgtcgcgaccgggctcccgata

SEQ ID NO: 50209 - DNA, 352 bp, Glycine max
  unsure (1)..(352): unsure at all n locations
  Clone ID: PAT_MRT3847_16346C.1
ggaaggcggcgcgaggggaaagagccggangaacannnccngaaagcanctggacgcacaaaggaaacngccgggcngagagaaagcaaggggggagggacncnncaacggcagaanaccgggcancnngacaggaagagaggcaaggccgcaaagggcggcagcggaccgacacggaggaggganacaaaggcacccccanccaccaaagacggggccgaaggggcgggncagagcgaaccangcaaaccgggagcccagcgcgccacacggaaaaanagagacgcggcagagaagaaacggggcaaggcagcaaaggaggagggaaccgncgcannggaggccgacagga

SEQ ID NO: 50210 - DNA, 253 bp, Glycine max
  unsure (1)..(253): unsure at all n locations
  Clone ID: PAT_MRT3847_16347C.1
tactgatccttttatatcgaactgtaacctattgtgatgaatttctttaccacaaggcgggtctcattttnacaccatcacactcttcaatcttttccctcataatgagtatctattcttcaattgcactgaggatcattttatcgttaagccaaatacaattttttgtgagcgcttccctgagcgttgttactcttcctgtgacaaaggttgttatctctgcaagcacattccatagtgctcctttgctatt

SEQ ID NO: 50211 - DNA, 319 bp, Glycine max
  Clone ID: PAT_MRT3847_16348C.1
acttttcctgatccacaacccaaactacaaacctcaagtttaaagttgatggactttagcagatgcttcaggttgtcaaggtcccaccacatacctgcttttcatctgaaaatctgtgaagtttcggaaatgttgcccaaaaattgcttggcttatgagaagatctctcaccaatccgtttgaggcctaagtgggggaattatgaatttcatttgataaagccagaaagatagcattaaaagggggttgcttggggccttcctttggtaaaaggtttttttccttcttttcaagaaaagaagtttttcctcttcttccc

SEQ ID NO: 50212 - DNA, 534 bp, Glycine max
  Clone ID: PAT_MRT3847_16349C.1
gtcgcccttttttttttttttcacttttcccaacattaattctttcgtacgatgttattgataaggctttagaatctatcgcttagccaccaaatcaatccgccatcaaagcccagcctgaggcccgatcaggtgttaccatcacattgatacattgctctactcactcatgaacaacaccatattactcgacacggtaaatcatccctaccaactcttaaacatcataacctgtccaaatcttacacgttcatcatacaatgctttatgagaaccgacctgatttacacaaacacttacccttgatagctatctagctactatttacatgtacgcatcgttgttgatcagggtggctgcatccaacacaggacagatccacgaacttccgagctttattcgcgaaccatctctatttgagacagcaatgctggtgaagactctcgccgaggtgttgcaggtggtgctggtgatcatgaacgcgaaccgaatcctgcctttccaccggcgacggaaaccgcgttcctgcggcgg

SEQ ID NO: 50213 - DNA, 192 bp, Glycine max
  Clone ID: PAT_MRT3847_1634C.1
tctactttagcaagctaaggcattattatggctcatcaagtgctgctaatttgattggcctccaccatagtgtttgaatacatactatggagaaaacaaagaaagaaaaacctttcacctagttcatttgtcctcccaattattgattcacctctatcttgtgttcccaaatcctcaccacgatttttacaa

SEQ ID NO: 50214 - DNA, 318 bp, Glycine max
  Clone ID: PAT_MRT3847_16350C.1
ggactcaaggaagaggttaccataaactgttcatcaattattgctgtatgtgaacagcttgacatatgcatatgtggaaactgagatgtctatctgtacaccacacctaagagcctggatccggcagagagaactcagattgcttggagaacgttgctgatctggctgccagctcagcttcacctcgctacgtaatcttgctggtgcgaatatgagtgatcgtttataggaatcaatgcctgccacgagatgtgctgaaagtgcgagaagaaacccctggtcgtgaatgccgagatttgagctctcatataccactag

SEQ ID NO: 50215 - DNA, 957 bp, Glycine max
  Clone ID: PAT_MRT3847_16351C.1
ccaccacttccaccacctcatgtaagtactaatttcccaccaccttaaaaaaaattgggttccactaaacaactacaaagtttcccttaacaatgcttctccttgtcctatatacccacatgggaatattatcatcttattttttcccctctaaaaattagtccacttttccatcaacatgtgccccctttcaatctctctcatgactcatcacaaccccagatcttaatcatctcatttaatctgaccctcttattttgtctcattgagttcactaaaaagatcagatttttcagtgaaacgagaagaaagaaacctaccccctccatgttgatactagtgcttggactagcttcagctacttttttagtttttgttgcagtttatgtgttctattgcaagagaagggtgtcaaagtataatgagagtaaagacattgagagttcagaacacaaggaggatgatgaaatggctcagaaggaggatttgatgatctttcagggtggagaggaccttacaatatgtgacattttggatgctcctggtgaagtgattggaaaatccaactatggaacactgtacaaggctttgttgcagaggagcaacaaggtgagcctgctcaggtttctgaggccagtgtgcactgcaaggggagaagaattggatgagatgattcactttcttggaaggataaggcaccctaacttggttcctcttctggggttctacactgggccaaggggtgagaagcttcttgttcatcccttctataggcatgggagtctcactcaatttataagaggtaaataaaatgttctttgaaatgaaattttgtgtgtcttgttttctttgaggatctttttttggtgttgagtgtcttgattctagcaatatataatgggttttgatctctaatttttctgttaggcttgtgacaaatcattcactgcttaaact

SEQ ID NO: 50216 - DNA, 416 bp, Glycine max
  Clone ID: PAT_MRT3847_16352C.1
gacgaaaatgaaggtgcttgttttgttccatgatacattcttggtagcatgggaatgggatgcgtgcgatatattccatctccgaatgaacactggctatgagtgccgtactacggaggtgaaatgcgcaaggtgaaggctagctgtggaagcacacaacatctttggctctgagaccattcctgatcagtgcgttgaagcaacatatgaatacatacatgactaacaatatacatcagacttcaaaacagctgaccaactagcttactttcatgccagagacctagaagttcattccaaggacacatttgtgtgtagtatacatggtcccgtactctataatattccatactacagaaaacatggatatggcctgtagaaacttaactcgaccttgtatgatgaatgggttaaca

SEQ ID NO: 50217 - DNA, 176 bp, Glycine max
  Clone ID: PAT_MRT3847_16353C.1
gagaggccagagacatagacagaaagatgatctgtggcaccgcgatagaaagcataccttgggagacgtcttgaagataggagttacagtggcagtactactcttttatcgatacggactgaatggacgcctcacatctcagttgaggtggcagtcctcgtctactctgagagagg

SEQ ID NO: 50218 - DNA, 2092 bp, Glycine max
  Clone ID: PAT_MRT3847_16354C.1
tacggctgcgagaagacgacagaaggggacgcggagatggagttaaaatagaagaattaaggccagggtcggttccgtcgccgttcaggaaaattgaattcaatctgaaacgccctgtggtcatagttccaattccgaaagaatttcggggtgtttccgatttccaaacactcactcacacccatccttctttctttcaccgcaatattttttcctttttgaatcaaacttcggtttcttaatttctcattatcatatcttagatcttcagttttggatccacacaataatttgggggaaattgaattgaagcatcatcatcatcgtcatggatagcataatgagcaagctccgcaacctcgacgcgtaccctaaaatcaacgaggatttctacagccgcacgctctccggcggtgtcatcacgctcgcttcctcctccctggtgctgttgctcctcttgtccgcgctcctgttataccttcatgcggtgaccgagagtacgcatgttgtaatcaaggtcgtgcccacagcatacactgatgtgattggtgatacgatccagtcactcccatgttctataatcagacttgtcgcgatggacaacatcggagagcagcatttccttcctaggcactatattttctatgacctctctccaactcacgtcaatttgatagaaacaaggcaagaaggaattggtgctcccaagattgaaaagcccttgcaaaggcacggaggcaggcttgagcacaatgagacttattgtggttcctgttatggtgctgaagagtcagatgatgattgttgtaattcctgtgaggatgttcgtgaagcataccgtaagaaaggttgggcactttcaaatcctgatttaattgaccagtgcaaaagagaaggattcttacaaagaatcaaggatgaagaaggtgaaggatgcaatgtgtatggtttcttggaagtaaataaggttgcagggaactttcattttgctcctgggaaaagctttcagcaatctggtgtacatgtacatgacctactggcttttcaaaaggattcttttaatttaagtcaccacatcaacagattagctttcggagagtatttccctggtgttgttaatcctcttgacaacgtgcattggacacaagaaacaccaagtggtatgtatcagtattttattaaggttgtgcctacagtatacactgacgtgagtgggcatactatccagtcaaaccagttctctgtgacagaacacttcaggactggagacgtgggtcgtctgcagtcccttcccggggttttctttttctatgacctctctccaattaaggttacttttacagaagaaaatgtctcattcttacattttcttactaatgtttgtgccatagttggaggtattttcaccgtttctggaatactagattcattcatctatcacggtcaaagggctatcaagaagaagatggagcttggtaaatttaactgatgggatttgagtaatttcgagggaatggctctccagagacaaatctattcaaggttaactactgattaaaattccccttggggttctgagttcttcggtttcaacaaaaggattttgcccttagaccaaggttgaaatgctaagatatcatgtgcaacaaatgccactttgccttgattcatatcttttctgacagctctgatgttgtgaatgttacctgctttatggaaagtagaggggctttcccttgctgaagcatcaaaagggaggaatccattagggaaatataacttcaatgataatctaaaatgagatataactgtttaggtgcatttcttttatctctttggtcgtgaagaagttttctagcatgtttggggtggcagtaaggtgagtcaaaatcaatcatgaagccatggtaaatgtgaagtaacccccatgattttagaaaaatcatggtgacactggttttgaggtagccaccatgattttaaaagatattcaaacatgattttaaaagatattcaaacatgctattagttaaaaaaaaaaaaaaaaaaaaaaaaaaaaaaaaaaaaaaataaaaaaaaaaaaaaaaaaaaa

SEQ ID NO: 50219 - DNA, 350 bp, Glycine max
  Clone ID: PAT_MRT3847_16355C.1
cccacgcgtccgcccacgcgtccgagaggagtgagatacttagcttctccagaagaatcgagtgattccactgtcttggaatggcattcttgataaaattcctacttattcttcaatgtcttcttatagattttttggataggtcgtgttaggttctctagcttggcttttttcatcaactgtaacagctatgctttgctatctccttgcattacgtgatttgctttataccgtgtaacctttttcacctttttttcttctttcaattttataccttgaaaacaaataactaatacttttgatgcctgggggcttgctattcagagactggagattgcaaaaagtgattt

SEQ ID NO: 50220 - DNA, 325 bp, Glycine max
  Clone ID: PAT_MRT3847_16356C.1
gttttacttgcggcttacttttttggaatggaggtttatttgggaggggctgccttttgggcttcctgcgggaaagggttgtagtaaactggactgcccgggagggatccacggggttgggcgtttcttgggtccttcccatatcatgggttgcgctgcccttgggggatttatgaggggctttagggtttttttggggaccaccccttggtctttgttgggacacaggtgtcccttattggtatgggacttttgggttatttggccttcggcctcccctttttgggggggcggttggataagcgttgaggtatttggtcttttt

SEQ ID NO: 50221 - DNA, 892 bp, Glycine max
  Clone ID: PAT_MRT3847_16357C.1
tttttcgcgttcgccaacgacaccaacgcaactaagaaagaaaccaaaagaaaaacaagaacaagtcaatttttcaattttcaatggaaaaccaaacctcatcgatgcagtttctcatcctcgaacaagttcagttcttgaaggtgaacgacgattccctcttgcagtgggaactcgtcgacgttgttgacgccgaagaggagatcgatgggttcggttcttcatcggattcttcttccgtttcttggttcgaatccgattcttctcccatcgatgcctcaattgaagaaattcgccaacttcttcttcatcccgatgtgggtttacaagatcctcgtgaatcggaacaagaatcgggtttagaaaatcaccactaccgttatcatcaacatcactatcaccatgatgatgttgatgatgatgatgtgggtggtgataatgatgatggtgaggatgatgatgggtatggcttggatgatgagcttgttccatggaacgtgagcaacaagtttgagaggcagaggatgaggaaattagggaaaagggcattttcgaaaatgcacaattcgaagaaatcaccttatctgtttgtgaggcctgggtgtgtccgtggcaagcacggtttgggccttaagcacattactgactcctaattagggttttaaattattgatttgggggctcttctagaaagaaaagggtcttcaagaattgtgttagtttgtttaacttgtagaatcctgattatgatttgtatttgaatatcaggtagcaagatctttaggaaatgtaataatttatgtctctctcttttatgtgcataccatgtactgattctgaatgtatttcttgatggaaaaaagaaaaaagaaaaatggatctgcttttgtat

SEQ ID NO: 50222 - DNA, 767 bp, Glycine max
  Clone ID: PAT_MRT3847_16359C.1
atgctcccctccgtcagctccacgctcaggtgaaagaagaagaaagaacaaaagtcaaaagttcaatttagggtaacaaaatggaaaatcaagcctcatcatcgatgcagttcctcatcctcgaacaagttcagttcttgaaggtgaacgacgattccctcttgcagtgggaactcgtcgacgtcgttgacgccgaagaggagatagatggctttggttcttcggattcttccgtttcttggttcgaatccgattcttctccctgcgatgccccaattgaagaaattcgacaccttcttcttcatcccgatgttggtttacaagatcgacatgatggtgttgatgaatcggagcaagattcgggtttggaaaatcatcatcactaccattatcaccatgatgatgatgatatgggcggtgatgataatgatgaggatgacgatgggtatggtttggatgatgagcttgtgccatggaacgtgagcaacaagttcgggaggcagaggatgaggaaattggggaaaagggcattttcgaaaatgcacggttcgaagaaatctccttatctgtttgtgaggcctgggtgtgtccgtggcaagcatggtttgggccttaagcacattactgactcctagttagggttttaaattattattgatttgggggctcttctggaaagaaaagggtcttgaagaattgtgttagtttgtttaacttgtagaatcctgattatgatttgtatttgaatatcaggtagcaagatcttt

SEQ ID NO: 50223 - DNA, 759 bp, Glycine max
  Clone ID: PAT_MRT3847_1635C.1
cggtccggattcccgggttccccatctcagccacaaacagaaccaaaccaccaccaccattataatacactccctgcaaaccctagaaacccaataatttgggggaacctcaacccaatcccagaaaccaaaatcggcctcgcaatttaacgaaaccgaggaagagaaatcgtgggcacccttcaaaattcgagatttccccgacaaaatgtcccaactgaagccaatgtcgcatatagacagtgccccttcgaccccagggaagttcaagatggagaaagcttcgtacttcaaccgcgtgcggtggcacacctcgctggcgaagctcgcagtgtggtccttcgtattcctgggcgcgatcttgatctttttcctccggtcgccggcgtcgtcgccggttccggcggacctctcccggcggtctctgcggacctacaactggggcggacccgtctgggagaaacgggtccgggcctccgcccagatccgttcccgaaacgggttcgccgttttggtcaccggggccgccggtttcgtcggcacccatgtctccgcggccctcaaacgccgcggagacggggtgctgggacttgataatttcaatgactattatgacccttcactaaagcgtgcacgccagggactcttggagcgctctggggtgtacatagtggagggtgatatcaatgatgaagcactcttgaggaagctttttgaggttgggcctttcactcatgtgatgcacttggctgctcaggc

SEQ ID NO: 50224 - DNA, 1479 bp, Glycine max
  Clone ID: PAT_MRT3847_16360C.1
ttctaactttccgctctcccaggtcttagatctttgtctctgtctctgtttctactttgaggcctccgttgttggtgggtgggtctttcttctctcaaaatggccaccggagtgaacagaaaaatttctgctgcatcagctcgggcccacaccagaagggcaaagaaaaccaattccctttccctcccatcgggaattcttggaacagcactagcagtgttgtttattgggtttttagcatgggcttatcaggttattcaacctcccgctcccaagatatgtggcacttctgatggaccgcctataacagcaccaagaatcaaattaagagacggaaggcatttggcatacaaagagcatggcgttccaaaggatgcagccaagtataaaatcatctctgtccatgcttttgattgttgcaggcatgatactgtggttgccaataccctatcgccggatgttgttgaggagctggggctctacattgtatctttcgacagacctggttatggggaaagtgatcctgatccaaatcgtactttaaaaagccttgctttagatatagaagagcttgcagatcacctgggattggggtccaaattctatgtagttggtgtctccatgggtggacaagttgtttggaactgccttaagtacatacctaacaggctggcaggtgcagtactcataagccccgttgtgaactactggtggcctggtcttcctgcaaacttaactactgaagcattttctaaaaaaaaattagaagaccgatgggcacttcgtgttgctcactacataccgtggctaacttactggtggaacactcaaagatggttccctgcctctactgcaattgctcatagtccagataacctttctcatcaagacaaagaacttgtgcctaagatgtctaatagaaagagttatgtggcacaggtaagacagcaaggtgattatgaaaccctccaccgcgacttaaatattggtttcggtaactgggaatatagtccccttgatcttgaaaacccatttccaaataatgaaggctctgtccatctttggcatggagatgaggatctgatggttccagttacattgcaacgatacatagcgcaaaagcttccatggattcactatcatgaactccaaggttctggtcacatgtttgctcatgctgatggtatgagtgatactatcattaagtcacttttacgtgcaaagtaggcttcttctatgttagttactgtcagtgcgaagttggcggcttctatattggttactgtctatctcaggtcagtttcggcatttaatatctcagttttggagaattcactgttgaacagaatgatgtatgatcaactttgaacaatatttgagtacacttaatggtaggaagaatcctattacttcttaataattatatgaactttactcttttgtgtgggaagttatttaacagaagttgacttgttcaaa

SEQ ID NO: 50225 - DNA, 646 bp, Glycine max
  Clone ID: PAT_MRT3847_16361C.1
gtgacttagctttgctcctcttaacttggttcatatgtaaggtattacacatgttattttatttattcttctaaccatttcactaaataatttgaatcctttatttttttttgctttttgaaatacgattgaacgttcattaaaacataatagtcactaaggtattgatgaattagatttattgacataactaaaaattgtaagagaaattataaaagtagaaaatgatacaccgattgacatacttaactatataaaatgaattgattctttttgcaatgcttttattgcttataaaataatgttagcaatttcgataagtgttacttcgatgtaaagaagtttttcaaaactaaattaattaaatcttatttaagatcaacaatatcccaagaaagattgaatgaattaattttaatattgattgaaaaaaaatgttaagagaaatcgattataataaataattttgcatcctcaaaagttcgaaaaataaattttcaataaaatataaatatttaataaaaatattaatttttgttaaaaaaaaatagtagactaaaaaataactcattttaaaatttggctttaggcctctaaatacattacccggatgttgttggcaattttctctgcatgactgttgcca

SEQ ID NO: 50226 - DNA, 321 bp, Glycine max
  Clone ID: PAT_MRT3847_16362C.1
gggctcgagcggctcgaggagtaaacgaattggctaacactacgagctccttgaacagtgtggcgctcgctaccaatgtggaacaggatacgaatcaccaacacgagctctaactaacatggtctggcaccatggcccgatctgtccatacactcgtcaatttggtcggccactgcaacaagcactgaacacacgtggacgaatgcggcgacactgacaccaaatgctaccaaaccctcaccattaagttgtacccgaggctaaatggataaacgctcacatatacgtggtccacgagccttcgtaggatgacacctagcc

SEQ ID NO: 50227 - DNA, 263 bp, Glycine max
  Clone ID: PAT_MRT3847_16363C.1
aaagaagcccaagactaaatagtgctgagtagtctaatggtggacaagatgagtgtgctggtattcaagtcccttcaggtttgtttggtgctagttttctctatcagaaacaccacagcagaaaagaaaacccatcacacaaaacacacgtacgtggttcgactggacaagttcaacatgccagagagttttgacgaccatgtcgtgtggtttggttcgtcagtggaatcagtatcagactcagcagagatgtctgcgcatgt

SEQ ID NO: 50228 - DNA, 144 bp, Glycine max
  unsure (1)..(144): unsure at all n locations
  Clone ID: PAT_MRT3847_16364C.1
attgaaaactccatatgttgggaataaataggttttaanttttgtgtccttatgtttaacaaacattctttcttcataaagaaaaactcctctggtaaaaaagctggcaaatttttaaccctaacaacgttctctttaagcctt

SEQ ID NO: 50229 - DNA, 166 bp, Glycine max
  Clone ID: PAT_MRT3847_16365C.1
gaacaacttagagccggagcaagctccatcactctgacaaaagtgagaccagatcagattggtccattctctatactgtgctctgactctccacgctacatatgaattggcacactatactagcgccaccaacgccacaaagagctcctgcagcaccacccagaag

SEQ ID NO: 50230 - DNA, 484 bp, Glycine max
  Clone ID: PAT_MRT3847_16366C.1
ttcccactgcgcctacggctgccagaagacgacagaagggggatgttgataactttgtaaagggaactaaagattccagggtttgtaatgctttccctgcaaagggtcattttccatttccaactcaggcagcattgtcatctggggttaatgctgttcctgatcctctgaaaacatttgaaggtctttcaaagaccttaattaaatctccaaaacctgatgttgggacaattgtcagtgcaattcatgttctttcagaattgcttgtgcaaacatccatggatggagtagactcaaatagtgaacatggtcatgatgagattatgatccagcaaataatcaataacctaaatgatttcagcacaaaaagatgtggcctaaggattccaacccttgattcaactcccacagataaaccatctggtcctgataggacattggagggctccaagggacttgaaaagacaggatagaaaccctaacg

SEQ ID NO: 50231 - DNA, 278 bp, Glycine max
  unsure (1)..(278): unsure at all n locations
  Clone ID: PAT_MRT3847_16367C.1
accgacgcacgcgtccgccaacacgaccgacaaccccaagtttgttctaaagaacacgcccaagagggncagggggagttgaaagaaaagcctggggggcaaaagatgcacacttgtgaagagatgattgaagcctcggccaccctcatatggatcgcttgaggccttcatgcacctgttaactttggacagaatccatatggaggcttaatcttgaacaggccaaccattagcaggagattcatgcctgagaaagggtctgctgagtatgctgcttt

SEQ ID NO: 50232 - DNA, 816 bp, Glycine max
  Clone ID: PAT_MRT3847_16368C.1
aaaaaggaaagaaatattattattaaggggagtaaaatgatgggatactccaacccattacattgcaagagaagatgtaggccttgcaacagctttggtgatgagggagtgtttcatctccatggagagcttcaagcactcagacaagtccacaccagaatcatcacaaggcatccatttgaacttttgaaggaacacagcaagccaaagctcaacagtggccaagcccatggcttttccagggcacactctcctaccagcgccaaaaggtgccaacctaagatcagaccccatgattggcacgtcctcgtccttcagaaaccgctcgggcttgaattgttctggctcggaccacacttgttggtcatgagtgatggcccacaagttgaccatagcagttgtgccagctggaacaaagtggttgccaatttgtgtctcgtgaatggaaagcctggcccatgaaagaagagggcccggtgggtgcatcctaagggtttccttcactatagctcgcacgtaagggaggttaggaaggtcatcatcagtcacactgcacccagacccaaccacagagtctatttcacactgagcctttgcttgtatttctggatgcagtaccatccttgctagaatccactctagaagaattgccactgtatcagtccccctaaatatcatttcccacaaaacagcaaccatatcagagtggtttagcctatcctctttctccaaatccaacagcacatcaacaaagtcaccacctgagttatcaatatctctggccttattatcctcactttcagcatccctcttcac

SEQ ID NO: 50233 - DNA, 864 bp, Glycine max
  unsure (1)..(864): unsure at all n locations
  Clone ID: PAT_MRT3847_16369C.1
ttggattactttatatttggttggagctttgtcacattctaatcctttttttttaaaaaacaaaaatttctatgaaatagctgtcaagttaatttagaagtgaactttgccagattcaacaaggcgtattaggttgggctaagcattttaaaattattggtggaattgctcgaggacttctccatcttcgtcaagactctagactgaagatcattcacagggatctcaaaacgagcaatgttcttcttgatagtaatatgaacccaaaaatatcatattttggtatggctaggacatttggattagatcaagatgaaaccaatacaaatagagtaatgggaacatatggttatatgcctcctgaatatgctgtacatggatctttctcagtcaaatctgatgttttcggctttggtgtgattgtactagagataataagtgggaagaagattagggcattttatgacccacaccatctcctaaatcttcttgggcatgtatgtctaaaaaagttagcaatctatatcgggatagtaacaagtccataaaacgattaaaattaatagtttgttattttaagaagaaaatgaaatttcatttgccatacaaaattcgttttagagcatggagactcttgatggaaaaaaggccaagagaacttatggatgacttaattagtcgataattgagcttgtccatctgaaataataagaaatattcatattggtttgttaggcatagaacaaagaccagaagatagaccaaacatgtcatcaagtaatgtggttgataataaaatgagtattttcaagaaattagataatttaaattgagtgagatagcaaattttttttaatgtaaanc

SEQ ID NO: 50234 - DNA, 335 bp, Glycine max
  unsure (1)..(335): unsure at all n locations
  Clone ID: PAT_MRT3847_1636C.1
gactaatgagtntaaaaatgaagttacantannagttaaactccaanacagaaatctggngaggttgcttggttgttgctttgaaaaggaagnaaggatgctagtttgtgaatactgaatacctaccaaataaaagcttggatgtcntnatttncggtcaatncagataaaaaccgaagctcgtcactgacttggaataagcgctttgaaatcattttggggattgctcaaggtgttttatatctntcatcaagattcaaggctgaaaataattcatagagatctaaaagccagcaatgtactacttgatgctgcaatgaatccaaaaatctcag

SEQ ID NO: 50235 - DNA, 143 bp, Glycine max
  Clone ID: PAT_MRT3847_16370C.1
gattccgggcccgaccacacccgtccggcagaatacgacaaatacgacacagcggatagtcacataggctattaacggtgagagcgggagagaaacatacgacatcagatacaaatggataagtttccagccgttgacatggg

SEQ ID NO: 50236 - DNA, 451 bp, Glycine max
  Clone ID: PAT_MRT3847_16371C.1
aaaaaaaaaaaattttggggaacccaaatttttttttttattttaattaaaaactttaattttttttttttcccccctaccaagtataagtttaaacaaatgtaaactacttccaaaaggatttaaaaatcatcccgttttaaagggctcatttgtaaatttgggacctattttttttttcaaaaattaaaaaaaacttggacaagcaggacgccttttttttagggggggaaaataattattcactgacataaccccctggggaaatgagggtaagatttctttttccataggctcactacccacttggaaagatttttttggggggaccaaaacaattttttttggaaaaactaaattggcaaaggctttaattttctccttttgattttgggggggggccaatataaggcaaccattattttttacagaacaactttttgtaacagcc

SEQ ID NO: 50237 - DNA, 218 bp, Glycine max
  Clone ID: PAT_MRT3847_16372C.1
ggtacctaatcgaaacaggtactcccaatattcaggacgctgagactggttcaatgggaattttattatagactgtgacggcgttcattctatcaacaaccgaagacatctaagatcgtaagggatacacaatacacagtagatttaaagccttggtgctaaaacaatgtggatctgatacataccgctgcataattcccgatgatgaagataggtgc

SEQ ID NO: 50238 - DNA, 391 bp, Glycine max
  Clone ID: PAT_MRT3847_16373C.1
ccctgctggaccacccctactaaccgctcgtccaccccccgtattgacactcgccgggctaacagctcgtgatggcctcactgaaagtgcaggaggcaagcttgacgggacatggccaggtcaagaacattctgaacactgctgcacctggcggcgcaggcccctatcgctgtccaactagcaaaactcggcaacacccatgtcacagccacttgtggggctcgccacattgactctgtcaagggcttacgagccaaagaggatttctgaactacataatatccccgccgggggcctgaaccgaatagtccactacggttggaaatactcatgcacacattctattagggccaaccggaaaccccatggccaatcatgggatcccaactcg

SEQ ID NO: 50239 - DNA, 295 bp, Glycine max
  Clone ID: PAT_MRT3847_16374C.1
attcaaaacgcctgctaacgattagaggaaaccgtaacacagacatagaacaaacaacgcgaaacgtgcctgatgcctgtcattaccgtgccatacaatgtagcgcgacagtgccgagctgcgattgctacaatgacacggatagacgatgctccgctaatagtcagggtgatcacgtgcctcttctacccattcgaacacatgcaatctacactgatgtatccctgagataggatccgcaaaggggtctgattgcttgacatctcgtcaaggccttggcttccgtaatggatgg

SEQ ID NO: 50240 - DNA, 560 bp, Glycine max
  Clone ID: PAT_MRT3847_16375C.1
cttcacaacacaactctctctctctctctcaccaccccattttgctttggagtttgatctcagtttcacaacttggtttgtgttgtgaaactgagatcaaactccaaagcaaaatggggtggtgatccttcataacattttcattcaaaaccataatgatattgttctttttatctacttccaatatctagcttttttttttctctaacattcaatacctgatgcagtgtaacttgagagattaggccttgactttcgtccgaactatattcgggttcaccaaaaagaaacaaaaaaaaataaattgttcaattattgcaagtggggtggtttgaactttggaggccttgaagttgttgaggtggctttgtatctatattttgaggcttttgggctatggaaacttgtttgtgagagttttttggaagatggggtttgggagtaatgcagttcaagcagggagtttggatgtggacaagtcaaatgaaaggaagaaggtagaaggtgctggaaaggagagaaaattggggtttagatttagcttctttgggagctgcata

SEQ ID NO: 50241 - DNA, 189 bp, Glycine max
  Clone ID: PAT_MRT3847_16376C.1
tgtttaatttatgcaatcagtattggaagtacacttgacattaaaaacccggtcattttttacaaactcaagagagtcacatacattattatgatttcaaagactcaagtttaatatattctagtatcatccatttacatagcttctaacttaacatcttaatccttatcaagttcaaacatctaaaat

SEQ ID NO: 50242 - DNA, 531 bp, Glycine max
  Clone ID: PAT_MRT3847_16377C.1
caaacccaaggaaaaaccaaagttttttggggggaaccccaaaaaggtaaacgaggaccaacaaactccctaagtggaaggggaaaaaaaaagaaaaaaaaaggacaacatttttttttttgcccccccttacgaggtaaaacacccaaaaagtaaaacgacccctaaaacaggggggggggaaaagctcatgggcaaaactaaaaaaccaaaaaacccaagctggttagctttttcctttaaaaagggcaaaaagaccggaaaaaggagggtaacggaaagaaatattccggttccggaaccgagggccccaaaaaaatcggccaacacgggaagggccccaaaacaaaggcccccaaaggcgggggggggggaaaggtatcgatccacctttttcggaaagttgaacccacggggcccggccaaccattgggggccccttaagcggctgggcaccatctctagcaaagaaaccaaaaactccaacccatgttttggagaacagggcccaggctgaaagcataaccccaa

SEQ ID NO: 50243 - DNA, 365 bp, Glycine max
  Clone ID: PAT_MRT3847_16378C.1
aaaaaaaaaaaaatttttaatttaaaaaactgaaaaaaaaaaaaagaaaaaaaaaaaaaaaggagcacagtaataaaagtagggcggccgtctagggaccagctgcccctctgcgtcaagtcttattccctatagggcacctaaatccctccactggccccccttttacaacgccttgaccggaaaaaccctgacgtcccccagcttaaccccctggaggtccctccccttttcccctgctggcacaatcccgattaggcccgagccgatcgcccttaaaaacacttgcccatccccattggcaaaggggacccaccctgaagcgccacattaaccccccctgtaggggggattacaccccgggg

SEQ ID NO: 50244 - DNA, 488 bp, Glycine max
  Clone ID: PAT_MRT3847_16379C.1
gacgattattttcagggtggatggggaactttcaactcagaggtacatgaccagactgggaaatcagaatcaaccatggatcctagtggtataaaaacagcagaaaatgctaatggttctagtagaaatcttgattggatgcaagatgatctatggcaagggagtgataacaagacaactgatactgtgcctactgcggaagataaagattcatttgatgaatggaatgattttactggctcaggtagcacacaagatccttctagtactatttccaactcaaagacaactgcccagactggaaatgttggatattctgttgattttaatgatacaaaaacatcacaggatgctaatagctcttctaacaaggattttgactggatgcaagatcagtggcaagataacaataacaagacaacaaatgccatcagtggtaacgaagctgctgacgcatttgatgcatggaataatttcactggctcagc

SEQ ID NO: 50245 - DNA, 446 bp, Glycine max
  Clone ID: PAT_MRT3847_1637C.1
gttcaatttggacaaagccatggccgcctccaactgatctatggctctctccgtcggcctaacttgcttttagatgatacttaccatagcacactctatcgataccgtaacttctcaccttgaacataaacaacctaattcaaccaaacattatgctccaaaaagactctattatttcatgctctggagagatacaactcacacaaagtagagcaaaacggcgtgcccacctttagatcagtcagacgagacctttactctgccccaatacaaaaatgtgaccacgaaatcggctagggagacgactggactaactacttgaaatggacaatctagggaccctgacaagtgaactgagatgacggactagtcttcttgttggcacccggacgttgtaaggcccaatcctataatggaatttgaggtcttgtcaacagaacctaaag

SEQ ID NO: 50246 - DNA, 394 bp, Glycine max
  Clone ID: PAT_MRT3847_16380C.1
gggtggatcattgtgggacttgatgtctaacggcgacgtcatcgacgtggtggccagtggtttttcggctatcctccatttctggtcgtacatgagccaagctttcaagcacatcgaccaactcttgtatcacctttacgatgatatgcccaacgccctcttctacatggtcgaggccaaagagcaactcctgatttttgaggctttcttcgtctacgatgtttctttgtttgtcttctgccaggataggaagacgtttgattcattgtagggagctgatccgactagcctatcctatatggctgctgtagttgctctgctaattaaccctgaataatctacttctgctgcccttcttgcgatggctgtaatggcttgtgtgcttgtaacggtc

SEQ ID NO: 50247 - DNA, 119 bp, Glycine max
  Clone ID: PAT_MRT3847_16381C.1
tcccacgcgtccaatatctcccccgttgagcttttaatatacgggagttctttatatacttccacaggttttttactaacctttgcttcacttgctttcaccacgcaactccttaacaa

SEQ ID NO: 50248 - DNA, 154 bp, Glycine max
  Clone ID: PAT_MRT3847_16382C.1
gggacccggggtttgtccaagaaataccggacgggacccgggaggatacccaattttccctaagggggggccaataaaggctgggggaaataagggccaaagttgttccctggggaaaataatattcgcccgatatataaacagaaaacccggc

SEQ ID NO: 50249 - DNA, 458 bp, Glycine max
  Clone ID: PAT_MRT3847_16383C.1
ctacattcacagcagcacatcacaaaatcacgttattttttttttttttgagaggaaaaagattatatcatattatcatttcattcaatgagagaagaaatacaacttggaataagatgaaaaactagtctgctagcatacaaaccacattaatgtaaaattgtttcttgctgaaatttttattcagttctgatttatttcataatatgtaacttgaccaggatgaagattcaacacaaggccctcatgcttttggtaggataatgtgtcccctttattttatttgaaattcgagttagtatataattaaacatttatgtagagaatgttttatagtattacttgaatataatgagagatatttttggatgaaatgcttgatagttttctcaacactcagcttctcttatatatatatatatatatatatataaacttagcttacaaaggaagctttt

SEQ ID NO: 50250 - DNA, 363 bp, Glycine max
  Clone ID: PAT_MRT3847_16384C.1
aaagaaaaaaaagtttttgtttacccccattttttttttggcacccagggacaatactccaggggtcaattaacttgataatacgaaaaccgccctgggtgagtccaaccaaaaatctcagggcataattaattaattaattaattaaggaagttgcttttgaaacatgcttgttttgatccaactttttaacaaaggtttttttgatttggtttggcaagcaaattaaaaccagaattcctttttcacccttgggattttgactcggcccatgaaagttccccggggggaaagcaccagccccagcaactggctttccaccatacaggggattcccccaaccaaagtccaaatttttgaacc

SEQ ID NO: 50251 - DNA, 239 bp, Glycine max
  Clone ID: PAT_MRT3847_16385C.1
acgcgtcagtacaaagaagacaacaaaaggggacaacccacctattgacaaccccccttaatccaatccatccccccaattcctccaacctaaattcccgaaaaatggcaaaggctccggaaaaaaaccctccggccaaaaaggccccggcggaaaaaaacccaaaggcggaaaaaaaggttccaaaggaaggaaccgccggaaaaaaaaaaaaaaaaaggtcaaaaaaaaccttgaaa

SEQ ID NO: 50252 - DNA, 466 bp, Glycine max
  Clone ID: PAT_MRT3847_16386C.1
agagagttgattttatctttttgatccgatttaagcgactcaggttcccgaagacaacaatttactgttgggcagtggcctcagcggcctcccagttggcaccagcggaaggggctccctcagcagcccattctccctcgtgagcgggggtgttccagtcctcagcgttgtaagttccgtagatgggctcagactcggtggcctcaccggcggcggtgatctcggcagccttctcttgctcggcttgctcctcggggttgcggaagaggaaaaggtcaaccatgacgtcccagggggagccacgggtgatggtgttgcggaggtagttaacctcacgtgcaagcaaccaccacatcagaccgatagcctgaggagacttgttgttgcaaggaatgacgatgtccacgtagttgatgggggagtcagtgtggcagaaagcgatggtgggaatgttcacgtaagaaga

SEQ ID NO: 50253 - DNA, 534 bp, Glycine max
  Clone ID: PAT_MRT3847_16387C.1
gggggaaaccttcccacccaatttaaggaacaaaacctgcccaaccccttaaaaagggtgaaaaatcttaaaaaaaaaaacattgccccccacggggggggggggatttatttggtttaacaaaaccccttatttaaaccccaaaaagggggggcctgaatttggacccccaaaattttgggggggaaaaaatgggtccccccccccgccccgccgttgggtcgcccttctccaaaaaggaagggccaaaaggggctttaaaagggcccacctttgaatttccggcggggggctaagggacccggcaaaaaccccggtttttaaacccttcatttaaaacctgggggggcgggggaccccaccatttcccccccacaaaaaggccccccttaattggcctcccattcttggggaaaggtttttgggggtcaaaaatatttttgtcacaaatgggcgcccccccgaggctctttttgggcccgcgaacctggttcaaaaatttaccccgttttttaacccccccctaaccccctt

SEQ ID NO: 50254 - DNA, 266 bp, Glycine max
  Clone ID: PAT_MRT3847_16388C.1
gcttgacgcttatcttgacaatctattacatgtgcaactagagtagggggtgcactaaccagaggaggggggacaacttacaaggaaagctctctctcgcattgaatggctgcaaaaagcttatgtgcctaccatagcacatattgaagagttccattccattcataagatgatgaatgcttctgatttaaactataatatttatttactggtgagcattgaatctgttgggattacaatgagcatgtaaatcttttccaaaacaa

SEQ ID NO: 50255 - DNA, 771 bp, Glycine max
  Clone ID: PAT_MRT3847_16389C.1
ccacgcgtccgtcgttggtcagataatacccacatccgaaaccaaatgggtttgctctgagaaccgaaatgggtgacgaacaaccgtcgaccaccgccgtctccggtctccgtcgagtcatcacgctcatctcttccttgatctccctctccctctcgatcagagtcttcgccggaaagtggcaacttatccggagcaggctggaggaactccactcggccctcgtcgccggagatgccacgtcactctccggcgagctcccggcgataacgggcacggcggaggagtgccacgagctggcgcggcggtgcttggatctgtcctacagcggaaagcttcttatgcagagcgacttggacgtgacattgggaaagttggaagctcacgtcaagaagctatctgagatattcaagaagaatgtgtcgatgcatggctatgccgttgtggtttcaaggcctggctttggagcttgcaaagatgacatgaggttctacttaagggacttattgactcgaatgaaggttggtgatttgggtatgaagaagcaggctttggtgaacttgcatgaggtggttgtggaggatgaaaagtatgtgaagttggttgctgaggtttctgagtttgttcacgtgttggtggattttctaggttccaacgaggttgagggtgtcgaggaggctgctaaggttgtttctttggttgccgggtttgattcttataaaggggttttggtcagtgctggggttattgccccttgattcgggtttggat

SEQ ID NO: 50256 - DNA, 243 bp, Glycine max
  Clone ID: PAT_MRT3847_1638C.1
aaacatcaacgcactttttacgacttatatatttataataaagaagccaacaccggatttgggcgcgcgatacatatattgtatttatactcccactgattttgtggttcagctggacatataaagagtccggccatgtctgatggaattcgttataaaagtggactcactgattccacgcatttgagactgcagaataccatatcacctggtggagactatataatatcatggctttagtgt

SEQ ID NO: 50257 - DNA, 377 bp, Glycine max
  Clone ID: PAT_MRT3847_16390C.1
ccaacccgtccgttggttttaaggttaaaccagaccgggttatgattccccaaggggggcggacaatggaacgtggggttggaaaatttaatccttaatttgggaggggttattaatgcgattataacggtggcctggcttttatataattggaggtggtggaaccgggttttgatttaataaaaggagggcccggattttttaatttaattttaatcaggagaccatgaaccatattggaaattttggttggcttccttacggtttggattaatatataaatggaattgattggggagaaaaaaatttcttagggtttttgcgtaattccattctttttaaaaaaaaaaaaataaataaaaattaaaaggggcggc

SEQ ID NO: 50258 - DNA, 863 bp, Glycine max
  Clone ID: PAT_MRT3847_16391C.1
gttccaaatattaacgtgggcactcttttttatatgcaaggaggaatatatcattacatcacgataataccctcataccacagtcaaaatatgtgtataaacattgcacaatgttgatctaccttctgagtgtagtaagaatatagaaaaataaataaagaaacacatagtttgtgttttaaatcccagaaaatacaagacatctttctgattcttaattcaggatctggtaacataagggtactttgcagtttgtacaagtaatttatatagatctgtttctgatcatagatttcgatgaccaatttcaattagctatcagccacagaggaaccaaacccaatatcaaaaccaaatgtaatgcaggttaactcatgcttgtttccatcgaacatcttcatcttcaaagtgtatgaaccaggtggagtgaatccaggtaaaacttgggaatgagcaatcacaaaatcaccagctgaaacagggcaagtagtttctccacaaaggtcatgggtctcactgtgtatgtgccatccgaaatatgacacatcaatcactagcttccctccagataaagctttacctgtagttgcagcaatgctgaatgtagcaggctggcctcgtgcgatgggatcaggagatatttcaacccctttgacctcaacatcatagtcagctttcttatcgcaatagtgaatatcggtggcgttggaaaatccgtagagaagacagagagttgaaaagaagaagaagaagaatttggagcttatcatttccatggattgtcgttagcagcacaactaagaaagcaccttcgcttgcgcaggttaatttgctaatattcctctctttccctcctttatatc

SEQ ID NO: 50259 - DNA, 416 bp, Glycine max
  Clone ID: PAT_MRT3847_16392C.1
tcggtgacgcgtgcggcggcttattgtacgacggccgatacaaattctggactaatcacgcgaaaaattttgctttgacagaagaggaaaagacggatgtgattagaaatagaggcattcctgcatgatgttcttgcaaagcgagctcatgaatatgaaaaacatgatggtcatgaaagcctcaatgatcaaataactgatgcggacaggtagtattatactaacgatagtaagactgcagatattatgaaccttacacaaagaggagctggagaacttaaacgtctatactgatgggtaagctcgatgaggacaagcatatgactgatataaattagtgcacgggaatatcatgtagtgcaaatactcctaatggcacaagaggaaattatgtcttatagtgcaagagatttcag

SEQ ID NO: 50260 - DNA, 2175 bp, Glycine max
  Clone ID: PAT_MRT3847_16393C.1
aaagaacgacgcagcagagacaacaacaacaaaaaaaagtaaagaatttgctttgcgaggaagtaagtaggagatgctctgaactttcaaatttgtacaacccctaggaagagaagaagaaggttcaaaatccaatccatttttcatttcgaaagatcgtgatcgcaatgtccctctccaccgtgaggcagcggcgctcggagccgtctgatccgtcgccatcagaaccgtacacgaagctggacaagcccgagaaagcggaggagaaagacgaagggttggggtgggttttcccgttcgtggctcttgggttattgaggtacatgagtgccacctccaacatcatccacgattgcgacgaggtcttcaattactgggagcctcttcatttccttctctacaaatctggattccagacatgggaatacagttcacagtttgctcttcggtcatatttgtaccttttatttcatgaaatagtgggtcgaccagcttcatggttgtttagtgaggacaaagtgagagtgttctatgctgtgagattctttctcggtcttctctctgttttgactgatactgttctcgtggtagctctttcgagaaagtatggaaaacgacttgctacgtatgcccttgctatgctgtgcttaaccagtggctgtttctttgctagcactagtttcttgccgagttcgttttctatgtatgcaatatctcttgcatcaggtttatttcttctggataaacttgctgcagcaatttctgttgctgttattggtgtaatacttggctggccattctcaatcttggctttccttccagtgacactatattctctatctagaaaattcaaacaggcatttattgctgcggctgtcacatcaattcttcttcttgcattgtcaatagttatggacttttactactatggaaaatggacttcatctgtcttgaatcttttaatatataatgtagctggaggcggtgaaagccatctgtatgggactgaagggcctctttattatctgaggaatggatttaacaatttcaacttttgttttgttcttgctctgctgttcttggggattttgcctattgcaaagaagaaatatgcaccagacctactgattgtgatatcacctatatatatttggctggggtttatgtctttgcagccacacaaagaagaaaggttcctgtatccagtatatccacttatttgtgttgctgcttcagctgttattgagagcttccctgatcttttccgtagcaaatataatccatatgatcgctctataatagtgacagttgccaaagttatgagaccagtggttcttagccttatactatatgcctctcatgcccgtacattttctctgatcaatggttactccgctcccttagaggtttacaagatcttggaacaccatgatgcagaaaacaattctgtactttgtgttggaagtgaatggcatcgctttccatcatcatttttcatcccagattatgtgggacaagttcgatggattgacgatggattccgaggtcttcttcccatcccatttaattctaccctaggggggactgcatcagcaccaccatatttcaacaataaaaacatggcatcagacaagcaatatctccatgatgttgatgcttgtactttccttgtcgagctgcagctagagcggccttacctgactcgtggaagtgacttgtcaacatgggagcctattgctgcattgccttatctggacagggagctttcaccggcactgtataggtcctttttcattccttacctttggcaagagaagaatgtttttggaatgtataagctgcttaaaagaagaaccacctgattttctatttgggcgggggatggggcattagattgtcctagaatatggtggtggattaacaacaaaaccatttttgttagagacagtaagcttgtaggatttccctcatctgttgttgaatatttgatttagttctaatcttcttagattccccgagtgttgtctgatgtctttttcccacggaagcattcagtttattaatcatctacggattaagtgtgtgttggggtgagtatttgcaaactggatttggataatcttcattttgcaaaattgttttggttaaaattgagtttgaagtgatttatgttta

SEQ ID NO: 50261 - DNA, 315 bp, Glycine max
  Clone ID: PAT_MRT3847_16394C.1
ctataccattcgagtattgcttctttatgaaatgcacttcctccatagatacgtggtgaccattatattttcagctgcattaattaacctaatcttctatccacaacgatctagcccacacaccagcataataattttggagccgatcttataacatgcatactgagattttaactcaattacttagatcctttccttgtcttggatgaattctcattgactgctactgctgaatttcctgatcattcacatataatattttatactgtcacataccttttgcatttatcttgtatctcactaatatttttaatg

SEQ ID NO: 50262 - DNA, 195 bp, Glycine max
  unsure (1)..(195): unsure at all n locations
  Clone ID: PAT_MRT3847_16395C.1
nncgtttttatttttatccctattgtgacgacacttaaagttcctctgttgtatttcatttggaggacgttcgtcctttattggtaattatctaacagtctgatcaataatctcaccctaaatccctgttcttagaattagagtaaacactgaaaggggctttggtctctagcattatgcactgaggaagaaaac

SEQ ID NO: 50263 - DNA, 221 bp, Glycine max
  Clone ID: PAT_MRT3847_16396C.1
tgttcgcttttcctagaacctagtgctactgaggcttacagcgggctaattggagaaactgccaaacgtgtgcctacatggcaggttacagaaggttccctggatgccacatcggcacggggaaacagaatcgactgagctaagactcccagatttactattgtgcttatacagttgaatctagagctgaattagaactaccgcacttcagtgagggtcat

SEQ ID NO: 50264 - DNA, 407 bp, Glycine max
  Clone ID: PAT_MRT3847_16397C.1
cccgcgtccggtcacgggcgttggtacacactctgggtgaggggggtgagtggaggcggtgtgagcttgggagcgggaggaaccgtgtttgacgaagaacaccatttccaatccgaggccgatgctggagcctccaagacctattcttaacaagcaggaagcattctgacaacggcgacctatgtggttaagggtgggccgtgttaggatgatgaaattgctacttttaagactggattagcgggtactgccaagggggactttgttgggaaagagagtgtcaatgccaatatggttgatgatatctgagcccttttctcacaagctgtgaggtttgagatgtgaatcgtgctgaatgccacatgattgacagttgatggagaaggatgagttatcttgattactga

SEQ ID NO: 50265 - DNA, 379 bp, Glycine max
  Clone ID: PAT_MRT3847_16398C.1
gctctctcttctttcagtttgtattttctaagaagacaaagcaagccatctcaatcttgaatcctccatcagatctccctgcgaatgctgctgcccaagaaaacaacccaaacccaaaacgcacccacaacgcagaaaacggcgtcgtatgcaacccccaaatgaagtgcaagaaacatacctcagaccttagcagcaccgttggcgtctgcgcctcctgtctaagggaacgcctcatagccctcgtcgccgcccgagtcatctcacgcgcctccgacgaatattccagaaactcagaccctaaccctccgccaccgttaatcttccctcgctccgtttcgccctacgtctctcgccggaagcccgactacgccgccgc

SEQ ID NO: 50266 - DNA, 424 bp, Glycine max
  Clone ID: PAT_MRT3847_16399C.1
agctcggaattcggctcgtgatcgtaataacttttaacacagcgatcatgattacagatctcgatcgctccgaccacagggggatgttatcgtggcattaccgtgcgtacaagactgaccctattcgaacgaacacaagccttgaggcccgcactaccgaggtgtaacgcacacctcgtacggccgccgcagaaacacacaccaaattgagctcccataccatgcctgaacgacgccctataccaacgaaggactacatccttggcgaagaatttagatcagactcccacacagttcgcccgctaactaacctgcaagccagagaccccgtcgcccatgctaaggacacattcatgctcaatatcgagggcaccgcactggctaatgttccatactacaacacacacgtatctgatgtcgagaa

SEQ ID NO: 50267 - DNA, 137 bp, Glycine max
  unsure (1)..(137): unsure at all n locations
  Clone ID: PAT_MRT3847_1639C.1
anctgatncaangcggtctggttcgggctccnnatccggatgtcngatccggatcccggcctgcgtgccagannaannacannatactaagtcggcaaataagattgttaacagccatccncctcccggnatgggcc

SEQ ID NO: 50268 - DNA, 474 bp, Glycine max
  Clone ID: PAT_MRT3847_163C.1
tacggctgcgagaagacgacagaaggggatgaaagacaatttgcattcatagggggcagacatttgttgcatagtgcgatcataacaaatgaggtggttaaggaagttcataggagtcaaaaatcatgcctgatgttcaaagtagactatgagaaggcatacgattcagtctcgtgggatttcttgatatacatgttgagaaggataggcttttgttccaaatggattcaatggattgatggttgcttaagatctgcatccatttcagtattggagaatggaagtccctcggctgaattcatcccacaaagaggacttaggcatccattagtgtctcttttgtttaatattgttgttgaagctctaaatggattgatgagagtagctgtggagaaaaatctgttcagaagattcctagtgggctaaaataatgtggatatctacatcctacaatatgcggatgacactattttt

SEQ ID NO: 50269 - DNA, 487 bp, Glycine max
  Clone ID: PAT_MRT3847_16400C.1
aattcggctcgagtggaaaatcttgccaacatctctctgagttagcagggctttaccttcaaagaattggagatgctggccttctcctggttggacagggatgcaaattcttgcaagcgcttcacttggtagattgctcaaacattggaaatgaagccatgtgtggcatagctattggctgtaggaatctaaagaaactttatatccgtctctgttataaggtattgtctgcatttcacgtttggttttctgtgagaaaacgccattctgtatgtgtaattccatttttggcttcaaattgatgtttttattttggatgtctcactcactttcaaaatgcattctgcacctcgtaacctaggataactgtgttgagtcattttgactagaattaatactggcacacattaggcatgcttctacaattttgtccttaatatttaaatattttaaaatagttgtttgttcttttggtgggttcatattc

SEQ ID NO: 50270 - DNA, 371 bp, Glycine max
  Clone ID: PAT_MRT3847_16401C.1
taataaaaaatcaacggggtataccagtgatacagaacacttagcaaaatattacgcgtccttaaaatagaacacaaagaagcctgggctctgggcatacaacatcatattacagattgccaaccattgtatgaactacggcgattcttaatttggcacaaggaaatggcgtttagagtcaacctacatgagaggaagtataccacccatcaaacctatcagggatatcaaggctcatttcgctggtcctggacatcatatggtcaaagggtgaggttggcggctaaaaggtgcataatgtgcgtgctttctttgacggttttttgtttcaaggtgtgcagttgagaattcgtttctaaaaagccttgtta

SEQ ID NO: 50271 - DNA, 165 bp, Glycine max
  Clone ID: PAT_MRT3847_16402C.1
ttctagcttcttgtttcatgcaagatgtatgcaactggttacgtgatataaattcatgtgaaattgcaaacagggctgtctttttatatggaacatattaaaccaaaataaaattccataccggtgcctggaggcttcccagctatctttatagtgagggcggtt

SEQ ID NO: 50272 - DNA, 422 bp, Glycine max
  Clone ID: PAT_MRT3847_16404C.1
agcatcctggtggtgaacatacaggagaaaaagatagaacctttgaaacatcgtttatcagagaacaatgggctttgcaacagctgagaaggaacgagcaacaatcttggaggcctcagaggggcctgcctgagaaatctgtctcggttctacgtgcatggatgttccaaaactttcttcacccgtacccaaaagacaacgaaaagcatttgctagccattcaaagtggattgacgagaagccaggtgtccaactggtttataaatgcgagagttcgcctctggaaaccattgatagaggaaatgtactcggaggtaaacaaaaagaatcgtccaatagaaggatcaggctgcgatagcaggaactatgcaagcattgggaatcaaagaattcagatgaattgaattactgaaatattctta

SEQ ID NO: 50273 - DNA, 256 bp, Glycine max
  unsure (1)..(256): unsure at all n locations
  Clone ID: PAT_MRT3847_16405C.1
ataactcttacacccggggggagggggaacggggattcatctcataacctgcatcatttatttactttccttggtctacggcaggcggggccatagttacacatctcacctggnacaaaagacgagatcatgagccaaattatcacacgactaaaaacgattcatgaacgaccagggacaccaaactatgaaaatcttctacaatggatgcgacattaattgggtcgacaacttatttttcaaattagaggcccat

SEQ ID NO: 50274 - DNA, 493 bp, Glycine max
  Clone ID: PAT_MRT3847_16406C.1
ggcccctaaaggacaaaaaaaaagtttttgaaaggaccgttttgaaaacccaaaaaaacaaacattggggggaagggggggactccttttaaaattgcaggtttttaagggaacaaaatcaggggttggaaaaaaagggccccccaaaaaattggggcaaaattttggaaaaaccaaaataaaaagatcccctccccaaaagtttttgaaaacttgaaactaaaaaaaaaaaggggaaaggctaaaaaaaaccgaaatttcctgaccaattaaaaaaattatttgacaacaaggaccccctaggggaaccattttatttttccacacttaaaaaaattttggacttggcgggggcaaaaaccacctggtaacaaaattttaaaaacaaaacaaatccaaaggccccaatcacccgaggaaaaaccggcttgggggccaattgaaaaaacccaacgggtaccacgggaaaaaatcccgctttgaaaaaggaaaa

SEQ ID NO: 50275 - DNA, 247 bp, Glycine max
  Clone ID: PAT_MRT3847_16407C.1
agcagcacttgtgaaaggaaaaaaaaatgcacatgtttcttagtaggttactaaatttgtacaattaattaagattttagccatcagtgagtttgaaaagggaaatgtatttattttcagcattaaaatgcttccaaaagatcaagttgcttttgtttgtttgtttttttaaccgtaatgtagatggagaaattggaggcaacctcagtataagaactgccactttgaacagtttaagtcttaaaga

SEQ ID NO: 50276 - DNA, 611 bp, Glycine max
  Clone ID: PAT_MRT3847_16408C.1
ctcacaatgacacctccctcacaagtatacttgtgtcatggctacaatgtcatcttccaccgcataaactcatgcacgcaccctcctcacaacaccgcaccaccacctcctttctttgcgtgttaccatctatgggtttgggtttctggtgtggaacaataaatctaaaatgatcattcccaaagtgaattttttacttaagtaaaggtcattttaaaatagttttggagtactttattttggaatgatcattttaaaagataacttttgccttctgaaataattttgaaatacttatttctatttcaaaaggtaaaaaatatctttcgaaatgatcatcctaaaatagtgtgataccaaattattttagaatagtcattccaaaataaaaattctcggtgaaagggttatttttatccacacatataaaatgggagttcttggattcaaatgcctcttttttaaaatcataggatacatggtttttttttttttcctagttaaccaatatcctaaagacattagttaaaaaattaaaagaaaaaatatttattgaaaatcataagagaacataaaaaaaatcatggataccgcaattttttgcctcccga

SEQ ID NO: 50277 - DNA, 182 bp, Glycine max
  Clone ID: PAT_MRT3847_16409C.1
ccggaatcccgggcgacccaccgtccgggaaaccctcctacaaagctcctttcgcgttgccccccacacgcacaattggtcggtgtccactctcgggcgccgcgcatgaccgccggcgtcatgcaccacgacgtctccgcctgcatggttctgccgcgcatgcgtataacctctggacacaa

SEQ ID NO: 50278 - DNA, 429 bp, Glycine max
  Clone ID: PAT_MRT3847_1640C.1
cggggaacccaaatttcaaaaaaaaaaaaaaaaagggtgataaaaaaaatttttctccaaaacaggggatggtccataaaaaaaaaaggagttaaaaaaaaggaacctgtaaaagggggcaaaaaattgcctttcttttagacatcctacattgacaaaggaaaaatttagggataaaaacccaagcattgttggaaaaagaaacaaaaacggggaaaaaaaggttaaaaaaaggccccttgccagtgaaagtgccctgaacaaaaaaaccaaccatggaaaacataaccaagccaacgttttggatgtccttgaccttaaagtcagagaaggcatccgggttatcccccaaaccaagagggacaaaagccccaccagggtaaattgggtaaaatccttcacaaagggggcctccaacaaatttgaaac

SEQ ID NO: 50279 - DNA, 517 bp, Glycine max
  Clone ID: PAT_MRT3847_16410C.1
cacacgcgtacggggacgcttttttggaaaaggttagcgcagggaatatgatcggatctattattatgatgtttatagcgattcgggtaacccatataagagcgctgatctagcttgcctagcttaaggagggtttagtgcctatgcatattcgcacagagagctaattgatataaagccaacggctatagtccctaagagggagtcactattgataaagccctatatcccgcgagatgagaactttggctatttgaaggcgttatatttcagttacatatggagatagattccataggctcaagccgtttatacctacataacaatatgcgtttgaagaaagagccgagtttgataagtttgacaaaagacgtgaactatttgaaggaggaattcatgcttctacagaggcactcgatataattagccgcgtaccagtggtcatggaaattttgcgcactgatgttgaacaagttctaaagtaaccaccttctcatgtaattaaagatagtaagtc

SEQ ID NO: 50280 - DNA, 263 bp, Glycine max
  Clone ID: PAT_MRT3847_16411C.1
ggctcgaggagggacttagacctctttattctgacgacaggaccaagaatcagtgcgacgacaggtctgttaacgcagaagctgctatccgacaccaaggcgccaagagaacctccaacagggaaggattaccgaggaagcccaccggcgggagagactaggaatggccgctgaaaggcacaggccaaaggcccggaatcaatagatgattatgtcagccgccagagaagagaaaaaaagccagggctacactgaagggcagc

SEQ ID NO: 50281 - DNA, 416 bp, Glycine max
  unsure (1)..(416): unsure at all n locations
  Clone ID: PAT_MRT3847_16412C.1
tnnggtttttttttttttttttttttttccttttttttttttttttttttttttttttttttttttaaaaaaccaccttaacccaaaaccaatttttttcaaaaccaattgggccaaggggggggccaaatgggttccccttccgaaaacctttatacggggctttaaaggggaaggcaaaccatacctttccccggtaccaccggggcggttataaaaaggaatttaagggcctagctttccgaggggggggcttaagcaggggcggaatatattcggggaggccttggggcccaccggaatcatccagggggcccttccgggcccccgggaacgggtggggatccccattcccttcatggggcccaaaacccgacccagggtggggaccggggtggtaaaccgccccaccaggg

SEQ ID NO: 50282 - DNA, 348 bp, Glycine max
  Clone ID: PAT_MRT3847_16413C.1
tacagttgcgagaagacgacagaagggggagaccttccagtgaggataagcttttcaggtagagccttgatctcattccaacacagggtgaaagcaatgcaggtagcctatgatttttgtccttagtagaaagacactttatcataaccacgatctctatatttctgtatctatatctattttgcggtgcaattccattttcagtttacaaccatggctggtcttacttctctttatttctcaataaggaattattggttaaaaagaaaaataaccctttgctccactgagtttatcgctttcttttcaaaactttttggggtacgaaccgatttctcgtaccactat

SEQ ID NO: 50283 - DNA, 1116 bp, Glycine max
  Clone ID: PAT_MRT3847_16415C.1
cttttccatcaccaaaaccacacaagaattcggtgaaactccacttgaaacacagatcagggagcaaaggtgctgagcctaaaaactctgtgattgattccacagtaagagatttgaccagaattcagaaccttcacagaagggttatagaaaataggaaccaaaacaccatttcaaggctgcagaggttacagaaggagcaaccaaagcagtccttcaagccagtgtttgctccggccgcttcatcgacaagtccagtttccgggcagcttgtggcaaccttggaatccggggtgagtcttggctctggtgagtatttcatggatgtgtttgtggggacaccccctaagcatttttctctgatacttgacactggtagtgaccttaattggattcaatgtgttccttgcattgcatgttttgagcaaagtgggccatattatgaccccaaagattctagttcttttaggaatataagctgtcatgatccccggtgccaattggtttcatccccggatccacctaatccttgcaaggctgagaatcagagttgtccatacttttattggtatggggatggttccaacacaactggggattttgcattggaaactttcactgttaatctcaccactcctaatgggaagtcagagttgaagcatgtggagaatgtgatgtttggatgtggtcattggaatagaggcctatttcatggtgctgctggtttgctaggattggggaaaggaccattgtcatttgcttctcaaatgcaatctctctatggtcaatccttttcctattgtcttgtggataggaatagcaatgcaagtgttagcagcaagttgatttttggtgaggacaaggagctcctcagccaccccaatttgaatttcacttcttttggtggtgggaaagatggttcagttgacacattttactatgtccagataaattctgttatggttgatgatgaggtgctgaagatacctgaggagacttggcatttgtcttcagaaggtgctggtggtaccataattgattctggcaccactttaacatattttgctgagcctgcttatgagaatatcaaggaagcttttgtgaaggaaaataaag

SEQ ID NO: 50284 - DNA, 259 bp, Glycine max
  Clone ID: PAT_MRT3847_16416C.1
attgtttctctctctaactggaaaaaggaagaaaaataaagtacaacagttagctttttctttttctccaacgaatgaagctcaaaggcgagagatttatggtttgagttcccgtaaagccttgaactttgtggcttcttttccattttcaccgtacctttttttttaggcttcacatatgtcttcagatataagctaagtttgattcttccctaacctctttggagtttacattcagccatggacacttgcaatgctg

SEQ ID NO: 50285 - DNA, 990 bp, Glycine max
  Clone ID: PAT_MRT3847_16417C.1
aaaaaatgggggaaattcttaaagccggtggtgctagctactcgtccgtcgttaagacaacaattatgttggctgacttgaaggacttcggttgcagcaaagaaccaaaaacaaaaggttgaagcggctgcgagaagacgacagaaggggagagtcagtcagagatatagaaatggcttcgtggtgcagtgttcgaagcttccaggttccggcgatggaaggcagcgcactgcgcaaccgtgcttcattggccgccagagtggggtgtttgtccgtggccggcacctccttctggcgttcctcttcgtcaccgaagcactctttgccattcacatgcttgagcatttcttccgaaactcgtattaaggaaaatgttcaaacagaaggggcacctgcggctctgggaccatattctcaagcaatcaaatccaacaaccttctttttgtgtctggtgttcttggccttgttcccgagacagggaagttcgtatctgatgatgttgaagaccaaactgaacagcttcttaaaaacatgggggaaattcttaaagccggtggtgctagctactcgtccgtcgttaagacaacaattatgttggctgacttgaaggactttaagaaagtcaatgagatctatgctaaatacttcccttcacctttccctgctcgttcaacttatcaagtagctgcattgccattggatgccaagattgaaatagagtgcatagcaactttataagcatcaattgtaatagtacatctggctccatcagcaaactcaggttaacaatgcaggaagggacatatcttagtattgaagttttacttgttttgttctttggataatggtgctcttgtgattacatttaccatcctagcgacagtcattggatgtttcttgtttgcagcttttgtgacatcgtatattcgtatcacataagacatattatgaataagatcatttttaataaatatcttttactcgaactc

SEQ ID NO: 50286 - DNA, 480 bp, Glycine max
  Clone ID: PAT_MRT3847_16418C.1
cttttgtattcccttgattgccgttgtctttttcacctttcctttttttttttttttaatctaagtgctagcagtaatttttctatgggtattgtattgtatggctgtatgtcatcactgtaactttgactcacagctgatgcaaggtactgtaatattcttcttcagtctttcagatatgatccttgtgccatttggtagttaagacttgttctgtataagttatttatttttttattatgtctttcaaggtgcaatatgttttcttcgtttttttttgtcactgtatttcactcgttgatcaggtttatattgtacaggtgcatcagaacaaaacatttctagagaagaaagttcatctgctccagaagatccagagactgccaagatactaaaattgctgaatgaaaagatctcaagcaattgctctgctatgccaattgttttgaaaaggatgaaagactgcattgcaagaattga

SEQ ID NO: 50287 - DNA, 205 bp, Glycine max
  Clone ID: PAT_MRT3847_16419C.1
accctatacatatatttctcacaatatacactttcttatttatcacattctccaataatcaatatttatccatatcacatctattatacttcatcaatatcatccatataactatctccatcataaaatttaataatatctaccacaacacccatcaaattttttaaacaactcattactctctcaaacatcacatcctcaccat

SEQ ID NO: 50288 - DNA, 279 bp, Glycine max
  unsure (1)..(279): unsure at all n locations
  Clone ID: PAT_MRT3847_1641C.1
ccaagttgagggcgtngaaaatttacggtganttgaaccagagagtgaagcaacccatttcaccagggagtagaatagctagcttccttagctccatcttcaactcacagaacgtgaagaaagccaaaatgtgttacgttggagccgttgaagatgttagcttcgagcacaaatcaaagtccccttgtttctcttccangccttcttcgttttctagaaggtcttgcatgagcaaaacaccctcttcggctaaaaaacccaacaacaatggagtcaaaa

SEQ ID NO: 50289 - DNA, 245 bp, Glycine max
  unsure (1)..(245): unsure at all n locations
  Clone ID: PAT_MRT3847_16420C.1
acaacaaaaaaccnaaacttgtatatttttgtaagtttattattctcctcattaaacttnnaacgaattcaaaatacacatactagtaacttcccaaaattgctcttccattcttaacgtcaaccacaacctcacctatgctcttcttactccaactaaagactgcttaaaagatattatatctctttcatttaaatatcaattcatcttcttatcattctttacattcactacaactttttctt

SEQ ID NO: 50290 - DNA, 259 bp, Glycine max
  Clone ID: PAT_MRT3847_16421C.1
ccactccttcaaatgactcagttatgcaatccaagaaaaacaatgccactcaatcctctggtgatctagaccaaaccagcctaaccccaccaagcttaaaccttccatcactcacatttgagcttgatggagatgtggaagttcagtcaccagatagttcaatgtgggaatctttttttgctgaccacaatttagatggtgatttcatgatctcttccccagtgaggaccccacaagcctcttcctacaattgcaacta

SEQ ID NO: 50291 - DNA, 677 bp, Glycine max
  Clone ID: PAT_MRT3847_16422C.1
cccacgcgtccgaaaaaaaacagtaatggatatctccgtttctttctccaaaacccgtcctcctccgttctctccctctctctgccgccaactttccctccgtccaaacgctccgcaactgctgcgattctcccgaaacaacggaacctttcgccggaagcctccgccgacgatttctcgcccaaacaagctcgctgtcacagccattcagatttcaaacctatccgagaatgaagacgattttgtcctcgaagacgttccacacctcaccgactttcttcccaatttgccgtcatatccaaacccattgcaaaagagccaaggctactcaattgtcaagaaaacttttgtgagccccgaagatgtggttgctgaaaatgttgttattcaaaagggaagtcctagaggagttcattttcggcgtacaggacctcgagaaaaggtttatttcaagccagaagaagtacgtgcttgcatagtgacttgtggaggattatgcccaggaattaatacagtgattagggaaattgtatgtggcttgaacaacatgtataatgttgaagatatacttgggattgagggaggatataaagggttttattcaaaaaataccatgatgttgactcctaaaggggtaaccctatccataaatgtggtggaaccctttcttcgtacat

SEQ ID NO: 50292 - DNA, 462 bp, Glycine max
  Clone ID: PAT_MRT3847_16423C.1
ggttgggtttttttttttttttttttttttttgggttttttttttttttttttttttttttttttcaaggcactttaggtaaaaggtggacagaatttttagggcccttggctttggtctacgggcttttaaattattggggatccaaataccgggggggggggggccttgtttaattcttcaaaattaaataagattttgataataaaggtttaaaaccctgcattggttttttcccaaatgggggggactttttggcccagaataaaaaggcagggctggacagggttttaaagcaggcttgcgggttgtttccagcgggggttcccctttaggggggaaaccactcatggtttcgccctgggatttcccttaaacggccttccttgcttccaatttagttcggcccctcggggggaaaattcccggagggtgggtgttgacaggcccaacggggccctg

SEQ ID NO: 50293 - DNA, 265 bp, Glycine max
  Clone ID: PAT_MRT3847_16424C.1
gagagagagagagagagagaagcgttaatcttaatgggttacatccaccatggaagaaccggtctcaggcacatactcagattcataaccgccaccggcgtggtctcaaacttcggcagatcgcaatcgcgcgctgcattcccctcccatttccctatccttggcaacgtgctttttttttttaacaggcgattaataccttaacgaaattactcgataagttgaactctacttgcgcagggagcgaaactagcgtttgtgcctt

SEQ ID NO: 50294 - DNA, 290 bp, Glycine max
  Clone ID: PAT_MRT3847_16425C.1
gtacgattagtgtcgttctctgcctgttgaggcttgcgccgatgatctcgtgcgcaccatgaaggtttctgctggctgatttggggcgacgcttgtggggtactctggtattccagcggtgagtgatgccggagacaacctaggatgtggccgtgaccattgccataaagccggggagatgacacactgtggtggcgtgacatctgttgtggtagtagccgcagacgggccataggatagagcatcatctgatgataccgcttaggtgatccatattgcagcatcaggga

SEQ ID NO: 50295 - DNA, 398 bp, Glycine max
  Clone ID: PAT_MRT3847_16426C.1
tcggcggccgcccttttttttttgttttttaaacatcaatccttccttgtgtatctagtggtacagccatcataagagtacatgcgtttaacaaaattctgtcctactcttctaaacacatacatatacataacacaattacacacttacacaataatgtaccgtcttaaaagaaattattttactactttgatttcttctatttttttgaaatgtcattccgatcctctttctttttctttacaactctacgtaccttgaaaccttaagtgacttcacacactccttttttatttaaaaaaaaaaaaaaacaaaggattcctcaaccactttttaaaatttttttaaacagtgatacaatgcaattcaaaccagtcacgtgtcgctgttaatactta

SEQ ID NO: 50296 - DNA, 252 bp, Glycine max
  Clone ID: PAT_MRT3847_16427C.1
cccattcgtccactgtatctatctatattgcgtatttattttacaggctcacctatatattatcgggtcgagctcttttaaaagtgataggttccctaccccataccttttgggggctctttaatcattctattctacttttcatttcttacatgtacttaaatttgtgttactaaattaacattccactcaatttacactctaaataacagaattcaaggtctgtcaatctagagtatccaaacttacgta

SEQ ID NO: 50297 - DNA, 473 bp, Glycine max
  unsure (1)..(473): unsure at all n locations
  Clone ID: PAT_MRT3847_16428C.1
tctaataaccatttcccaaatatcctcacgacttctgtaatagaataaaagttcgtctccgcgaacaaaatcatctttagaaagaaaccaataccatggctccgcaaaatattttccgtgaaagccagggccaactgggacgannnaccattgtaatggaggcctgaactttcttaaaatggtcatatggaaaccacaagaaggaaggtgtattgctgcaataggtggatgaatcagtggtttaggatcaccaagcagggcttgagtgagttcaatagtccagacatgcattctaaatgctagtaggggtctgccacatgtctgttgttcaagcgaaggactgaaatgaagatcaaaattccatatgtgttcacagaccataaagttgatagtaactgaatcatagatatttaagtgcttcctcaactatttaaggccatcagcgaagaacttttttgttgatattgtatgag

SEQ ID NO: 50298 - DNA, 459 bp, Glycine max
  Clone ID: PAT_MRT3847_16429C.1
ttatttacatccccactaattgaataaattcgaattggattgtgtaccataatatgaatggaaagaatcagcaattaattgtgtacatacaaggctaaaaacaataataaaggtcaatactaaaaacagatggatgagaagttctcggagaggctaatttataggaaaaaagacagacttgaactttagtaatggcaatccaccaaagaagttgctgagaagacaataactttttctttggcctgaaaaggaaacaagttggattctctgagatgatcatcctcaggtgccggaagattcaagtccaagttcaaaacatctttgtgtttcttggcttccggaactttagggcttccatcaccaccatttgcaatattaattgccccaataataggtgcactcagaaaatttctatgctttctcatgtgtccccccaacgcttgcccagatgaaaattct

SEQ ID NO: 50299 - DNA, 380 bp, Glycine max
  Clone ID: PAT_MRT3847_1642C.1
cccactcgtccgcccacgcgtttttttaaaaaaaaaaaaaaaaaaaaaaaaaaggggaaaataaaaaaaaaaaaaaaaaaaaaaaaaaaaaaaaaaaaaaaaaaaaaaaaaaaaaaaaaaaaaaaaaaaaaaaaaaaaaaaaaaaaaaaaaaaaaaaaggggcgccctttttaaaggatcaaattttacttacccttccttccaactttttaatttttttttagtgcccctaaaataaaattaactgcccgcctttttaaaacttttgaattggaaaaaccttggctttcccaaatttattccctttgaaaaaaatcccctttttgccagttggcttaataacaaaaaggccctaaccaatcgcctttctaaaaattttc

SEQ ID NO: 50300 - DNA, 636 bp, Glycine max
  unsure (1)..(636): unsure at all n locations
  Clone ID: PAT_MRT3847_16430C.1
ataaaagaaatgaataaaagtgtgaatcacatatttacatccccactaattgaatcaatttgaattgatgaattgtgtaccataatatgaatggaaagaatcaacaattgtgtacatacaaggctaaaaacaataaagaaggtcaatactaaaaacagatgaatgagaagttctcggtgaggctaatttatagagaaaggacaaacttcaactttagtaatggcaatccaccaaagaagaagttgctgagaagacaataactttttctttggcctgaaaaggaaacaacttggattctctgtgatgatcatcctcaggtgccggaagattcaagtccaagttcaaaacatctttgttgtgtttcttggattctctatttgcattaattgccccacacgtaggtgcactcccaaaatttctatgccttctcatgtgtccccccaanncttgcccagatgaaaattctgccccacatatggaacactcatgaactttacacttagcattaatagtactcatcctantgttgctgctgctattattattattatacaaaanngttgatnnnngtnnnnngaanntggtgcttgtggtgtcacaataatnnnnatcatgattatgaanannattatnatc

SEQ ID NO: 50301 - DNA, 686 bp, Glycine max
  unsure (1)..(686): unsure at all n locations
  Clone ID: PAT_MRT3847_16431C.1
cacgcgtccgctttgagtactcctcctaatcaaacttccttaggacagcctctagagtttctgtcgcatggttctcctgtagctagttggcacatacctctttcgcataacccttttcatctcagtccatgcatctatctctctcccttcctctctcagcatttctctttgatttttattccaccaaacaagggcatagtttgagaattcaactactgctaacttgactttctattcttcagatagtcactgcaggagaatacatgctcaattttcatctcccagtccaggtaggtgtctggattactcttgtctttgaagggaggtacattgagttttactcccttaattctattttgcctcagtccatcattgccccctctgttccctccattaggtcgtccaacattttgattcagttggttctcgagtccttctattcgtccatagagctcttcattattacgattcaacaaatgttgcatttgtgtagtcatcacgtccagtaacaaacgccgagcttcgtccaattaatgatattcaccaccaccgccaccagctcctgccataattaaggaatagaaaaaaaagtttgcagtaaaataaataaaggtttcaggacctcaccacactnntacttacgtgtttctctctttgatagtagtaccacttgtgtttgatgctct

SEQ ID NO: 50302 - DNA, 268 bp, Glycine max
  Clone ID: PAT_MRT3847_16432C.1
gcgcccacgcctcctcccagcgctcctatcccttataccacacttgccatatcatataagacaacagcaacatttaatcagatatacaacatggacgcacttaactcaatggtttcaaagcacaaactcaccaacaatgggtcactctgagcctctaaaaccatatcaacacttgtggcttatacatgcaaaaagtctccaataaaaccaaacctaacgcttatccatgctaagacacatactcaaactctaactttaccaatactat

SEQ ID NO: 50303 - DNA, 224 bp, Glycine max
  Clone ID: PAT_MRT3847_16433C.1
attgcccttcttgtccaggaatttgagatctaacattaacaacaactatctaagcactagcaagctagttaccaaggcaataatgaagttcttgttaatgttagatctcagaagctgcacacattgcccgacttgtccacgaatttgagatctaacattagcagcaactatctaagcactagcaagctagttagcacgccagtaatgacgttctagttccagtg

SEQ ID NO: 50304 - DNA, 304 bp, Glycine max
  unsure (1)..(304): unsure at all n locations
  Clone ID: PAT_MRT3847_16434C.1
atgacacatgattatatagtgagaggtttagcatacgggtggggaaataagagcatatnngctgcatcacacagagtcagtacaagaagcacaaacacgtcattatacatggnctactgcttctgccgctatgggaagaactatgacagctactgttatgatgggtgcaatgttaaaaggaaatcaaaagttaacagttactggtgatggcaaaggtccaattggcagaattattgctgacgcagatgctcaaagaaatgttcgtgcatatgtagaccatccacaaacgcattttccactcaaa

SEQ ID NO: 50305 - DNA, 233 bp, Glycine max
  Clone ID: PAT_MRT3847_16435C.1
cgccactacctgctaccataatactacgtacattctccatttgatcagtgatattaacgttaagaaggcagtgttttgtaacatctctgcttacccgtgggctactatgcttgcatgaagagtcaaaaactcagctctgacttctaagcattgtgccccttggagctatatataaagggggctacgccttcatacatactgctccttttgtcgattggggggattatcttgac

SEQ ID NO: 50306 - DNA, 443 bp, Glycine max
  Clone ID: PAT_MRT3847_16436C.1
gtatttttttagtttttgtttttggagggcacggaacactcatacctaaattgggaaactttttgttacaaaccgggactaagagggagcgtattatgcaaggggtaggtcataccttgcgccagttaaccccaacaatagctaattgcagtgtagagaaaggggcccttgttgaaaggcctaacgaaatgataaaaagggttcctaaaataggaaaaataacttttctgaaaactgatattttatagaagcgcttgctatacgaatcgggagaaacccagctgatagaatctgcaaaatgagcttataaaagacactgtgccttcccgtaattgaaaaatatcccgccaaaaggggaccaaaggcaattccaacataaccagaggcgagtatgattgacttaacagtagccagcgccccaaaatttagagcatacatgcttt

SEQ ID NO: 50307 - DNA, 546 bp, Glycine max
  Clone ID: PAT_MRT3847_16437C.1
tcccaatgttgatatgatgactttcgataacgaagtcgagctctacaagatcaagctctatcacccttacgctaaactcatcatcagaatcaagactgatgattccaactccacccttaagttcagctccaagttcggatgctccgtggaggatgccaagactttcctcgaaaaggccaagtctttggaactcgacgtcatcgttgttctgtttccacgttggaagcagatgcaatgaccccaacacctacatctcctctatcagagacgccaaagaagtcttcaagatgggagaaagcctcggcatgaagatgactgttcttgatgttggaggtggtttcccaggcactaagggagaaactgtagtccaattcgaagatatggccaaggctatcaatgaaggtattgatcttcacttcaacgatgtggaagaccttagagttattgctgagcccggcagatactttgctacttcatctcacactttggtgttcaatgttatcggaaagagaaagatcactgaaagcaacggtgaacctcatttcc

SEQ ID NO: 50308 - DNA, 140 bp, Glycine max
  Clone ID: PAT_MRT3847_16438C.1
gctcggaattcggctcgagatttcattgttgttcaaagttatcggtgcatataaaagagaccacatacaagtgagggtggatggtgaactgtacgactctgatacaatcctccagtgtcgtacaactttctcgttctaat

SEQ ID NO: 50309 - DNA, 394 bp, Glycine max
  unsure (1)..(394): unsure at all n locations
  Clone ID: PAT_MRT3847_16439C.1
gccaatttcattgggtattgggttgccatattgcaagagattgcagggttggagttgctcaccattgagaaatttcccaagttatataaatggagtcaagagtttnnaaatnccaaaaattccaccccctggtgannatcaaggaaaggggccctgcccctcccttaaaagaatggaaatttggtttggctttttctttcccaaaggctttccttgggcttaaaaaaaagtatagaaggttccgttttttttttatattgttagaggggaatttcccccccaaaataaaaagttttaagccccccgggattttttttttggggggggggggaaaaaaaataaaatggggggnccnnnnnnnnnnnnnnnnnnnnncncnccccccccccccccc

SEQ ID NO: 50310 - DNA, 548 bp, Glycine max
  Clone ID: PAT_MRT3847_1643C.1
actgaagataactcaggagttgctaaacctcaaaagaaattaaagaagaaatcacatgaatcctttgacccaagtccattagatgtcaatgatgggacatctgctaaaattctcaaaaagaagaaaaaaaataatgcagctttggttgagcctacaaatggtaatggttctgattctgatgatgcacccacctctgtctcatttgctgctggaaaagaatctgcacttgcagaattatctgcggctgctgaaagtattcaaaaacaaaaggaactgaaaaagcagaaactcaaaatcaagcaggaaaggatgagagaggaaaagcttgctaagctggaaaagctaaaaaagaagcagaaacggaaagccaaacaccttgagggtcgagaagtaaattcctcaacaggcatatcagtggatggatcatcttacaaaatttattttgatggggagaataatgctagcacatctaagttgcccaagcgcttgccggaagagttcttagaatctctcagtgaacagccccccaccaaacttgtgagacgcgc

SEQ ID NO: 50311 - DNA, 126 bp, Glycine max
  Clone ID: PAT_MRT3847_16440C.1
atccctcttttttctctctcttgccatacctatttgtcaatacttccgtctcatttcagtatgcgtgagaggcttcacatccagggtggtcaatggggcgtccatatcggcgccatgttcccggag

SEQ ID NO: 50312 - DNA, 225 bp, Glycine max
  Clone ID: PAT_MRT3847_16441C.1
attccatgctggcggacgacgccaagcaatatcgcctcgcgctagcgcagcttcagccgctcggccggcaccgtcatcgccgcgacgccggccatgaccagcagcaagcccagggcgaggttcgacggcacgctctctccgagcagcaccaccgaaagaccgacgccgatcggaatgcgcaaatagccttgcgcattcgtggtcagtgtgccgagccggccgagg

SEQ ID NO: 50313 - DNA, 459 bp, Glycine max
  Clone ID: PAT_MRT3847_16442C.1
aggaacatgaaatcccccctcaattgggcaaaaacccttccccttttttgcggaataagggtgtccaaaagtagcaaaaattctggctgaagaaaaaagccttttcacataaaaagcagcttgcttatatttttttttcccccttgggaaaaactgcaagtcaaatgcttaataccccaatgggtgaaatgcttatttttttaaaaaaaaaatttcccaaaaaccgaacttgggaaggggtaagttaatttcctgggaggggaacccaaaaaaagactccattttttggttcactggccattggttatgaaaccaggggcctttcagtatctacactttgtttaggcttcaaagggggggggaatttttttaacacccactctgatgaaaaataaagccacaaccctttaccgggttttttgtgcttgaaatagggagcttttgcattcctcttattta

SEQ ID NO: 50314 - DNA, 353 bp, Glycine max
  Clone ID: PAT_MRT3847_16443C.1
gcttctctttctctaacacacacacatacaagccatgagcctttgcgggataggcagtgtccaaaggacattacgcccgctaaaaagtacttcttctggaagcaagggagctgaagtttgactacatattgatgccacgttaggttggggaaatctgagggaagcattaaagctacctggtggggaggatataaatgagtggctcgctgtcaacactgtggaattctccaatcctgcgaatcaggtttatggtaccctcacagagttctgtactacggagaattgtctgacagtgtctgactgacccaagtatgaatatagatggccagacagtgtacaaatcaagaaaccta

SEQ ID NO: 50315 - DNA, 335 bp, Glycine max
  Clone ID: PAT_MRT3847_16444C.1
ggatgtaaaaaatgttatgccttcttgtgtgaggagaacagcatactacataggttcgaaatacacaacaacttcacagaagtgagcaaaacagcttcatgttttatgccccaccacctcgtgactgtgtgattaacttgaggttctcataagcctcagcacaggcatgagcatagtctgacaatgcacggaagagttcaggcaagcgagttatgagactctgcagtgatttctctcgcacctgaatgcaatgtttttggtgggattcaatttcctgttctaatctcttctgcaagctctcaacaacaaactgcctctccgagacaggattattt

SEQ ID NO: 50316 - DNA, 190 bp, Glycine max
  Clone ID: PAT_MRT3847_16445C.1
tgaaatctccactgaccacatctggaccgaatgagcgagctgagttcattgaaccagcactgaatggacctgctgctaagatgatggcacccacatcgaacccaatagcaatgagcgcgatgatacccaatgacacacttattgggaatgctgctgttgcattcacagtgtaaaccaaccccaatgttat

SEQ ID NO: 50317 - DNA, 557 bp, Glycine max
  Clone ID: PAT_MRT3847_16446C.1
tgtagtagtaccgcctgcttgggggggggggggggcagtggcactgaggaattaagtggcggataacgttagctgtgaaaaaggtagaggcgactaaggattgggcgcaacaagtacaccggaaaagcacgcacccctagcttattgggcggcctaagttggcgaggagacctagaacgatgaagaaaaccagcgagtacgcggtaattattgggttgtaaaggccagccttgaatggtgctaccctgaaagcagttgtgtttaatattgtcaccctgggcagggttgtgcacagcctggagttcaccctgcgagatgggagtgcgcacttggccatggcggaatgtggcccagaccgggccacgccagggtagtattgggccatgctaaatatcgtgaattgtattttcctggtcacgaaggaggttagtgaaaattgtgttagtagtgctaaaccaactgcgttgctgtaacgttttggtacgtatgaacggcaagccgaaactgacgatggtggtagaggtgctaatagtgaaagtggcaagcgcgctgttggg

SEQ ID NO: 50318 - DNA, 1435 bp, Glycine max
  Clone ID: PAT_MRT3847_16447C.1
ctgcgagaagacgacagaagggggcagttaaaaaactgagtgatgatggactacacctacgacaccaagcatcgcacaatgggggttgggtctagcggaaggagctagtctcccataacgtggagaaccaatgttcgaattcctgccgggagaggtgcccacatttagtgtctaaccataccttgaacaggatggcttcagatggactacacctacgacaccaagcatcgcacaatggaacctcatgggataaggggtgtaatggacttggagcatcaaattcactacctggaaactgaggcttatagttctattttgaaggctttcattgctcaatctgatcttcttacttggggcaaagaggggcttatgactgagctgcgaaaggaactaaatgttacagatattgaacatggagaaatcctactgaaaataaattcagaccagttaattaagcagataagggagcagaggaaattggcatctcaagctaaggattatattaaacctagtgctcctgattgtgtttgtgcttcgatgggaaattcagtgataagaatgaaaactccttcctctgctgcattttatactcagaagaaaatgtcacactgccaagcttctctaatttccactcccattccttctccaatgcctccaaaatttaatgatgatccattgaatgctgagtttgcccacggaaatgtgcagcaatctatggaaatgttaaattgtaatgttcagttaccacctgttggaggaggaagaggactgaaaggaaagtatccattgcagaaggatttacacagatctcaccttgtcaggttaaagaaaagatctgatttaattcagcttcgtgcaacagatagggttatccacgatgttaagaagatgcttttcagtagagggaaacctgacccagttgatattgagagagcaaaaaggactcttacggaacaagaaatagctataactgaagcacttggtaaagtggctaatgtgttagagaggggtgatgcacctaatcagatgcaacgttatgaactctctaagaatactcctggaggacaagaaatgatgatacatgctaatttccgtgaactaattggtaatggtaggttgaataaacatggggttcattctgatctgtgcagttagggtgatgatttcatggcatagatatggagcttttaactctgatgaggctatacaacttatatagtgatattgctggattggtttagtgaacagtttacttgtttaggattaactagtagctaaccgatgtgaaatgaacactttaatgtggcttatttcaacacgtgccaaattatactactagtctactactacaaacagcttatttaagtatatgctgtaagttagaatcccaaaaaaaaaaaaaaaaaaaaaaaaaaaaagcggccgctctagagga

SEQ ID NO: 50319 - DNA, 966 bp, Glycine max
  unsure (1)..(966): unsure at all n locations
  Clone ID: PAT_MRT3847_16448C.1
tctcgagccgaatcggctcgagatttcgagagtccttgcgtaaatatgccattgctcatcaatttgcctttaaatataagaaaaatgatagtcatcgtgtaactgttaaatgcaaggcagaaggttgtccttggagaatacatgcatcaaggctgtcaactactcagttgatatgtatcaagaaaatgaattcaactcataactgtgaaggggcttttgcaacaacagggcatcaagcaactaggagttgggtagccagtattataaaggagaagttgaaagattttccggattacaagcccaaggacattgtcaatgacatcaaacaggaatatggaattcaacttaactattttcaggcatggcgtgggaaagagattgctaaggagcagcttcagggttcttataaagaggcatatagtcagttacctttcttctgtgaaaaattaatggaggctaatcctggaagtcttgcgatgtgcactacaaaggaagactcaagctttgaccgtctctttatatcacttcatgctttgttgcatggcttccaacaaggttgtcgaccactgattttccttgatagcattccattgaaatcaaaataccaaggaacattgttagcagcaacgtctgtggatgccgatgaaggtgtatttcctgttgccttttccattgttgatgatgctgaatctgatgatagctggcattggttcttacttcaactgaagtcggtgctgtcaacatcttgtcccataacatttgtggcagacagagagaaggggctgaaaacttctattgctgaaatatttgaaggttcatttcatgcgtactgcctacgatacttaactgagcaactttntagagacttgaaagggcagttttctcacgaggtaatgcgactcatgattgangatttatatgctgctgcttatgcaacanaaccagaangctttcaaaattcaatgg

SEQ ID NO: 50320 - DNA, 307 bp, Glycine max
  Clone ID: PAT_MRT3847_16449C.1
ccacgcacagacaagaggaaggttcattgaaatgtcgaagagaaagaacatctttgcttcaagaattcccttttataggaaaattgttttgaagtacctgatggaatatgaattttgtgtctcatgtcccggttgaatcaaaaaaatgactagattctttgagagggggatctcatgcgcttgcgacatacctaaaaaacggatgtttgggacaaaaacaagaagaaaagcttggattcctggtctgaaaaccaagacaaggctctggaaaccctccctcggagatccccatcttgtttcaacaaac

SEQ ID NO: 50321 - DNA, 284 bp, Glycine max
  Clone ID: PAT_MRT3847_1644C.1
ctcttgccatggcctccctgcccgcctctctgcagagtatgtgaacatgcaggatcccgagatggacatgaagtcagtgactgaccgggcagcccgcaccctgctgtggactgagctcttccgaggcctgggcatgaccctgagctacctgttccgggaaccgaccaccatcaactacccgttcgagaagggcccgctgagccctggcttccgtggggagcatgcgctgcgccggtacccctccggggaggagcgttgcattgcctgcaagctctgcgaggcca

SEQ ID NO: 50322 - DNA, 355 bp, Glycine max
  Clone ID: PAT_MRT3847_16450C.1
gtttttcttcttttatatagattttatcttagatgaaatatttacttgagggagatttatatttattaatataacgcatctaattaaggttgatcgaagatttttcttatatttgagtgataaatattattaagttatctttttttggggaagaattatcaagttattttgtgttctgtgctatcgagtaacagtaactgtgtccaagaatgtgctgttagctactgttttacataacatggattgcacggtgtgggcgtggtgcaattgatcatggtggagaactagcggtagatgaaaacgcacgaactttgttttgctgggagcagtcataactatatatagattgaacgta

SEQ ID NO: 50323 - DNA, 648 bp, Glycine max
  Clone ID: PAT_MRT3847_16451C.1
gatcatcaaacacatacacagagcctgccatggtttccgcttgtgcttcctctgccattgcagctattgccatctctacgccgagaagaatggatgaggcttgggaagagcaaaaggttgttttgttagtgggaggaagagagcagttggaggacgatggatgggcactagagtgtgtgcagttgctgagcctgacaggcctctctggtcctccatggctggagagctggaatacttcacagacaccactagcctctttttcataggtgcatggttccagtacatttacactgccacctgtcctattgacaacctctttgctcaccttgcagatccttcctatactaaccatttcaattaattgccttttctttattaatcacaggctttcacccctaagtgaaattaaaggcttagatcgatccacaactaatggatatgagattgccagctgtttgacccaatttatagagcgaaatcgtcttaagagatgagtgtttatgtctgtaatatgatctatatggtaatccaacgtgccgacatctatttaaattttagatgccatgaatgtaagttcaggtaataatcacatttgttcatatataagatcataacccacgttgaatggtatatttcatcattcacggc

SEQ ID NO: 50324 - DNA, 422 bp, Glycine max
  unsure (1)..(422): unsure at all n locations
  Clone ID: PAT_MRT3847_16452C.1
acacanggcnagcgggcgcaagcacaggcacaggttcattttttgttacatgattcggcttcacaacgtcaataatatggccancnattttttgntacccaggttgcgccccaaaccccgggggctgggcgnnnaaaaaaaccaaanacagggccggcgggaggacgccgaatagaaacccaagagcancggggagggcgaagcagcagccccggaggagaaggccanagaagaaccacaggacagcagggaggggcaaaaagaaggacaaacggaaaggcaggaaggccacacgcggcgccgggaggacacggcgcaggaagcaaagaggagcagcaaaaacgcggagggggagaacaaggcaaacccagccgagcacagaaagacgcncggaacccgncggaagggagaggggggaaaga

SEQ ID NO: 50325 - DNA, 663 bp, Glycine max
  Clone ID: PAT_MRT3847_16453C.1
cccacgctctctctgacacacacacacacacgcagaagatggagatggtagaaaaggtggctcttcctctgctcctcccaaacccacccccaccctcaccctcaccctcttcctcttctaaacccaattctgtgggaatgaccagtattcctccaatccccccaataaacactcttatccatgacctgaattcgaattccagttcccgacaccgcatcagtctgggcaagtccttggaccccaaccgcggcaagccctggtctcctcaccgcctttctcccacaggtcagcaaattctccacaccttatctcattccaactctcttcacttagacttagagctagacctagaccatgttcttcgtccccttttgctttcggaccatccccatcctgcttccgatattttgggcataatcaaggccttaggctttagcaacaaatgcgaccttgccttggccgtcttccactgggttcgaaccaacaactccaacaccaaccttttcagctcttctgcaatccccgtcatcatcaaaattctcggcaaagctggtcgggtctcatccgccgcctctttgctcctcgccctccaaaacgacggcgttcatattgacgtctatgcctacacttgtctgataaatgcctattccagtagcggccggt

SEQ ID NO: 50326 - DNA, 337 bp, Glycine max
  Clone ID: PAT_MRT3847_16454C.1
gactagttctatatcgcttacaagcccccaggcttctgagtgtgaaaaatttgcatagcatatgtagccgccaccctactttgtttgcttgaacttaaactacattccacatatgatattgctttttgagatttcatcatcctgcttttgtggattctgttcacagacttcaatggaaatctatggttgtgaacttatggtcgataattatttacaaggatggagataataacaccagtaccagctacagcaacaacaaacagccaaaaacgcaaccgcgaaatcgccagaacccgacgtatagactccgacctcgatccaccaaggcccgcacctg

SEQ ID NO: 50327 - DNA, 381 bp, Glycine max
  Clone ID: PAT_MRT3847_16455C.1
tatcaatctgtcatacagccataccagaagttgatgaagacacaggaaatgtctcatatgaaactgaatctccagatgaagcagcatttgtgattgcagcgagagaaattggttttgaattctataaaaggactcagactagtttatcaatgtatgaattggatccagtttctggtgacaaaattgaaaggatgtacaagcttcttaatgttttagaattcaatagctcaaggaagcgaatgtcagtgatagtgaaagatgaaaaagggagaattttcctactctgtaaaagtgctgacagtgtcatgtttgagaggcttgccaaagatgggagggagtttgaagagaaaaccttggaacatgtgcatgaatatgctgatg

SEQ ID NO: 50328 - DNA, 211 bp, Glycine max
  Clone ID: PAT_MRT3847_16456C.1
gacgcacgcatccaccgacgcgtccgcgcacgcgtccgcccacgcgtccgcccacgcgtccgggcagcagggggatattcaaagttcgtcgccagccagctaagtctgcgccttcggcagatccgtaggcgggagtacgcgtggtggctcccacggaagccaggtgcgaagcaggctgagaggaggggggaggtagaatgagctggggaaa

SEQ ID NO: 50329 - DNA, 910 bp, Glycine max
  Clone ID: PAT_MRT3847_16457C.1
cttcattttctttcaggaactggctaaacaatcgtctacaatatttggatgaatgatagtgagataattcagtctcccagcaagtttacaatcgtctgcaatatttccctgacctctgggtttggtaaggatttgagaagattttgtggaacctggaggattcggccctacagggacagttaatgaacctacataggaatacaacgtgaatctattaatacaaggttttatcttcaatggagaacaaaccagataaaatgcttcatgataatgaggagtgcattgacagcacatcaactaacaccaatcatccagagattggtgtgggcaaaggtgttttgaagaattttacaagatcttcgggggatgttgcagagacaaagatagcagctgattggaaaggtggagaaaattgcccaaagggtacacgtcctgaggaaattgatgcatctggggatgtaaacatggaggcatcaataacacctgatgatgttattcgggctggaggatttggtgccagggatgatatcagtagctttcttcctgttgcaagtgattctaccgacttcgaagcttcaatccgagatgcacgagattatgaagaaccacagggtcaagtaagcaggcccggccttggttggactggtgctactaagggggaatgaatgttgttgctgttatgtgctccagtattagcaacttttgtttttagctgggaggaccatgtgtttgtggctaatattttttaaaatcaaagtcatatatgatgccaaagaaaattttgttagtaatatcactaaatgatttacttgtataaatagttgatccgttgcctagtgtttggtttgtctttgttaagtgggatgtcatatgtaaaaatttcgtttcctgagaactcatccttgaattg

SEQ ID NO: 50330 - DNA, 250 bp, Glycine max
  Clone ID: PAT_MRT3847_16458C.1
gttatgctatgcatgttgctgcctacgcacacactccaaacacttcatgactgtagctgcccgtagtctctttacgaagacctcggcattcattcactagacttggagcccacctgcatttaagtgtatgtcttttgggccatagcaggagcatacctaattacggttcgatctgtgataattagctttaggagtatgaaactgacgctcgcactattgatatagttcgaatactgttgttctactcact

SEQ ID NO: 50331 - DNA, 363 bp, Glycine max
  Clone ID: PAT_MRT3847_16459C.1
tcagggtggaagaccttccctttgtcttcacccaaaggagatggccttaatgggaaaggaaataaaggcttcctgttaccgtttgggaaagggtgggaatgagggtattgttcgctttccccagggcatttctcacccccttcccgtttttttaacacacccggggcggggacacggcgaatacatttaagcatattgttgtttgtgccaactttttgtgagggcccgagaaagaacccacccattatgagtgatcaaaattttactctattggggcctatgttcactcttgaacacaccacctctacttctaatatgcgggtggtgatgtcaaaatgtggatcttttttggaaatcgaaaaa

SEQ ID NO: 50332 - DNA, 457 bp, Glycine max
  Clone ID: PAT_MRT3847_1645C.1
ggtgaacaaaatcacccttaaaagatcagacggcgacgctttcgaggagttaggagaggagatgctgcactcgcagaccataaagcacatgatctaggacgactgcaacaactacgctttccctctgcccaacatgacgaccatgactctggaaaagattatcaagcactgcgaaaagcacatccaggtcgtgaatccctataacccaccctccaaggacgatctcaatgcctgtgacgatgaattcgattaggcccatcaggccaccctcatccatctcctcctgggtgctacctactagaacatccacagcctgctggaacttacatgtctcactgacaacgacatgatctgggggtacactccagaggaaattcgccagcacttcaccattgaaaatgacttcacccctgatgagaaggaagaagtccgtcgggaagaccattgaacatttgaa

SEQ ID NO: 50333 - DNA, 426 bp, Glycine max
  Clone ID: PAT_MRT3847_16460C.1
aaaaaggggggggtttttcaaaacaaagggaagcaaaaaaaaaaaaatgggattacccattaaaaaaaaaaattaaaaccttccgggtccttttatgggaaaaacccttaaaaaaaaaaaaaattccccaggggcaaaaaaagggacccaaaaattccaaaaacaaaaaggggaacccggattcccttggaaaaaaaaaaaaaaaaaaaattagcccggaaaaattccggtaaaaataagggctttaaaaacctttttttaaggggtaaaacggggttttggaaaaaggtctgattcccttttaaaaaccccggggaaaggggcttaaattggagggcctttggggcaacaaaccaacaaaaaaggcctaggggccccaaaaaaaccccggtgattaaaaaaaagggggggcgcttggcttaaggc

SEQ ID NO: 50334 - DNA, 589 bp, Glycine max
  unsure (1)..(589): unsure at all n locations
  Clone ID: PAT_MRT3847_16461C.1
acgcctgcaggtacgggtggccaaggtcccggggggaggcacgcngggcncagtaatggggcctactggcgcctnagggggggggggggggggggcgagagcttcttcacttcatataaccanaggtggggagagcatnagnagtggtgaatgagagcgtatnagaaanaggctgaggagtgtaaaatgaggtgcatatattctcatattgcgtccaccgggcannaagggggggctgtggggggttnngtncgttctttnagccatanaaattatccagagctgcgtgtgatcaacgagggggccatccccaataacaagagtgcggagcccaaanaanccatcactgagaacaagagtgcgnagcctnagnagncgaccactaaaaacaagggggcgcgagctgaaanagnccatcactgagaacaagggggcgnagcctnagangtntggctgagtgagttntngtccantggtgcaatatgagctctttctttctaattgagtgntgcgtnagtattcactacttctgagtgagtactatttgcgtagcacccctgcgtcncgacattcacatacaatcaatata

SEQ ID NO: 50335 - DNA, 854 bp, Glycine max
  Clone ID: PAT_MRT3847_16462C.1
aggaggcatacttctggaccctgtcaaggtggtagcacaggtcctgatgtatccatttttcattggaagtgttcccacacgttctgaaataaaattggcaaattcttacttttatgacaaggccatgtgtacgcttgcctggaaacttttcctacctgaggaggaatttagtttggaccatccagctgctaatccccttgtcccaggccggggtcctcctttaaagttgatgcctccaacattgacagttgtggccgaacatgactggatgagggatcgtgccattgcttactcagaggagctccggaaggtgaatgttgatgcacctgttcttgagtataaggatgcagtacatgaatttgctaccctggacgtccttctgaaaagccctcaggcccaggtttgtgctgaggacattgccatatgggcgaagaaatatatctcacttcgaggtcatgaattctcatattgagtaggatatagcagatgatggttgacaggaagatatttacccaccccaactacaaaattagcttcagatcactcttttgctgctattgcatgggacatgtgatatattatttgattggttttgattcttgataaggttttggatgttgaccggttccatgtgcataccccctgccagtttattattttttgtttgtaagatagttgtctgagagagtaggattagttgagccagtgagatgcattcacctgcacttgaccattcttgtgccattttttcctgtgtattatggtgtcctatttttcatgaaaagaatataaaatttaatgaaccattctcttagcgtgagtatgtggtatgcaattcattacccaacattatg

SEQ ID NO: 50336 - DNA, 679 bp, Glycine max
  Clone ID: PAT_MRT3847_16463C.1
ccccttcttaaagatagcagcaatcactcgaaatagtcatatgcggaacacatgcaagtccagattgaaagataagagagccaagtctatctctttagaccaaaagtcaattatggggggacaggtctctagggaagaaatgccttcggtctaacctaaccgtttgtttcatatgcagtgaagcgggctagagccagaagtacgggattgttttaaggcctttccggtttcagccaactatagtgtcaaggaatagaattttgggcaagtaaagtcaaaagaaagggcaatattccaaaaagtagttcctgactccaatcagtcaactacgggcggtaaaagagctggtagtgaatcttcggcgcaagctgtaggagtaggactagtttaggtttaggcgagggaagaagcaacggcgttcgagataggggcgacaaagcgaggggatggattgattctcctagcgcaagagttttcgtcgctggattaagacgacttagctacttgtctgaaagcggaaaaggaaggtgactaacttcattcggtaaagctagatagcaaccgaaagaggcacatcaaaagatcttttctttcgtttcagtggataacattgatccacaatcttttctctggttaaccaatcaggaagaagcagctcctacccgctcaagtgaggcga

SEQ ID NO: 50337 - DNA, 218 bp, Glycine max
  Clone ID: PAT_MRT3847_16464C.1
gatgtaaagcaaaccctggcgtatcaaagatacaagacaccggggccagaatagaaggaatatcgcggacggctagggctgctctcgaatgctacttgcaataggacattccatcaggatacagaactaaacctgtgacataggtctcggcaccaacgaactaacaccagaccatgacttaaaatcaacaacggccaacatatgccgtattcaccagc

SEQ ID NO: 50338 - DNA, 709 bp, Glycine max
  Clone ID: PAT_MRT3847_16465C.1
catcaatcaaactactttcaactcttacccaccaaaccaaacccaccaaaccaccaccatcaagatgcgtttctccaccattgccaccgctgtcatcgccgccggcgttgccaacgcccaggtcgactccatcatctcccgtgtcacctctgccgtaggcggtgtcccctctgacatcggctccgtcgtcagctccatcacctctgacattggctccggtgttgcatccatcaccagcgacgccgcctctggtgcttcatctgtcgcctcttccatcgagagcgacgcctcctctgtcctcagcagccttgcatctgaggcctccaccgctactggctcgcgcgcctctgagatcgcatctgctaccagcgctatcgccagccgtgctagctctgctaagtctgctgccagctctgccgccgccagcgctactggtgccgccgactacaacaacgtccccgccatgggtgccgtcgctggtggtctcctcgccatcgctggtctcttggtagcagctcgacctgcaagggcttccttcgactccggacatgaaaagtctctttcgacagtttctttcatcagctagcgacatcagccacgagctgaacacgcttcgtctcttatgagacatttgcgggataggaatggttctcggcaatactggagaatatccagtcggtctacaaacttataataagttatttcaatg

SEQ ID NO: 50339 - DNA, 305 bp, Glycine max
  Clone ID: PAT_MRT3847_16466C.1
gctgtcgcgtcgacctattcgtccggttttttctgtgaagctaaccttgttttgttattggcttatatgtgaagatgagtcctggacttcagtttcagattacattacatggctttctactgcgggcttcaatggggttcttgatgcctggtggtatacttgcaattagattgtcaaacagagaggagagtccaaaaaggcatagagttttgttctatgttcattcaattttgcaggcaactatatcttagtccatattacatcataattttggattgattgtgcatactgtttaggtcttttac

SEQ ID NO: 50340 - DNA, 108 bp, Glycine max
  unsure (1)..(108): unsure at all n locations
  Clone ID: PAT_MRT3847_16467C.1
tcctcagcctccacnacgctnctcctctcccttccttcgactggaattagcctccagaacaaagaaacgatcttcatcaatnattccngtnncctccatccgagccng

SEQ ID NO: 50341 - DNA, 153 bp, Glycine max
  Clone ID: PAT_MRT3847_16468C.1
atgctgggtaatttattgcatgcctcacattgaaaatcatttttacggcttccattggggagaaaaaaaaacaacttgggtttaaacccatagatgggcgccccgaaaaaaaccagcgaatcatataatttctgactggccggagggaacaca

SEQ ID NO: 50342 - DNA, 324 bp, Glycine max
  unsure (1)..(324): unsure at all n locations
  Clone ID: PAT_MRT3847_16469C.1
attcggcgcgagcatgaacatcacaacaatatatttctctatatcccttcttttctatctacactgccaaacaccctntttgcgggcacctttcatgatagaaggggggaatctttnctccctcaaaacccnncaacctcatttatatcctatgctctacaaaatattttaaaattcatccctatacaatcaccaatttcacaaatacataacatccanaaaccttaaccatttacttctatatgcttaaatccctttacataatattattctctataatttactattccttttcacatataaatttattgctccccactttta

SEQ ID NO: 50343 - DNA, 737 bp, Glycine max
  Clone ID: PAT_MRT3847_1646C.1
attcccgggctcgacccacgcgtccgattcactcacctttccataaacacaaccttcttcactttgctttactccttcattcattttcctctcatactcaaaactctgcatcaaaatgctcatcattgttcacaccacccattcttgaaaggtacttcttttctcgtttttccaaccaccccatttctaaaaaagacattttcccttcaagtttcttcatcatttcttgtagtttcgagtctttgattattggggtggttaatattgcacttgcactatggaaacttgcacggctctattgtttttaacggcgatcacagcatacttgatatggttcacgttcatctcacggtcgctgaagggtccacgtgtctgggccttattgggcagtctcccaggcctcatagacaactgtgaccgcatgcatgactggatctgcgacaacctacgcgcgtgtggcggcacgtaccagacctgcatctgtgcaatccccttcctcgccaagaagcagggtctcgtgactgtcacgtgcgacccgaggaacttggagcacatactcaagacacgcttcgacaattacccttaaggacccacgtggcatgctgtctttcatgatctgttgggtgatgggatctttaacaccgatggtgacacatgggctgttccagcgcaagacagctgcgctggaatttaccacccggacgctgcgccaagccatggccaggtggggtgagtcg

SEQ ID NO: 50344 - DNA, 214 bp, Glycine max
  Clone ID: PAT_MRT3847_16470C.1
aaagggggggggctattttgaattttgattatgatagagaaggaagcagtaactaactgatgaaaaaccaaaggggaaatcctcaatctctactcaattggcagagggacaggacatgtcgaacaggaaaatccattggcgctgtttccaaaatttaaggacaattctctccagccagaaggcccccgttgggggccctttgcgtgaggtgtaa

SEQ ID NO: 50345 - DNA, 479 bp, Glycine max
  unsure (1)..(479): unsure at all n locations
  Clone ID: PAT_MRT3847_16471C.1
ggattaattattactgtngngnnntattgaggagnanagatatnttggatacaanatnanacactattttaatacaccanacacatntgnttgcaaattaggcataaaacactgattaaaaaaaactgnatntttattnnagggacataaatgcttncataaaacataaaancatnttnaggggtaatgaaacaccngaacactaanngctngnaangaacaanaccttnattaattgnttnattacactnaannaatangaggggatgggagaccanatttaccangnaagggcaaaanncttttnggnnnttattccaaattaaaggaagaatagacttggatttggaaaggcaagggaaaanggggttgggggaaaaactgnacaaccccctttttggnnnttntnnnacccgggcgggaccgcgggggnngacccccggnaaannccgggcccgggnccctggggggggnacccc

SEQ ID NO: 50346 - DNA, 438 bp, Glycine max
  Clone ID: PAT_MRT3847_16472C.1
ccctgcttccgcggacgcgtgggggcttttcctgtgggatcaaaacagcctatcaggggaagacaatgactgtccgcgtttcgtagccttcgccatttccttttttctccaattgtcccttcaattcaatcgattccgcggttcttttatttgctgacgacaaatgcccagaaaagatgttcaccggtctctggagctgctggaggaatatcatgcggaattattcagaccatcggacgctgagttgaaaatggccattgaaagggtgatcaatgtcttcaaacattctcttttcaattctctttgtgatatccacgaattctatgaaaatgttctgctgaatgaaagagtccccctgggcgacaaatttgtcaagcgttgggagcgttctcccgtcggcacttccttggccattcctcacattcctatggcggtgcc

SEQ ID NO: 50347 - DNA, 307 bp, Glycine max
  Clone ID: PAT_MRT3847_16473C.1
ggaacacaaacaatactttataaaatgagggggattatttttatacacactttatataacacctagtgcaatttattatatatatctttccattgtggatcatccatcatattttacacttattttatttttcatactttttttttagttgaacagaagtattgtacaaataaaatttgtcaagcaaaatgttacgattgtgacacttaaaaggggttacaatttaacctgttaaatttttcaccataccattattccaataaagaatctttaggggtgtttaaagggtgaaacacataatcttgtg

SEQ ID NO: 50348 - DNA, 290 bp, Glycine max
  Clone ID: PAT_MRT3847_16474C.1
gataattgtaccattactaatgatgcatcatttatgttttcgaaactatgatacaacatgggcaatgggcttattcatgactaggcacagattcagtgtctcagatgcatcatgttaccagtcaaatggtggaacagagccaccctgatcctttcgaaggacggctgtaagcattcactaccgagagagagcgttcgtatgtaactttaaaaaatgacgatcaatggagatagtaaataaatgactctaagattccacattctatgacctatcacatgttcaatgaaggt

SEQ ID NO: 50349 - DNA, 185 bp, Glycine max
  Clone ID: PAT_MRT3847_16475C.1
aagggtaagcaaaagtttgataaaatacgtctcctttgtacattcaaaaatgactcgacggggtatatgaaagggggtcactctaccacctaacacacttttaaataaggcaattatcatatcatgcccgtgccatatgatgaattttactagtatctaagggctttattctacatctatatttt

SEQ ID NO: 50350 - DNA, 228 bp, Glycine max
  Clone ID: PAT_MRT3847_16476C.1
gtagaagatgaactctgcggaactactgctccacagatgctatataggccttgttgaagaatgaaatcttaatgtaaccgtgcagcataccttctcgaaaccataacatatattctggtgtttgtggaatcatggttaatatagacacggcaagtccggaggtactttcagggtgggtggaggaaaggaaggatttctttatttctgcgaagggctgttatataacaa

SEQ ID NO: 50351 - DNA, 258 bp, Glycine max
  Clone ID: PAT_MRT3847_16477C.1
cagcttctcggcaaaatctcaagaaatgctaatccgcaagagtgtcaagtctttctttacgccacggtccattttaatctcaccagtacttaaacgcctacaaatatactataagctagagtgcaaagttgccacttctacctgcatgcaccacgcgcggagctagacaagctctgggggcaaaataacagtgaattcatgacaccgcactaagtgttgaggggggccaacccccaccttggcacgcacctaactaaa

SEQ ID NO: 50352 - DNA, 240 bp, Glycine max
  unsure (1)..(240): unsure at all n locations
  Clone ID: PAT_MRT3847_16478C.1
ctaaaatacgtaaccaggcgtctcacagtcgccgtcctgtcaagagcgctaatgaacgttctcattaccacgcangagtaccgggagccctgaaccgcccgctgctcggcggatcccagctgcggtggcgacggcgggaaggcgctttccgctgttcctcagcgggccgggcccttgaccagcgcggcccgcaggtcttccttctcgccgtcttgcagttgaagagctacatacgtagtc

SEQ ID NO: 50353 - DNA, 423 bp, Glycine max
  unsure (1)..(423): unsure at all n locations
  Clone ID: PAT_MRT3847_16479C.1
ccgggtttttcgtctctggtctggcgggggggggggggcgtgttggctcntgcttcttggctgctggtcctgcgggnggtttgtcggccgggtttttgtctttgatttgtgcgtattctaatggttggagnctgcgctggtttgtgctgtttgnggtgaccgggttgcttgggtgtgccatttttcgggggggggagaccttgttcgcggtgtgtttacttctagatgattgcgtccttgnttatgttgcgggtgattatgttcctgcctccatttgtctctatgacaagaagtccattgggcctgcttctggcgttggcaaccttgcctcttttttttccagttgagttccttgtgtttccgttctgatagctcacagtgctgttgttttgtatgctggtagtgctgctgctttgattgttt

SEQ ID NO: 50354 - DNA, 358 bp, Glycine max
  Clone ID: PAT_MRT3847_1647C.1
gtatgacacccagactgactctattatcttatacgtgatgagagatcgagtatatgatcccatgcataatgtgcgagggacatacatccgcgctattgctgtattttattgaccatggatcaggatcctgtttgccacggttttgctgaggtttgtgggctaaaaccaacatgggatgtcacggcaactatgtgacacccaaagtcacttgctacattgcggcactctgcagagaattaattgaatcatcctttaattaatatgcattgattggctagcctagtaatgtcttattattctgagtacatggccacgccataagcatatgagtatattacgaaatgcgatcgcttagaca

SEQ ID NO: 50355 - DNA, 180 bp, Glycine max
  Clone ID: PAT_MRT3847_16480C.1
cctgatggattttttttttttgggccacaacacacttaaaaaattattgtggtgggggtttctcttccccaaaaataacccgctcctcaatattccataaaggaatacgaggcgtaacaagattttaaaaatatggcacggggggaatctaccaagataaggggaaaaagccaagttttc

SEQ ID NO: 50356 - DNA, 836 bp, Glycine max
  Clone ID: PAT_MRT3847_16481C.1
tacggctgcgcgaagacgacagaagggggagcctaatgttgtcaataaaattgcttttgtggttcctgtttttgtcgtggtaccactttgccatcccatgtgaggccaaccaacaaggggaatatctctataagtttattcaaacaaagagggctcagaaacgctcttatggagaagcttcttctatggctacaaatcttggtggtgatgaacatttttcgaaggtttatgttgttaaggaacaatccgggttgatggaaggtgacaaagtgaaggctttgccgggacaaccatctcaaggggtggattttgatcaatatgctggctatgttacggtcgatgccaaggcagggagagcactgttctactactttgtggagtcacctcacaatgcttccaacaagccctttgttctatggctaaatggaggtaagttctctattatatatttgtattcaaaattgcaagaactaggaccttatagagttatcagtgatggaaaaacactttacacaaatcaatatgcatggaacaatgtggcaaacgtgattttcctagagtcttcagcaggagtcggcttttcatatcaaacattcttctccctacactagatctggtgacttgagcactgccatgggctctttcaccttgctgctttctccgctcgtcaggaaaaaaataaattcttttatatattcttataaaggtaaaaattcaaggatgagtttatataaataaactctataaaacattttgtttgttcatttgaatatgatgtgtagtaccagataattaaatgcatcctcagtagcacatataagatggattgaatgggg

SEQ ID NO: 50357 - DNA, 551 bp, Glycine max
  unsure (1)..(551): unsure at all n locations
  Clone ID: PAT_MRT3847_16482C.1
cttgctcttgcgcctcctcccgctcgctgcttctcccggctgcccctcttttccctcttctctacgctttcgccgccgcgcccttccacccctccctcgttcccctccttcccctctctcctgccccgcttcctcggggggcatggacaggggtgccgctgggtggggggggccatggacctctccgctgatccgttgcctgaccattctcctgctcagctttcgcctcgagcccgccttgtcggtgaccgctccgtctggatctgctgtggacttgaagctgctatgttatgtatttcattactaagcacatttaagattgtatgcaaatcaaggcattgccaacttataagacacgcatccaggtgaggcatggacaagggatccacaatgtggagggagataaggactacaatgcatatatgaagcctgaatattttgatgcacatcttacgccactangctggcaagaggttgacagtttgcgtaaggatgttcatgattctgggcttatgaagaggattgatctggtcatagcatctcctttattg

SEQ ID NO: 50358 - DNA, 1495 bp, Glycine max
  Clone ID: PAT_MRT3847_16483C.1
gcgagtcatgttggcacctgcccttgactctttgctcgctgaaaagcacttcacagcaaccataccacaggcctgtcatcagagccgacgaagattacgattaattgttcaaggttgttctgattggcgactccggcgtaggaaaatcgaaccttctttctaggaccaaacggaacgaattcagccttgaatcaaagtccaccattggggttgagttcgccaccagaagcattagggttgatgataaggtcatcaaggctcagatttgggacactgctggtcaagaacggtaccgagctattacaagtgcatattatcgaggagctgttggtgctttactagtctatgatgttacacgtcatgttacttttgaaaatgtggagagatggctaaaagagctgagagatcacacagatgccaacattgtggtgatgcttgtagggaacaaagcagacctgcgtcatctgcgtgcagtttccactgaagatgctacaactttcgctgagcgagagaacacatttttcatggaaacatctgccctcgagtccttgaatgttgaaaatgccttcacagaagtgctgacccagatctatcatgtggtaagcaagaaggcccttgagtttggagacgatccagcagcttttccaaaaggacagacaattaatcttgggtcccgtgatgatgtagtagctgtgaaggaacctggatgttgttgatcttgaatctgcagttaccaaaaggctatgacgtttaatgttgagttatatgccttgcatatgctgtgaagaaatagggatgttgttatgcttgatcttattatttagtgtgcatcaaattttaaagtttagagtgtctagaattatgttcaaaattagccaaatgtttagaaaacaagtcaaatttatggtgcattgtgcctatttttgtgccatttaaagatatttatttatcaaatttccaatttattagtttgattcttttctaatcttcatcatgcttctatttgttctcatctatgccgcatttgaaaagcagatattcaatctggttctttccttgcttagtttttctcttcctttctttccttgcttagcttttctcttcctttcataatgaagagtattgaaaacttgaatatattgtttctttctatttggagcattgtaggtatttggcaacattataaattataatacttgctaacagactccaatgcttgaaggctcctcactgtgcgagaaggtatgggggaaggtcatcaaggtattgctaataaattaggaaaaggttggattttttcttataaagttggttccaagaagcaacacatgtccaattcctttttatagaaacagccagcaaatagtctctgtttgacagaacacaagggcttttttaccaaaccactagaaaactatattccaaacaagtgtaaacaataacgaattacctgcaggtcgactctagaggatccccgggtaacgagctcgaattc

SEQ ID NO: 50359 - DNA, 1043 bp, Glycine max
  Clone ID: PAT_MRT3847_16484C.1
atttgccaactaagaaaccccaaaagttgttccaaatctggatttcaaaacaaaatataggttcgccgcaacccatttgaatctctgagagaaggggcatatcaaaatcaatttttttttttctttcttcttttccctgaagagcaaatgggggcgtatagagctgatgaggattacgattatttgttcaaggtggtactgattggggactctggtgtgggaaaatcgaaccttttgtcgaggttcaccaagaacgaattcagccttgaatcaaagtccaccattggggttgagtttgccaccagaagcattagggttgatgataaagttctcaaggctcagatttgggacgctgctggccaagaaaggtatcgagcaatcactagtgcatattatcgcggagctgttggtgctttactagtctatgatgttacccgtcatgttacttttgaaaatgtggagagatggttaaaggagctgagagatcacacagatgccaacattgtggtgatgcttgtagggaacaaagcagacctgcgtcatctgcgtgcagtttccaccgaagatgctagaactttcgctgagcgagagaacacatttttcatggaaacatctgccctcgagtccttgaatgttgaaaatgccttcacagaagtgctgacccagatctatcatgttgtaagcaagaaggcccttgagattggagacgatccagcagctttgccaaaaggacagacaattaatgttgggtcccgtgatgatgtatcagctgtgaagaaatctggatgttgttctgcttgagtgtgtagtagaaaacagtctctgtatttttactttaaattatatgccttgtttataccatgtagagattggccgcctcacagcatgaagatgattgattatttagagcatcaaactttctgctttgatttgtagagaattatgttcaaaattagtcaaatgtttaggaaacaagcacattcattttgcattattcctatttttgagccattttaagatatttatttatctaatttccaatt

SEQ ID NO: 50360 - DNA, 445 bp, Glycine max
  Clone ID: PAT_MRT3847_16485C.1
tgtggaaaacgattctcaagaattctctggtctccgaagatcctcacccttccttccattttctagaaaatcttcaaaaaatttcaattcagccattacattccagaccaatccagctcgaaacgctgcaggataccagaatgctgtgacacatgcaacaatgaaggttaccttaaaccggtttggaacgattccaaggaaattcttaacgtgcttgcacggctccaaatactctcctcttcatgtcattgacatcaacgacaccgaccgattaaaactgatctctcaccttctcaattaccattccatcctcataaccttctatgctgatgccactgctgctggcatcaaagacatcgccttgtatgtaaatgatatctatgatattctgacctcaaacctgacatccttccttaaaaggacttgggcgatacactctgtgatt

SEQ ID NO: 50361 - DNA, 316 bp, Glycine max
  unsure (1)..(316): unsure at all n locations
  Clone ID: PAT_MRT3847_16486C.1
attgcctacgcgnccgcanagccgnngcncngcggcaacattgcggaagcagaacaagcgccgcagccanggggaagnaccccagagaacccgacaancccaccaagnccggcaaggccagaggcgcngaccncagagnncaannnaagaacacnagggagacngccnnngccancaggaagnngcccccggnnaaagcnaaacganaccnagaggangnnnnggcccacaaacaggcnannccnnnccgacgcnnnngnggnggngnngggaggacggcccaggcnaagaacagacacnccaangggcaaggacg

SEQ ID NO: 50362 - DNA, 456 bp, Glycine max
  Clone ID: PAT_MRT3847_16487C.1
atccacgcgttcgcatgtccatacatattatggattgactatgactatatatgtaattattttgttatatatattttattttttttaatattttttttataaaaaaaaaatataaaaaaataaaatttatttttataaataaaaaaaaaaaaatttattattaattaatgattttaactaaaaaataggttcttgctttgatttataaattaaaggtacatgctatttttagtgaagtaataactatgaaataactcagataaattttggagggccttaattactgctaaagtgagaggacctataataagctatttactttttaacgttaaaaaatatgattcaaacaatttaatcagagaaagacagcccggatccctactataaataattcatcataggggacgggaaaatataaatctaaaactgtaaaatcattaattctgacaatatatt

SEQ ID NO: 50363 - DNA, 251 bp, Glycine max
  Clone ID: PAT_MRT3847_16488C.1
gatcatgggtcgtccacccagtactgggggcccagcccttcgcttcaaccagccagaggtatcagaagtggcagctattcgtcacgagcataggaacgctatgccgtcacgtgatgttcttaaaggtcttgcagagaaattcagtgaagcacaagatcgtaaaggcaggatttcagtgcaaatgaagcaagtttggcactggtttcacaataagcgatatgcgagacgagcacaatcaagtaagactcctg

SEQ ID NO: 50364 - DNA, 746 bp, Glycine max
  unsure (1)..(746): unsure at all n locations
  Clone ID: PAT_MRT3847_16489C.1
aaaaagatcttacactagattggataaataagaacttcaaaagagacactacaacattaatggacgatcgaccatgaaggtttttctacgacttaatacaacaaatcaaagataaaagcaatatctccattgcctatactatagcagtactcatacgttattattattatttgttgtcaagagggtacatgcaccacttcttgtgaccaggaacccacagtggacattttggactgaagtaattggaaacagttttcgagtcaagaagctcaacaatgggagcatacttcacacaacgaggtgtcttgtactgatttatagacgcaccctggctaagagcaaagtccataagcttatcaaaagttccattctccacaatcttgatttccaatggcccaatggactctgatactcttccttgtcgatacacgctgttgagagacccttcaactgcaaagcaacactcctcaaaaacagaacttggaattgggttttgattttgatcaatgttgttgttcttgttcatgctgatttcccagtatagtacatagtggccagggatagtggacgtatcagcaaagcttgtgtattctgtgagtgatgcaccgaatagtgtaagggtggttggctccatttttcacagcgttttgtagctcaacctcatncgtcttgtcggaatcaatgctaagaacacgttctttcgcacacgaaattgaatgangagcattgntcttgatcctgctaca

SEQ ID NO: 50365 - DNA, 304 bp, Glycine max
  Clone ID: PAT_MRT3847_1648C.1
atccattcttcgtgcttttggagctgaccttgtctctcttatcccgcctttgttctcgccggagctgttcagatcgccgacgatgatcttcgataagactcccgattcttatttgcttcatctatttgaagatcctgcctgcccaagggttcattatgttcccgctgtaccagagatctggagagtctctagtggtaaggttgctgctcttgtctctgtcattgggactgttggtacacgtcctcgtgctcttagctctctgatccagcttaatcctgatattatgcttctgtcattgaacccg

SEQ ID NO: 50366 - DNA, 400 bp, Glycine max
  Clone ID: PAT_MRT3847_16490C.1
gaaaaattgatttatatttttacactcactatgtgaaacacagacggggaaaggaacatcaaattgtgacgtcaaccgatatgacctatcacaaaaataattgtgtgagattaatactcatgttttcatttagagatctgcgttgttaaactaacaacccgggccgtaaggattaacggcgcacaactaccgtagaaattatatacttacgccgccacccgtattgaatagcacaaggatttgaacaaaatcccactttacctctggatcaaaaccttttttactactacaccatacacatgggttacatggaacttaaaaaccccatgtcaagcttgggcaattaacccacctttattctactatctcaccaacaacaactacttggtacttgaccgtt

SEQ ID NO: 50367 - DNA, 177 bp, Glycine max
  Clone ID: PAT_MRT3847_16491C.1
ttcccgttcgaccacgcgtccgattcaatccattctaaacagctattctcatttacacagactacactttcgataagaataagggcggttctgattgccgttcatagaaggggaagatcagatattgatatgatggttactaagacatacatggctgagctgtacactgctattaaa

SEQ ID NO: 50368 - DNA, 190 bp, Glycine max
  Clone ID: PAT_MRT3847_16492C.1
ggagtggatttattgctgatgtgcatgacacccgtggagaggtgtttgcacaatgccaacctggttcaaacttccgaacatgatgttggactagagcggggatctactaggattgccaaggactaacacgtggcgccggacttattcaacagaaaggaacttatgctgaatatgaacccaaacgaaactg

SEQ ID NO: 50369 - DNA, 448 bp, Glycine max
  Clone ID: PAT_MRT3847_16493C.1
ggtagcaccacctgcgaggataagtgtcaactactattttttcatcaaactgcttctaattggggataaaagagtgggaaagagttgccagcttttgagagtttctgatggatccttcacaaccagatctatgaccaccattgtaatagattataagataaaaaccattgaacttgatggaaaacacattaatgtaataatctgggatacaactgatcacgagctattaccaactattaccacagcttattaccgtggagccatgtctatcttgatcgtacatgatgatactgatgaaacatctttcaacaatattataaattggattcacaacattgaacaacatgcttctgacaaagaaaacaagataattgtggtgaactaggctgatatggaagaaatgagaatgcctgcgactgacctccacagtcaaatccttgtggaatat

SEQ ID NO: 50370 - DNA, 307 bp, Glycine max
  Clone ID: PAT_MRT3847_16494C.1
cactgcatactatcttgtcgcgcacttttggggctctaacactgtttcttccaaccaaggattgtaaacaacgcccctaggatactgggcattcctgagaaacatattgtctcaacctaaaacatggcctcagccattgctatcatctccatatatcacaccttatactggcctactaccgttcagcacatagatacgacattaccatactctatcttgtggactacgtgctcttacctcgttcttagaaatgttgacataatgttcacttcctacactggaaccttacaccactgtgtaatgtcac

SEQ ID NO: 50371 - DNA, 227 bp, Glycine max
  Clone ID: PAT_MRT3847_16495C.1
gtcgctcgatgggaatttcgcttcaaggcgtctcgtagggctaatccgcgtcacgagggtcaccaacggcacgtttcgttgggtggccgatgcccctacttctggtcgggaaacggacggcgggcgcacgcgtcgcttgtaggccgggttctgatttataggcgttcagtcataatccatcgcacggtagcttctcgccactggtttttcaaccaagcgagatgacc

SEQ ID NO: 50372 - DNA, 350 bp, Glycine max
  Clone ID: PAT_MRT3847_16496C.1
ataaatgagggtttttttttgtttttatttttttttttggaatgaaacgcttatacgggtagccccaccttaaaatttccatatttgctatataattgaataatcacaaaaggacttttttttatccctgggtatcaatgctatcgaacttgtttttgtgtctgggggaaggggaaaaaggaagataaggatgttgttgaaacctccctaggagagggggacccagaagttatgcgaccaaaagatagagaatgaaaaccacccccccaaaaaaagagacctttgttgcaacaagaggccgggttcttgtggaggcccctgtaactgttgccctgtcggctaacccccaa

SEQ ID NO: 50373 - DNA, 327 bp, Glycine max
  Clone ID: PAT_MRT3847_16497C.1
gcaagagtgccatctagatcctcagcaagcgtgaataaatctccagtgatgacatcccttgatgacctgtcattgatgttcggtggttccccatcatctgaattccaggaggttgaaggggaaactgatgaaagacgaaaggcaagattaggacgtcatcagagagcacaagagcgagcgttaaaagcagtgaatgatatgaaccatcgtgaccttgaaactaagatggagcaagaagagaggcggaaaattgctgatgctgcagatgttcagataaagcgctgggctgcaggggaagaaggcaatatgcgggccttgctgtcaaca

SEQ ID NO: 50374 - DNA, 510 bp, Glycine max
  Clone ID: PAT_MRT3847_16498C.1
gaaaatttcaaaggagagaaaagaagaagcgaagtgtgattgggaacaatggctgaacaaaagaaccggtggagctgggacgtcgccggcttcgacccgtggaagtcgtcgcctccgccgccgcaaccggcagcggagcacggtgatcggaaacctagtgcgccgttggtgcgacggtactccatttcggccacgtcggttcttccgcaaccgaagcacgctgtggctttcaagcttcagcggttgaaggacaaagtcaaggtaatgcgttttcgtctccacttgtaactgcgccttagcttctttttctcttctccgcaacggcgacgacgacgacgttttggttttcttcttaattcgtaaagtgtttcggtggttttagcttctgcttctttgctggttttcgcaacgcctgtaactgtgccttagcttcgttctcttctgcgcaacggcgatgttttgggccctttttttttttcttcttatttcggaaagtgtttccccgggttt

SEQ ID NO: 50375 - DNA, 434 bp, Glycine max
  Clone ID: PAT_MRT3847_16499C.1
acggctgcgagaagacgacagatgggggctgcgaaacagaaatcgaatcagagacggtggtctggtgtgtgtgggcgcagtgtagagacgaaggtgtggcttgagtattggaatgaaaatggaattgagaaatgtggtgaaggacaagaaattctggatggcatctttccttattgcctgggccgctgctcttcagggtcacatgatgtggttacagcgccaggattccttcaaacataaattcggtaaccccgacgaccatcctcataactcaaactgattcatcactcccctcccttgtattctatttctaattctccatcctttaatttcatatatgttaatgcacatcctcatctatcttgtgttgtggtgcgtatgaattatgataatataccatgttgtcactgttccgttatttgccttttctcccg

SEQ ID NO: 50376 - DNA, 236 bp, Glycine max
  Clone ID: PAT_MRT3847_1649C.1
cccacgcatctcaccactcgtcctcccacacatactactttatgaccaacaatcctctaacaacgggatgttgctaccattccattcacagaccatgccactcccatacaacgactcaacaaactactcaacaattaactactatctaatatcatacactttttaatgatacccataactgctttctaatcctaaagataaaatacatctgtcccattcctagaaaagcttgtcat

SEQ ID NO: 50377 - DNA, 195 bp, Glycine max
  Clone ID: PAT_MRT3847_164C.1
cgcaaatcttccctatcccttatggatcacataagaggggccattatcaaacaatctcgagctctaacaatagccagactgctcatgagccgctaacgctcttgtataacccacacaccaatcatcactcactaacccacagcgtcatcacacgagcaacaggtacactgcagctgaacgcatcacctgaaatgc

SEQ ID NO: 50378 - DNA, 551 bp, Glycine max
  Clone ID: PAT_MRT3847_16500C.1
gggaaaattcacttcacctttatttctttggtaaaattatttttattcggaagcattaaacacaatattaaaaagtttatagcacttacacctccagctcaaccaactgagctaaatttttttttaaaaaaggcacaattcttggaaaatcgagcaattggcgtggcagacaaacaaaaaaaaaaaatatcagatccccaaagctttaaattaaaggggggaaagaccaaaaaaaaaaaaaaaaaaacctttttcggcaagggctttttagcggctctttgttttcaggaggaattgaagaagctttagggttaaactgaaagggggggggccgcctatttgggtcactggcactgccacgggcttttggcgggggcttggaaactgcattggctttaaaacggccatgcggataccctttggcctgagggacaacccgctccaaaaaccgggggttcatctcataactagggaagggaaaaacggcagagggaggggttcttaataaatgggccgcccaaccgggaaaaaagccgggaatgccttccttt

SEQ ID NO: 50379 - DNA, 512 bp, Glycine max
  Clone ID: PAT_MRT3847_16501C.1
ataagagggaggaattaaaggtgttacctggggcccaacccttcccatttcctcattcttcattgccgtttccacataaaaaagcccagaaacactcaaattccagatctttctgacagatttacatggtgaagagacttaaacacaccctataaattcttgcgcattaagaaaaagtacagaaccatgaacaccatggctgaacaatgccaaggaaaaaacaaactctagatacctaaaagttcactcacggacctatatctgccctcccccacatgaagacctactgtgtccgaatccgggccggaaatgataaaaatcggaaacacctttcttatcctttggagatcatgtaccgtggaaactctgctaggtctctcccaaagccgcctagaagatggtctaaagcggcgggtgcaccaccactatatgtcggacgggggaaaacatgctgaagatcaaccctgggggagctcttacgacccgggacgcacgacagaatatagtggtgg

SEQ ID NO: 50380 - DNA, 596 bp, Glycine max
  Clone ID: PAT_MRT3847_16502C.1
attaattaattttactatatatatatatatataggtgttacacgtaccagtccatcataatgaaaaagaacaaaagagagtcagtcagtcactaagacaattgatcacaacttttgttagagaaaattaaaaactatacaaagaatagaatattactgtaagaggtgatagtgaaatcaaggatattacaatgcacgcgcacttgatgacattacattgccatgttgcctacaaaactatgctctttttgcatgaactatgaagaagaagcagcagcagcagcagcagcagcagcagcagcagaaagaacattaattcacatatcgttggttaatcacaaaatacaatagaggaaagaattgtctttgtctgtacacctggaatctctccgaagtcctaaacactgtcagagagaacatttccatttcccagttgccatctaaactcgagaaggctctttggacgaagacgaggaggagtctgcatcatagctccaaaggtactttagctcacctcttttgcatcccaataccacagttactcctagtgtacatggaaccaggtagagcagtgcaggttgtccatgaccgttcatc

SEQ ID NO: 50381 - DNA, 748 bp, Glycine max
  Clone ID: PAT_MRT3847_16503C.1
attgcacaatatcaccagcacttggctgagaagctagacttggaaatgtctgccctccagtatatgataaaagaataccctggaaacgaggaggagaggatgagagcagccattgggaaatttggactgtctggcaaagcgcaggtcatgcctatgaagaatttatccgatgggcagaggagccgtgtgatattcgcatggttagcttatagacagcctcacctgctacttttggatgagccaacgaaccatttggatatagaaacaattgactcattggctgaggcattgaatgaatgggatggtggcatggtgcttgttagccatgattttaggctcataaatcaggttgcccatgagatatgggtgtgtgctgatcaagctgtgaccagatgggaaggtgacattatggatttcaaggagcacctaaggtcaaaggcgggtttatctgactgaagaagatagtgggactgggacactccagcatatcaccatctaaggactacgttacgtactgctgcttgagttggatttctccatggtgattttttttatttaaatggctctgcagagtaatcgctttggaaatcatgtcctcccccgttagattgcagtaatttgtatttttatcctttagttgccgatcagcatgataaataacaggggaccttagatgtaatacctatctgtatgtgaatgatatgttgtacctagagtattatatttactgcactagtttcctctgccc

SEQ ID NO: 50382 - DNA, 300 bp, Glycine max
  unsure (1)..(300): unsure at all n locations
  Clone ID: PAT_MRT3847_16504C.1
tgctctagaaaattcagtgctgaaacatggcttcgggctactctctctgtagccaaaccagcccttcaggcaaatgggaaaggcttctctgaattctctgggcctccgaagcttcatcaggcttccttnccnnntctagaaaatctcagaggatttccattcngtnatggctttccagaacnaaggngnttntnagcnattggaaggatacaggaagggtgttgacagaagcaaaactgaaggtgnccttaancgggttggaagnntggaaggaattctnaggtgntggcaggtcgccaa

SEQ ID NO: 50383 - DNA, 275 bp, Glycine max
  unsure (1)..(275): unsure at all n locations
  Clone ID: PAT_MRT3847_16505C.1
anacactctcttgcaatttctagggttttggtattgctttgcctccgttccccctttctcncaaaaanaacgnnttttctcttctccttcgtatctattctttgcntntcgctttnggntgantnaaggcattcanagcgtaattngttnctgcattttnatcgatttctctaancaggnctgantganctaatggagtctaaaggtggganaaagaagtntagtagtantagtagtaaatgcnttttntacgnagctcccctcggatacagcat

SEQ ID NO: 50384 - DNA, 257 bp, Glycine max
  unsure (1)..(257): unsure at all n locations
  Clone ID: PAT_MRT3847_16506C.1
ctgactttcaaggcaaaattgaagctttttcagttttactttttgagggggggtcccaactgaaaaccaagcatgtgcttaatataattatattactgggtttacgagttagtttagttaagaaatgacagctaaatgttctgatgagaatcttcttcttgtaacaaaattgaactggtaaatgcattaataatatccattggtcagctttagacagagggatgaaaaaggagggtggaggaatgttgttgnttgtg

SEQ ID NO: 50385 - DNA, 385 bp, Glycine max
  Clone ID: PAT_MRT3847_16507C.1
ctgttcgtgtacatatactgctaactcggagtaaaagggatggtttcttctactagctatccacttgtaagatttccctagacgtagacacatgtaggtaaggtttccagcgattagagtatgctggtgagtcagtcggcacataccacagatcatggtgtaatgttcaaattcattttttttttttcatatggtaaggtagcatcttgatcatagaatttgtatatcacttttagtcagtggtctgtcaacttatatttgagttgcaaacctgattctgtgtgctagaaaatacatgatgtattcaagcctaagatattactaggctctctggcttcatcccgtttgtgaatggcataaaaaagacataatattcgtgaaggtt

SEQ ID NO: 50386 - DNA, 584 bp, Glycine max
  Clone ID: PAT_MRT3847_16508C.1
ggctcgagaactagtccaaggcttgatgagaagactgtatattccattggtccaagattgaaagcattctctgattggttactgaaaactatggtgttgggcaaacttgatgccatctttccagctgctactcgtgaatatgcaccattgattgaggaattatggaatgatgctgccattaaggctacatacgaaaggagaagcgaattagaaatgctgcctagtgttgccggttatttcttagagcgggctgttaaaatattaaggacagattatgaactctctgatttagatatcctttatgccgagggagttacttcatctaatggggtggcttgtgtggagttttcatttccccaatcagtgtctgaggaaactgttgacactaccgatcgatatgattctttggtcaggtatcaactaattagggtgcatgcaagggggctaggagaaaattgcaagtggctagagatgtttgaggatgttgaaatggtcatcttctgagtttccttgactgactatgatcaagtttttgttgatggcaacggttgtctcactaacaagatgttctaaacagaaagttt

SEQ ID NO: 50387 - DNA, 2182 bp, Glycine max
  Clone ID: PAT_MRT3847_16509C.1
ccgggtcggaccaagccgtcggccaagccttccaaccttttaaaaaaaggcaatcatctgtacatgatacaacaggaactagtccaaaactggatgagaagactgtatattccattggtccaagattgaaagcattctctgattggttactgaaaactatggtgtcgggcaaacttgatgccatctttccagctgctactcgtgaatatgcaccattgattgaggaattatggaatgatgctgccattaaggctacatacgaaaggagaagcgaattagaaatgctgcctagtgttgccggttatttcttagagcgggctgttaaaatattaaggacagattatgaaccctctgatttagacatcctttatgctgagggagttacttcatctaatggggtggcttgtgtggagttttcatttccccaatcagtttctgaggaaactgttgacactactgatctacatgattctttggtcaggtatcaactaattagggtgcatgcaagggggctaggagaaaattgcaagtgtctagagatgtttgaggatgttgaaatggttatcttttgagtttcttgactgactatgatcttcgttatatgatgaagagttttttgtcaataccttgaaaaatgatgtacgggtggttgacaagattcctgagtacctaatggaaagatttggtagcaacatgacaaacgttcacaatttcaggatcaaggcatggtcatctattcagtattacagagatgtggtactccctaagttacttgaagaaaaggttataaggatttcaccttttgcaaatagattgtcgtttgatgctccttcagttgtccagcatcttagatgcttagcaaattatgaggctttacggttttcaagtcctatattaaccataggtgaatctttggttgaaagaatgagaaaacatagtgccattaatggtggtaaatatgtctccgtacatcttcgttttgaagaggatatggttgctttctcttgttgtgttttcgatggtggaaaacaggagagagaagacatgattgcagctagagaaagaggttggaaagggaaatttaccaaacaggacgagttatacgtccaggagcaataggatcaattggaagtgcgcccttaccccattagaggtttgcctcatgcttaggggaatgggtttcacgaagaacacatctatctttttggcatctggaaaaatatataatgccgagaaaacaatggctccgctacttcaaatgtttcctaatttacatactaaggagaccctagcttctgaagagttgatattgaacaaatttgatctgtttgaggagaaaatcgaacaagttcctttgaccaagtgtgaatggttctctgatttccatccaataatcagtcgcaatcgtcccaacggcaatagcaacagcattaataataatccctcccttggtcagctggcttcacattacatagcggttaagtttaaaaggctttattcatctcttacaggacgaaagttgtatgtgtcgccggtgaaggggttggagcctggtagtgttgatgcatcacttaaatacgccaaagaaattttgaagtggagtgaagagagaccaaactttagcttgagtgagtactcgatgtatagcactgaggcgagttcattctctcattgattgctaattcaggcaagagttgcaagtcatacttatgtatggcttgatatctgttcgtgtacatatactgctaactgggagtaaaatggatggtttcctctactagctatccacttgtatgattcgctagacgtagacacatgtaggtaaggtttccagcgattagagtatgctggtgagtcagtcagcacataccacagatcatggtgtaatgctcaaattcatttttttatttttcatattttaaggtagcaacttgatgataaatttgtatatcacttttagtcggtctgtcaacttacattggagttgcaaacctgcatctgcgtgctagaaaatacatgatgtatcacggcggtatatcgttcaagcctaagatattactatcctgtttgtgaatggcataaaaaagacataatattcgtgtctcggcggtactttcacattggtgccccattgttttagcgatgataccagtgaatgtaattagttcaacattcgtatttc

SEQ ID NO: 50388 - DNA, 378 bp, Glycine max
  Clone ID: PAT_MRT3847_1650C.1
tcacgacctgtaagtcatgaaatttataaatgtaatgagaaatgcatgtgaggaaattcagcagatgtacatatatactgatgcttagttttatattcctgtgtggtggagatggtactattgggcatgtcctgtggcttgtagcttatacggtttggttgcatctcagtttggggatgttacaagtgcagttgagttaaatgagacagtgaaagagttttttagaagatactttggttatagagatgattttgtaggagttgctgcaggtgtagttgttgggtttgcattgctatttgctactatctttgctttttctgtaaaggtcttcaattttgaaaggcgatagaatagaatacatacatgctttcaactttc

SEQ ID NO: 50389 - DNA, 299 bp, Glycine max
  Clone ID: PAT_MRT3847_16510C.1
aatgagtgttgtgtgaggcgactaataacaaaatgatggcggcaacggcaacaaccgtgcctgtgcggtggcaaccaccaaacaccaggtttaggattcaacctcagcctcagatgaagagactgatgacagtgaaagcatttggcaatggtaagggaggcagagatatggatagggtttggagggaggcgtggcgaagtgcgaacgatggatttgagcgctttgtctttgaagcgaagaagactgctgagcgcatcgaccggcgctattctctttcgcggcgtctctcggtcgaggct

SEQ ID NO: 50390 - DNA, 825 bp, Glycine max
  Clone ID: PAT_MRT3847_16511C.1
aaaacaataatggatgatttgattgtggtatggctactaatgatgccaaaatttgaagcttacatgaagacatccaagtagcttacattagtacatccaagtaggaatcaaactcacaagatttacaataactcattaacattattcaaccaaccgaattaaatctcttaaattaaccactactctatgaagccagttttggtcaaaatagcattcctcaccttgctaagatctctccctttgagtgtcctccccatcccttcacacacagagaaagatgaaatctggctccttgcaagcttcctagcaatccattcatgtggaggaaccatgtcatcgtcgtcatcatcatcatcatcaccacccttgttgcttgcaccatcatctgctgttgaccctttcttgcaactcttaccataaatctttgaccagtcagggatgtccataggtgctgatgaggatcctttaaccaatggagcatcagaagctgcaggtaggggattagcattattattagcccttggaatctttcttggagcagcaggtaaacgccatgcagaagaagaagaagaagaaccacaagattccttgcatgcccttgtggtttctttgccactatcatcatttgctacactccacacatcttcttcatcaaaatctctgtccttcatttctcttccaccaacaccccagcttttgttcaaaaaaacacctcgatctgatgccattgttgttatagatagattagggtgtttccggaatgaaaaaccggacgcgtggaatcagagaccagagagaggcacagaattgtacttgcggacgcgt

SEQ ID NO: 50391 - DNA, 1680 bp, Glycine max
  Clone ID: PAT_MRT3847_16512C.1
gcacgcgttgcggcgggcgcctcgtcacggtggggagcccgtaatccagaggcgacaaggaacggacattgaattgcgacaggggcatttccgtcattccacagagcaacccgttatagccccaaaccccacactttccatcataccacactttctaaccaaccaaccatcaatggcagatgtaaccacctacctccgccaccaccgcgaccccgaccccgaccccgacgacgacgaccaaaccctaattccattcccttattgggatttggactttgatttcgaccccgaattccccacaaacactttctccttcaccgaccgcgaaaaccagatcaatttcgtcatggatctcttccaccagcgcgtggagcagtctcaactcaccgatcccctctccaacgacgccgttttcggcgtcatcgacggaatcgacttaggtttccccgccgccgacgacttcttcatcggacggagattctccgtcggatccgacgaatccgacggaggacactctcactcgcacgcggggattgacgacggtgtcctggggttctgcgcgcattccgacgaagactacaacgaaaacgacgacgttgcgagcatccctctctgctgggacgcgcttcaattggaagacaacaacaacaactacgatgacttcgagtgggaggaagtgatagacgagagagacgttctcagcatgctcgacgacaccgtttccgttaacctcggaatcgaagaggaaacagcagcagcagcagcagaagaagaagaagcagaatcagaagtcagcattttggagtggcaagttttattgaactccaacaatttggaaggaccaaattcggagccttatttcggagataacgaggatttcgtttacaccgcggactacgagatgatgctcgggcaattcaacgacgatgcgtttaatgggaagcctccggcctccgcctccgtcgtgaggaatcttccgtcggtggttgtgaccgaagctgacgtcgtttgcgcggtttgtaaagacgagtttggcgttggggaaggggtgaaggtgttgccgtgttcgcatcgttaccatgaggactgcattgtgccgtggttggggataagaaacacgtgtcccgtttgtcgctatgagttccccactgatgatgctgattatgagcggaggaaggcgcagagatctgttgttatgtgataatcatgatcatggtgttattattagggtcagtttttttttcttactttcagtgatagggtataaaaagtatagatttttttttttgctgctgaagaaaattgtgcttgttgattttccgaaatttgagttttgggatgatgcttctcttcgaattgtacttttgggatacatcacagaaacgattcatttttccatcatggaatctgtttatgttgtgatttcttcatgttcttgttcttgtggattgctctgctgctatcttgtatcgttctgggttacggccagattggaattctgtgaaagtcttagctggttcctttgacggattttatatcctctcatgttttgaatgtgtgtttgcattcacattcgatgatctataatgatgtagaaataccatttaagttcgttttaggtaaatgttcgtaacttcgtgtgtttggttctggattttgaatctgaaattgatttttgag

SEQ ID NO: 50392 - DNA, 134 bp, Glycine max
  Clone ID: PAT_MRT3847_16513C.1
caagagatctttctccggctaaggttgttttgcttgggcatgatctttttttctggatacattttacttgatcgagtgaagagggcagctgtttgagcttgaagcactactcctatcgcaaacagggagattca

SEQ ID NO: 50393 - DNA, 900 bp, Glycine max
  unsure (1)..(900): unsure at all n locations
  Clone ID: PAT_MRT3847_16514C.1
ggctcgagcttcctctctagctagggtttccttctttatacaaaacacaacctaacaagtaacaaccttctttatatgtacttattccttaaccctcctgttaccttcttttgctttcgcgttcgttttctctttctcggtcttgctttgctcagaattgctagttacgtgggagaattaagcaccaagaagatgggaaggggtagggttcagctgaagcggatcgagaacaaaacaagccagcaagtgacgtttttcaagcgtagatcgggacttctcaagaaagccagcgaaatctctgtgctatgtgatgctcaagttgctttgattatattttctaccaaaggcaaactttttgagtattcctctgaacgcagcatggaagacctccttgaacgttacgagagatgtagccatacagcacttgctggagctaacaatgtcgaatcaccgggattttggtctttcgaacatatcaagctcaccgctaaagttgaagtcttggagaggaacataatgaatttctttggaaatgatctggatcccttgagtttgaaagagcttcacagtttggagcagcagattgagacatctctgaagcgcatccgaactagaaagaatcaagttatgaatcaatccgtctcagacctgcataaaaaggcaaggacattacaagtgcaaaacagatggctaggaaagatgaaggagaaagcgaagacagtgactgaaggtccacacaacggcccagaaactctaggctttgattcatccacactcaacttatcttctccacagctaccaccaccaccatcaccacanagactggttccttctctaactctcagtgagacaatgcaagggaggaacaccagttggaagaaacgggtgaaggctcaaaca

SEQ ID NO: 50394 - DNA, 434 bp, Glycine max
  Clone ID: PAT_MRT3847_16515C.1
aattcggctcgagcgaaccactctgaagccgctcacgatatgcacaacactctgaaccctacgtaaaccctaaccaatccaaccatcgctcttacttccaccttcactgcaatgtccgcctgcaagctctcctactcctccgtcatttcctgctgacagtgccgccgccgatacaacgccgtcacactgtcgaggcgcagccacgccgacagggtctacgtcatggccaaggaagcgcactctaacaaagacagcacctgaattgataagctgcagagcggagggaacaagctcgcgcatctggttgctgtcacgcttggctccaagggaagagatggagatctcgagagctactatggcttggcgaatatcgttaacgacggcgtcactgacactaaagaggctgagttgcatgatcccgatgagaatattgg

SEQ ID NO: 50395 - DNA, 420 bp, Glycine max
  Clone ID: PAT_MRT3847_16516C.1
aaaaaaaaaaccccctctttggccaaagaaaggggctttttttaagggaaaaaaattttcccttcttgttcaaaaagggaaatgggccctcttcaaccaaatttttgaaacttttacagttttaaaaaaaccccgtcaacaaaggggtaggggggttaaaacccaaaattttttttttaaccccaaaaaaaacacccaaaaaagcttcgggaaaagggccaacttttggaaaaaaaaaaatttttttacctttcccaagggggggggaaaaccttttgttgatgtctgaggagcgattgttaactggaaaactaatccaaggggggggggggaaacccccccggcccctaccccatggaacatttacaacgaccggttttgaagggaattggcttacagggtaaaaaccattcacaaaaa

SEQ ID NO: 50396 - DNA, 119 bp, Glycine max
  Clone ID: PAT_MRT3847_16517C.1
gtcgattgagagagaaagagatatgggttaacgaatcggtatacgattcactggccgggactcaactaacaaacgtgggcatatagacttgtaacctcataactacacattgctctttc

SEQ ID NO: 50397 - DNA, 469 bp, Glycine max
  Clone ID: PAT_MRT3847_16518C.1
tagtaagcttttcttctgctcttaatgtatccaccgtctcctttctcagaaacatggtccaaagcaggatattcaagatatttgggactttcagtcaaaattttgtacttgtggcagccatcactctctcatacgcaaactgtatacaagtttgcgtaattttagctatgcgaatgcaacgtttaatatccaaggagttttgtgcaaccttttttttctcctatatttgcgaatttataaaaggtttatgcttctcaatagatcagtaagaagttttagtggttgaaattcaaaggtaaaaaaaatacctcgtcatgaaagtcacccagcaattctgttacatatatttcttctagcaccttgcctttgaggcccttaaaatactgagaagagaagaaccatcattagcttgaatatgtatgggcttgttgacatgtgaattgagatactgatacaaaatttggataaa

SEQ ID NO: 50398 - DNA, 374 bp, Glycine max
  unsure (1)..(374): unsure at all n locations
  Clone ID: PAT_MRT3847_16519C.1
aanncatnananagngacggacggnaacgggtaaaagnctncgngnanattgcgngnntncgcaggnangcatgnnaanntgntgntncctgcncgnnannnccattncagatnnccacatgntntacccacnntananannancaaaaaancaaaaaanncannaanaganangacgncnnnnagnnancangnantannnannannannncatnntngagataaancncgagnancnnanngaaaacacnangaaccctncanaanctatctancnacanncgaacacctantctgttnngangncatggnttaaanaantncgannnngngcancaagnanagtantaaagancagngancanangcaggg

SEQ ID NO: 50399 - DNA, 512 bp, Glycine max
  Clone ID: PAT_MRT3847_1651C.1
ccgctgcctcgctcggaattcggattgagcctctagtctcgccctacaagagctcaaacatttacataaccctgatcctaccttcacaccatgaatgaaggtacacgctctcaaatctactccaggggatgtgaataataaagtcgctcttgcgtgatgtggaggctccgtttgaggtgtctgtcaactttggactttccgtcaaacaaacaccaggtccgctgctgcgttggcattctttcatttcaggaaagcgagaacttatctgcttttggatagagaccagctggggcattggtttttcttcaattatcgaatacgggatgggttatggttacatagcagtatcaggacaagctgagtgtctctggaaaaacagccacggtctatctttcttgcgacctggggcctcggctgctactgatacgctcacggctactccgacgctgtggtggggctgattttgctctcctgccgaaaaggttcttggaattgagggaggggaaaagaca

SEQ ID NO: 50400 - DNA, 697 bp, Glycine max
  unsure (1)..(697): unsure at all n locations
  Clone ID: PAT_MRT3847_16520C.1
cccggggatcctctagcagtcgacctgcaggaccaatattaagtgatttgattaaatatggagataaaattcgtgaataattttatcgaaaaataaaattcaaatttaaagataaaataaaagatcaaatttacaattttacctaacaaaaattaaaaactaactaaaatatcttcacaaacaccttatcacacccttagcttctatctttcactgcaattcctgcttcttaccactataaattccacccatttatgcaaagacaaattcatcaacacattaagttttcatctctacaccttgcaacattttgtatcatccccccatgaaaaaaatggcaccatcactttcaacaccaatgaaattcttggccctctcaatgttttttatatccatcatttatcaagataatgctcaatttcctacacctaaccctaatcaaacaaccatggtgttctacctacaagacctagcagcagggcctaatgccacagttgttgccccagtggctggcatcaatggaagagtttggagcttcaccacatttggatccatattngtggtggatttcccagtcacgctgaacataagcccagcctctgagctggtgggccaggcccaaggcctgctcatagcctcagcccttgatggggctagtgtgaatgttgccctttcaattgtgttcaacaatttgcag

SEQ ID NO: 50401 - DNA, 336 bp, Glycine max
  Clone ID: PAT_MRT3847_16521C.1
gttcatggtttttacggcctagccaacagtggcaatttagcttgatgctacagagatataatcaacagcagtatcagtaggagtagcagcagcagcttataaatcggaattcaagcaattatcagtcacagcagcgtcggttatattgtagttaaagagtcaggatataagtctgctgtggtactgttgacctaatcgggataattacgacttgagtatatggtaaggctaatatgtctgcatcgaagatagctgtgttgaatagatttgttattagtctttcaagtgcaagtgacttaccctaggttggttgcatttgagtgtgcataatttccc

SEQ ID NO: 50402 - DNA, 371 bp, Glycine max
  Clone ID: PAT_MRT3847_16522C.1
agccaagtgaatgtgagagaacataaagctcaaagagcataatgtcgatggatcattcacatgattggggatacccttcatgtaggagggcacaagaaggatgaggagcatgacggtgagcaccatgctggagaatacaaaggggagcaccatggtgaacacagtagtgagtacaacggagagcatcatggtgaagacaacactggatagtagcatggtgagcataatccagagcacatagaggggttcctagaccatgtcaatgacaagatccatggtgagggcggcgccgccgatggcgagaagaagaatattgagaagaagaagaatgagcatggccatgagcatggccatgacagcttcagcatcac

SEQ ID NO: 50403 - DNA, 752 bp, Glycine max
  Clone ID: PAT_MRT3847_16523C.1
gaattctgggaaaatccagtgcatgctgttaagaaagcatgtaaagccacggatgatgagattttagaaaacatagctgattcacgtggaggatcaacagctgttgcagcaatactaattaatggagtaaagctactggtagccaacattggtgattctcgagcaatatcgtgcaaaaatggtcgagcaaaaccacttactgtggatcatgaaccagagaaggaaaaagatcttattgagagtagaggaggttttgtgtctaagaagccagggaatgttcccagagtggatggccaattagaaatgacacgagcatttggagatggaaaactgaaggagcacattacggcagaaccagatgtgacgattcggaagattgatgaagacactgaattcatcattttggcaagtgatggcctatggaaggtgatgacaaatcaggaggcttgtgactgtatcagggatgaggatgatgcgcaaaaagcatccaagaagttagtcaaagaagctaaatctcagggaagctatgatgatatttcatgcatagttattatattctagcttaagtcctccacaatgctcctgcatgttatacatagtttcctttgtctgctctgctgtaaaatattttaaattcctttaactcgaggaaatgtctctttaaagtctcctgagagtcatgtacggcagtttaactagctactgctatatgtttctttatttagtcaatctttacataatgttaagtaaaa

SEQ ID NO: 50404 - DNA, 1018 bp, Glycine max
  Clone ID: PAT_MRT3847_16524C.1
acatctgactagtactggagccggccctgtgggagatcatctgtatgaagcatgggaacacatattaacttgcctctcccgaattgagcatttgcaactgttaggtgagggtgccccaagtgatgcaaccttcttcacttcaactaatcttgaaatggaggagaaagcactgaaaacattaggtttctcttcttttaagaaaggaacactccagaatccagccatggtggctgttgttcgtggtagttcatatgacagtacaagtattggggtcaatgcttctgcaatattaacaacagaacagataaataatttcatttcaaacttgaatctactggaccagattgggaactttgaactgaaccatgtgtttgctcatagtcaacggttgaatggagaagcaatagtagcatttgttaaagcactttgtaaagtttccatttcagagttacagtctccaacagacccccgtgtatttggcctcactaaaatagtagaaattgcgcattataatatgaaccgcatcagattagtatggtctcgcatatggaatgttctctcagatttctttgtgtcagttggattgtcagaaaacttgtcagttgcaatctttgcaatggactctctgcgacaacttgcaatgaaatttttggagcgtgaggagctggctaattataacttccagaatgaatttctgagaccatttgtgattgttatgcagaaaagcaacaccacagaaattagagaattaatagttcgttgtatttcacagatggtccttagccgtgtcagtaatgtgaaatctggctggaaaagtgtttttatggtttttacagctgctgcagccgatgagcggaagaatattgtattattagcatttgagaccatggagaaaatagtgcgtgaattttttccttatattactgagacagagacaatgaccttcaccgattgtgtccgatgcctttttgacatttacaaatagcagattcaacagtgacgttagcctcaatgcaat

SEQ ID NO: 50405 - DNA, 314 bp, Glycine max
  Clone ID: PAT_MRT3847_16525C.1
atgatagacagaccaaaatggtgtcttccatgtctctcctccttccacaaacaaacgttaccccatacctcagacactcctcgacaactattggacttgtggagtccaacattggactctttgaagaataattcggaacagcctcaactaccttcaatttggaactataaaccacgttatcacactgccttgtcggagaaggcaaaaggtccaaactctagcgtgtggaagggcgtgaggtggattccatgggagaagaagtctcgcatcatgttgaggaataaatggtgtataaggagaaggctaagcgtcat

SEQ ID NO: 50406 - DNA, 359 bp, Glycine max
  Clone ID: PAT_MRT3847_16526C.1
tttcggctttctctctctttctctatctctgggaaccagtgcgaccgagcgtgcccagcctaatctcttgatgctccggcgaacgacctcgtccctcctcaccggcgcctctcgccgccggctctcctacgacgtgccggcgaccccagccgaggagaacgccttcgcggaagcgtgtaacgaaagtgagccccaacatcaagccgccaaagactccgctggtggacatgaagagccgaaccacccactccctggggtctacctttcaagcgcacagaaaacttagtcttggcctactcttcgcaaccggacatataagatgatgatatgggaagtgggccagccactacttggcagag

SEQ ID NO: 50407 - DNA, 311 bp, Glycine max
  Clone ID: PAT_MRT3847_16527C.1
gtgggcggtatgttttttttggttgttgtataacctgttatatcatctttgttttttttccttgtgaagaaaaaaaggatacatgcttggggccccccttcctttaggggggctgccggttctcccaagaaaaaagaaacaatgacctggggattatcgcagccccccccccccgggggggagaaagacccccgagttgggggggaggaccacaccttccccccgtggaaactgcactgcacgcgggggggaaaaatgctcaagagacccccggtggtccttctagctcccaacatctttaaagccccacc

SEQ ID NO: 50408 - DNA, 1460 bp, Glycine max
  Clone ID: PAT_MRT3847_16528C.1
gaattcgagctcggtaccccggggatcctctagagtcgacctgcagcgaatgttgttcactaattttgtgatatagaaaattttacaaatccaaatgattttttatccgaccaaccaatgctttgtgatgatctactagttagtaaaataactcacgacggtcaatgcatgaacttgactatttctacagacttttactataatataggagtcaatacatgaacttgactatttctacagactttaactataataatatagggggtgcaatctggttgaggtttggacgaatccttttcaatacaattacaagtaataaattctctgccctgctgtcaattgcttttgatctgtctggtgccaattacactttagactcgaactaaggccacattgacatcaacactagcaatgtcgtcaatcagaggcatgaatggcgagctcaatttcgaccaggaatttaactatcaaccattgcttgtgaagcatggcacgttcattcgtattcattaccatgtttgagaataatcattcgagtagacatgcttgttgaaagtttagttactatagttaactcaactttcatggtggaacttcttagtggacacttccattgcatatcttgaatttcaagtttaggcggagattcatttagcatgggtcccccccccccccccaaaaaaaaggagagagaatatgtaacaagtaaaatattaaaggattactagaaagataaaaaagttaggacttttttttaccagaacatgtcgtacccaatgagttatgatcaggaagaagacatgagaaatgaagcaaaagggcacgggttagcgtcctgctgctgccattggtccaatcatggcgcgaaggttggcattatagcatgattggcagtttgacaccattatgtcaagcattcaacctttaattccaagttaattttagcatgccatcaagtgcaaggttgttaaagcgtatcttctagctaatggtttgttcagtgattagaattataacttgaattatgttgcttgaacttaaagagagctcaatttagtccgagttatggaatgcctttgttgtactttattcattttagttagctaaaatcaataatccccgagcttttcccctcttccctttttttgcatggatgtaaatatcaacttcaccaactcaaattagcatgtgtttgattttccattaagacgtaactagttagtacttttccgtttgggaatttgtggttgagaaaaaacattatgttatcaggaagataaggaagaagaatcaaaggctcctggagttcagaaagctctaatgtcattggttttcaagtcagtatcagcattttaggaaattaggaagtgacttcaagatataataattagcagccatgtttataatgtcaaagacgtcttgaaatccgttggcctactggtttaataattgaaggggtg

SEQ ID NO: 50409 - DNA, 293 bp, Glycine max
  Clone ID: PAT_MRT3847_16529C.1
ccaggtttactcctttttatgctcaatgttcttttcgtagctctgagcggcgatgttcctggttgggctgagacctcttttttgccccattttcattctaactgtataatttctgggtcgtctattcaaaattttcacgtcagtctcactaagatttgttattttcatacatgatacttacttgcaattcctactgattgttgttactatacctataacactttcgttgctctatttgtttgctttagtcttattgtcacctataacttcatttacccgcttgatccttcccc

SEQ ID NO: 50410 - DNA, 370 bp, Glycine max
  Clone ID: PAT_MRT3847_1652C.1
ctcaagcgcagtcctgtttgcttccgattcgttgagatggtgaagaagtaaagggaggatgccttaaacgtgcgttttagagagagaaaacaaaaccaaacaaacaaacaagtcagaatctcttctcttctctttctctatagtaactcttttatctgctctcagatctttcaaaaccctcctttccttcattactaaatttactactctttacacattatttttgtgtcaattgctaaggctacacttcttacatctttcctatatcctgtcacaccgatttaaggaaaatttttctcatcaaatattgaatctgacaggcattcaatgttattatcagtgtcttgtgccattttaactcgagctgacc

SEQ ID NO: 50411 - DNA, 493 bp, Glycine max
  Clone ID: PAT_MRT3847_16530C.1
ggtcgggttcaacggcgcgacaaatcgaaggagggcacgacagaattatgtccgaagatgagttggacaaactcaaaggcgaggtggacgcgctgcagacttttgtcaacaaacggctcgagaaggcacttcagctccaagcggagagcaaacgaatctttgagaccattcgcccgtccatcaatagtttcaatgaagactacctccactttttgcgtgttgacttggacagccaatccaccgtgttatcgtctgactttctgaagaagatggaaacattgaatgaaagactgaaagatcatcacgacttgtgggctaaacaggtcgtcttccgctatgacgagctgctcgttaaattagacgagttgtccgcaaaatgtttccaaccttctacggagtttccagcaaagccaaattcgaaaaatctgagtgagaaggaactgctaaattgggaggaggaagttcgaatacgtcagcaaatgtacgagcgagc

SEQ ID NO: 50412 - DNA, 370 bp, Glycine max
  Clone ID: PAT_MRT3847_16531C.1
tttttttttagtttatgaatgtttacacttttctgggattggggctttacaccgaaacgtatgaaaacaaggttacatgttctctttacgagctagcttaggctacgaggtcacacccgacacaattatgttcatactccgtaaagaagaggttaaaaatataatacaagaacaggggacatgaaaccagcatattgtataaatattctccaaaagtgatggggcatttgcccctagaaattgttatggggggctactcaaactcgtgggataaacactaccgaacaaattttggaatgggctacacttatcaactgggatcgcaagaatgctgggaggcactgtttttaaggagccgcgcaactatact

SEQ ID NO: 50413 - DNA, 290 bp, Glycine max
  Clone ID: PAT_MRT3847_16532C.1
catgcctgcaggtcgacttgtcattgcctagtaattcctgagtaggatacaaagcattgatctgcagcaggttacgcagaatcagccaatgcaaagtgggcgcacactggcttgcgttctttcacgcgcttgctcattttgggaattgagtcattcattccatcttttgtgtctttccaacccaatattcgataatcgatcgttggcagcaacaacacttttggtgttttcttgtactaaggagatgggtttggatggcttgtgtttatttgtgggcccctatcaatttt

SEQ ID NO: 50414 - DNA, 685 bp, Glycine max
  Clone ID: PAT_MRT3847_16533C.1
gcgagaagacgacagaaggggatacccgacgggtatagggatgagacaataaacttaaatccgtcagttatcgggtacgagtatgaggatatgttggagagtcgggataaaggattgaggagacaatacccatactcgtcccgtcccattgccatgtctatttttgtttctataagtcaatttttcatttcgtttgctcttaattcaaacaaaaaagaatggttatccatattattctttttctcgactttcttttttccaaatgtatcataaatgaagagttatatgttaaactttttattaatatatatgatttttttgtcacatttaagatcttttaattttataaaaattaataagaaataatattttacttaagtttttatattgtatccttagccggctataaatataaaaatcatccaacatcatcacatgtcatggttgggtttgaatttctccatttctctttctctcaatttctttcatcactaagcttttgagacaataaatatcacctttcttaaagtatgtatcatctccattttatttattatcttattaaaaacttatgaaatgaaagatatgggaggaaaaaagatgaagatgacccatttttgtcactattatgtgttgtatgaatccattgtttgatagttttattttttcaacatattttaaccac

SEQ ID NO: 50415 - DNA, 444 bp, Glycine max
  Clone ID: PAT_MRT3847_16534C.1
ggctcgagttcacgaaaaaaaaaaaatttcatggtggtctaggtgtatggtccaacctatggatcccccaagagggtcctggtgcgtctgattgagactgaaattgagctcgtaacagtgcatggatatctttccatggtagaaaacaacgcacctgatcctcttaatgtgattacatttgaatccctccctgttatttaagacggcgattatactctctatcaatctattgcagtaatcgaatacttagctgtctaatatatggtccacgggtctgatttctcgggaatgacactggacaaatacggtctaaagaaccagtggcttgaagggcaagctcttggctgaatctgccactctgcatcatggttattgatgttgcgaaggagccattatcctgcgcttcttcaggacaataagtggtcgagggaaacaataactaga

SEQ ID NO: 50416 - DNA, 310 bp, Glycine max
  Clone ID: PAT_MRT3847_16535C.1
gtggttctggtggtactatactgtttgtgggtgatttgcattggtggactactgatgctgagcttgaaactgagcttagtaagtatgggcctgttaaggaggtgaagtttttcgatgagaaggcgagtgggaagtcgaaggggtattgtcaggttgagttttttgacccttctgctgccactgcttgtaaggaagggatgaatgggcatgtttttaatgggaggccgtgtgttgttgcgtttgcatcgccttttacagttaagaaaatgggggaggctcagataaataggaatcagcagatgaacccttc

SEQ ID NO: 50417 - DNA, 434 bp, Glycine max
  Clone ID: PAT_MRT3847_16536C.1
ccacgcgtccgcggttctggtggtactatattgtttgtgggtgatttgcattggtggactactgatgccgagcttgaaaccgagcttagtaggtatgggcctgtgaaggaggtgaagtttttcgatgagaaggcgagtgggaaatcaaaggggtattgccaggttgagttttttgacccttctgctgcaactgcttgcaaggaagggatgaatgggcatgtttttaatgggaggccgtgtgtcgttgcatttgcttcaccttttaccgttaagaaaatgggggaggctcagataaacagaaatcagcagatgaaccaatctgctgttcctcagggaaggagggggcctgctgacgcaggggctaaacctggtgggagtaatatttcaacgggtggtaattaccaaggtggagaggggaatagaggctatggaag

SEQ ID NO: 50418 - DNA, 338 bp, Glycine max
  Clone ID: PAT_MRT3847_16537C.1
ggtatcttcaagtccgtctatagaggtaatcaaaaacattgtgatgaagaaggcgagacccatagaacttcatggtactgatctaagcaatattgtgtcaagttcacttagaaaatcaacatctactaatacatctcgacctccagtgccagtacgttccaatgttaaaacactcacattggagcttaacgtagtagacataacgatcaatataatgataaacaagacgatgataatgattaggaacatgatagcagtgaccacgatgcaagtcagagtgatgagtttaacgatgatttagacgacagcgattgatctctgccagatttcacaatatc

SEQ ID NO: 50419 - DNA, 260 bp, Glycine max
  unsure (1)..(260): unsure at all n locations
  Clone ID: PAT_MRT3847_16538C.1
gacttcttcgagttgtaaacctctctcttcaaaccctaaacttagggtttntgttctaanacccttttacaggttgattggnggngatagcgntgctcgtgttgtttgngacccctgcgggttttgccctgtttaaggtgctggntgnnggcaagctttctaaggttgcggtcttgtggcagancttttccagcgcagatactgctagacaggtggtcagttgacagcnttttctnnatttgagaacacttcagangctc

SEQ ID NO: 50420 - DNA, 454 bp, Glycine max
  unsure (1)..(454): unsure at all n locations
  Clone ID: PAT_MRT3847_16539C.1
aatcagngacagccgnggngagaggccaagagacgcgcaccaaacccccaagagaagagcgcatgtgattctcaacggggtagatgaggatggcttcagagaagatctagaattgggaaaggaatttagaaccaaaattggcattccaagcaatgctatttttttttttggagtagctggaagattggagaaagacaaaggtaaccctctccttcatgaagcatactctatgctaagaaccaagtaccccaatgtgtatttgattgcagctgggtcaggaacatggcagaatcggtatagggacttatggaggccagctcttgtcctcggataaacgagagcttccatgttatgagtattctacaatggcattgacactctttgccaatcccacactgaggtctctaggcctatgatcctacccctgaaggaaggcatgatgagtgagaaagcc

SEQ ID NO: 50421 - DNA, 2666 bp, Glycine max
  Clone ID: PAT_MRT3847_1653C.1
aagaagtccaagcgccaactcaaacgcgaacgtcgtctggaacaaaagtcagcacgaaacggtgtgtcccgaaattgccaaaacaggggatgttagttcatgtccttataaagacaagtgtcgtttcagccatgatttggaagccttcaaggcacagaaacctgctgatctagaggggcaatgtcctttctttaaatctggaggcgcttgcccatatggtttagggtgtagattttcgagtacgcatgaagataatctgaaacaaataagtccaacatagcttcacactcattgaacaacgaaccccgtatggtacaaacctctctccgtatcactccaagttataggtcacattgtcacaatgtggtcaccaattgttctactgttgtgccttattcctcctgtgttcttgctattcttcttccaataccgtagaaccttcaagaactcaaaccttccaccaggtcctagaggccttcccataatagggaatctccatcagctagatagctcgaatcttcatcttcagctatggaaactctcaaagaagtatggccctatattttcccttcaactaggtttaaggcccgccatagtgatttcctcatcttgacctgttacataagagtttgggatcaagaatcatggtgaatcacctatctttctataaataccacaaaattgaagctgaacgcatgagttctaatatatcattcaaaagtttttgaaatgttgtcaccccttcttctatttctatgcctaactcttcctttgtttttgttgtccttcttcaaataccgtaaaaccttcaagaatccaccacttccaccaggtcctagaggccttcccataatagggaatcttcatcaactagatagtccttctcttcatgagcagctatggcatctctcaaagaaatatggtcctttattttcccttcaatttggattaaggccagccatagttgtttcctctccaaaattggccaaagaggtaatgaaagacaatgaccttgagtgctgtggacgacctaaattactaggccaacagaaactaacctataatgggttagacatgggattttcctcatacgatagttattggagagaaatcagaaaaatttgtgttgtccatgtccttagctccaaacgtgtccaaagctttacctcaataagacattttgaggtcaagcagatgataaaaaaaatatctaggcatgcctcatcttcaaaagttacaaatttaaatgaagtgcttatatctcttattagtactattgtatgtagaattgttttggggagaaggtatgaagaggagggatctgaaggtagcagattccataagttgttcaatgagtgtgaagctatgttgggtaacttctttgtttcagattatattcctttcatgggttggattgataaactcaggggactggatgcacgtcttgaacgcaatttcaaggagatggataagttctaccaagaagccattgatgaacacatgaattctaagaaaaaaactccagaggaagaggatttagttgatgtcttacttcaactgaaagagaacaacacgtttcccatagatctcaccaatgataacatcaaagcagtgctcttgaacttacttgtaggagctacaggtacaactgaagtcacaacaatctgggccatgactgaactaataaaaaatccaagcattatgaagaaagtgcaagaagaaattagaggcttaagtggtaagaaagatttcttggatgaagatgatattcaaaagttttcctacttaagggcagtgataaaagagacacttagattgcacttaccagcaccactacttataccaagagaaacaaataaaaaatgcatgttagatggctacgaaattccagccaagacattattatatgtgaatgcttgggcaattcatagagatcctaaggcttggaaagatccagaagagtttatacccgagaggtttttaaattgcgacatagatctttatggacaagattttgagtttattccattcggtgctggtcgtagattgtgccctggtatgaatatggcatttgctgcattggatcttatacttgctaatcttctttattcctttgactgggaattgccacaaggaatgaaaaaggaagacattgatactgaagtgttgccaggagttacacagcataagaagaatcctctgtgtgttgtggccaagtgctatatgtaaaatccaaaagtcgtaactactgctgaaaaaaataaaataaaataattaatgattgtactcttccaacgaagattattaaataaagatgtaagcactccaaaataaaaatatttctgttgtgtttaatcttaaaaaatcctcttaggtttaaattaaaaaaaaaaaaaaaaaaaaaaaaaaaaaaaaaaaaaaatgtccttttctttctaaggaacttacttgtaggagctacaggtacaactgaagtcacaacaatctgggccatgactgaactaataaaaaatccaagcattatgaagaaagtgcaagaagaaattagaggcttaagtggtaagaaagatttcttggatgaagatgatattcaaaagttttcctacttaagggcagtgataaaagagacacttagattgcacttaccagcaccactacttgtcccc

SEQ ID NO: 50422 - DNA, 369 bp, Glycine max
  Clone ID: PAT_MRT3847_16540C.1
aacctttgggctgattgatgtgcttgtttatgtgcttgcatggtcgtgagaagatgcatagaggggggcggtaagctgttatagatagacagatatgcctataagtagagaacgaaaatgccgagagtcgagaaaacgatacgcccccgcgaacgtccgcaacgatctagatttatgcccctaaaactgcattccgaaacctctcgtcctcgccctatccgtaaccaactctcccgtctagttatctatttattatctattattaattgcgatctatagtattacaaggtaataacgaccgacgattactagcctcccccgaactttgcgatacctaagcggtcacaactacaacgaagtccggagacg

SEQ ID NO: 50423 - DNA, 211 bp, Glycine max
  Clone ID: PAT_MRT3847_16541C.1
ggtctaaaaatgtcaatttccacgggaggctcttctattgaaatacacactgagagtagaacccactattttccatgacatacacgtccaatgacataacacaaaatcgcctaacatagtgtatacttatgcctgaatgtcggcccaatgcttacgacttgatttcatataaaactcttcgaaacagcaccattggaatttattacattta

SEQ ID NO: 50424 - DNA, 261 bp, Glycine max
  Clone ID: PAT_MRT3847_16542C.1
cccacgcgtacgtgtagacatctattgcgactgctgttgcaaactcatcatcaccatcatacttgcgtgccgttggtactgatcatattcatacttgctctggagatggtgcataacttgcaagagaacatgtcataccctctagatgatctctcacgttctattgccatacttgctgaattagaatcaggtggctcacaaatgaatcatgctcactcaggaagggaacgcaaaattcaaaggaccctactggacttgctc

SEQ ID NO: 50425 - DNA, 308 bp, Glycine max
  Clone ID: PAT_MRT3847_16543C.1
ggctcgaggggagactgtgagccaactattttgtttttggtgctatccattctcggcactacagggctcttggtccaaataccggtaagatgcaggctcatacagtttggatcttttcaaaccagggcattatgaatatcgatacatgctgtactgtacttgactgtcgagtgcatcttcatgttaggaattgggatccacatgtacatggggtaaatcatccctaaatatatgaaccactaatccctaagtatacacttattagagttttgttccttccgcttgatttgcgtccagggatgtgacta

SEQ ID NO: 50426 - DNA, 500 bp, Glycine max
  Clone ID: PAT_MRT3847_16544C.1
gttttattacacaaataaggaattgattctgagtgcacattttgatttgaagctacttttggataggataaaataaattatactgaattttactactgtttttggttttaaaataaaaaaatgttcaaacataaatcatgttgtttcaaaatcaattttaactcgaaatcgttttcattcaaaattggttttgcaaacattgatccaaaccgagtcttttgtgacgggttgtttattgattagggtattgaaagtaagaagtgggtgattggattttgaggacattatactagctggtcatggatctagttgattataattggattttgctttgttgcttgtgttttgtttgtttaaccttttaatctgtggttttgtaacagtttgacaacttgtatgggtgccgtcactctctccctgatggtctcatgagggctaccgatgttatgattgctggaaaggtggctgttgtggctggatatggtgatgttggcaagggg

SEQ ID NO: 50427 - DNA, 640 bp, Glycine max
  unsure (1)..(640): unsure at all n locations
  Clone ID: PAT_MRT3847_16545C.1
ttgtcacgcgtccgctctctctctctctctgttatgttactaccctaacaattttaacaaataaagaaccaaattttcactcttttctgcactgccagtgatgggagatgggtgcgcggttgagagcaccacggggatttccaattccaataacaacaacaataagaagaagaacaagaagaagaagagcaggggtgggagcaagaagaagatgacccacgagcaagttttggcctttaagttagtgagcgagtgggttttcttggatcacccttctgcttcgtcttcgtcttcttcttcttgtgttgtcgatgattttggtgttcagaagcctctggggagaggcggggagaagctcctctttgaattgcattctcactccaaattcagcgatggcttcttctccccttctaaagttgttgagagagcccacctcaacggcgtgaaagttcttgctttgacagtcatgattcaatattctctcttctattaaagttcgtgttttttatgcttagcctattggaaagtactctctctttntttttttaacaaagctcaaaaacagttagttattttgttcatacatggnccagaaacaaaaacaaatattatttaataaactcagcaggaataagtgagt

SEQ ID NO: 50428 - DNA, 1806 bp, Glycine max
  Clone ID: PAT_MRT3847_16546C.1
cggtccggattcccgggtcgacccacgcgtccggtgacctgaacactacccttctctctctgtttatgttactaccctaacaagtttgacaaaccccaaaaaagaatcaaactttccctcaaattttcactcttttctgcaccgccagtgatgggagatgggtgcgcggttgagggcaccacggggaattccaattctaataacaataataacaataagaagaagaacaagaagaagaagaacaggggtgggagcaagaagaagatgacccacgaacaggtcttggccttcaagttagtgagtgagtgggttttcttggatcacccttctgcttcgtcttcatcttcttctgctgcttcctgtgttgtcgatgattttggtgttcagaagcctctagggagaggcggggaaaagctcctctttgaattgcattcgcactccaaattcagcgatggcttcttctccccttctaaagttgttgaaagagctcacatcaacggcgtgaaagttcttgctctgacagatcatgacactatgtcaggcattcctgaagctgtagaatcagctcgtaaatatggcatcaagataatcccaggtgttgaaattagtaccatattttctccaagaggagactctgaagtagaggaaccagttcacattttagcatactacagcagtattggaccatcaaggtttgaggagctggacaagtttctatcaaatataagggatggacgttttcttcgtgcgcagaacattgtcttaaaactgaacaagctcaagttgcctcttaaatgggagcatgtttgcaggattgctggcaagggggttgcccctgggaggcttcatgtcgcccgtgccatgcttgaagctggttatgtagaaaatctcagacaagcctttgctcggtatctttttgacggtggacctgcttactccacgggaagtgagcctctggcagaggaagcaataaaaatgattagtcatactgggggtgttgctgttctggctcatccatgggcattgaaaaatccaattcccattattagaaggttaaaagaagctggtcttcatgggatggaggtctacaaaagtgatggaaggctggcagcatatagtgacttggctgatgcctatggacttctaaagattggagggtcagactatcatgggagaggagggcacaatgaatctgagctgggaagtgtgaaccttccagtgatagtgttgcatgacttccttaaggtagctcggcctatctggtgcaatgccatcagggagatattagagtgttatgctgaggagccttctgattctaacctagcaacaattactaggtttgggagaacctggagttttaagggaggttcaccctttagttgtggacaggacttgattgatcattgtttacctctctggttgtctagccaggagatggaaaatgcagagtttgaagctatcaagttaaagctttccaatgtttcagttagtcagggaggaattcaggttctcatagagactaaataaaagttgtgtaacttgatatgtcaccttaaatcattctcagtattgttggcagccaaatcttaatattaaatttgttagtcaagttcaaatgtctattgattctttttgaaaattttctatgacctttgagcaaacatttctcatattattgttttatcttctacactgatgtatttttcttttctctattttttcttaatgcaaacttgtcagaaaaggttgtatgtacaaaaattgaaacaggagggtttccttcttcaatgattgatacatgtttcg

SEQ ID NO: 50429 - DNA, 180 bp, Glycine max
  Clone ID: PAT_MRT3847_16547C.1
tatcgagccgatatcggctcgagagaccgcttgtggcagaagaagagtgttgaagttaagcagacagtagacacgcatgatagattgttacgtcgttatggattaatttctagtcttgctagagatatttgagtagtatgagtgtcgttttgagcaaatagtcattctgaattttgtcgg

SEQ ID NO: 50430 - DNA, 458 bp, Glycine max
  Clone ID: PAT_MRT3847_16548C.1
cgatctcgaaacccagccgcggtttcgaacctttctctcagatctctctcttcgttctctcactcgctgacacaacaaacgaaagcattatggctggcaaaggagagggtccagccatcggaatcgatctcggaaccacgtactcgtgcgtcggtgtctggcaacacgatcgcgtcgagatcatcgccaacgaccaaggtaacagaacgacgccgtcttacgtcgggttcaccgacaccgagcgtctcattggtgatgccgcaaaaaatcaggtcgccatgaaccccatcaacaccgtctttgatgccaagagattgattggtcgtagattcagtgatgcctctgttcagagtgatattaaactgtggccttttaaggttttgtctggacctgctgaaaagccaatgattcaggtcagttacaagggtgaggataagcagtttgctgcagaggaaatc

SEQ ID NO: 50431 - DNA, 882 bp, Glycine max
  Clone ID: PAT_MRT3847_16549C.1
gttcgccatcttccatagaatacggctgcgagaagacaacagatggggaatggagaagtgagcggtgagaggaaacagaagagagaagagcaatcggtgagtgaatggaatggattcaggtcctccggcgaacgatttgtgttcagtgtgccatggcaactttcatattccatgccaagccaattgttctcactggttttgcggaaattgcataatgcttgtgtggcagcacggatcagtgggttgttcatgcaagtgcccactgtgtcgtcgagccatcagtctcttagtccccacagaagagtctctgaggcaacagcaggaccccgaagtttcccagattctgtcaaagattcatgcctataaccgtttcttcggtggccaacccaccactctctatcagagactgcgagatcttccctttctcttgcacaggctgctcagggaattcctccaccctcacagatcccttcctcttctcattcgcgctcgcgtctttgttgttatgatagcgagtgttatatacctcttcagccctattgacatcattcctgaagggatattaggagtagttggtttcttagatgatctcctaattgtgctcatctgcttcctacatgttgctgccctttatagatcagtactctacctccgtcatgggggttcctgaacatgttctacaattttacaggtaaaatgagatgatgatgcctagataggtgccggatatggatagtgggcattattctttcattttcaaaattgaactactttgttttctatgtacatagacaagttcaatttcaaatagtggaattagtaatggaaattacaatgaaaaagctctcttttaaaaaaaaaaaaaaaaaaaaaaaaccaaaa

SEQ ID NO: 50432 - DNA, 503 bp, Glycine max
  Clone ID: PAT_MRT3847_1654C.1
caaacagcaacatcttcgacctgattcagtagttcaattgtgattacagagagagagagagagagagagagggcattcctaaagggggttatattttccctatctttttcatgggacataggtgttttttcaattttttggtataaatagatagcgtattggagttttaagatcgcagagcaagaaactcttcatttttactatctcaggtcttttacctttcctagggctgaaagttctcctgataatgcagaagccgtgatatcgaaacaggtgagattctcatcaaatgtatcatgaactccttcaaactggtgaacagaaaatccaccaatccatcaatttcggattcatattgctcgtaaacaaaaaatgccataaatgcgaccgccaaacctatgcctatcattttcgtgaacaactctgacaggatcaacttcagaaggtaaagaaacactgcaatcttgaagatgcagaccaatcgtccccctgggccaggccac

SEQ ID NO: 50433 - DNA, 166 bp, Glycine max
  Clone ID: PAT_MRT3847_16550C.1
gttcaggagcccccatgacggaggtagagtactgatgcctagataggtgccggatatggatagtgggcattattctttcattttcaaaattgaactactttgttttctatgtacatagacaagttcaatttcaaatagtggaattagtaatggaaattacaatgaa

SEQ ID NO: 50434 - DNA, 492 bp, Glycine max
  Clone ID: PAT_MRT3847_16551C.1
gaattcacggctcgacccacgcgtacggacagaaggggggtgagaggaaacagaagagagaagagcaatcggtgagtgaatggaatggattcaggtcctccggcgaacgatttgtgttcagtgtgccatggcaactttcatattccatgccaagccaattgttctcactggttttgcggtctcttttgtctctctgactttgatttcaatattgaatgaatgaatgaatgaatgaagttacataattggtgtttcaggaaattgcataatgcttgtgtggcagcacggatcagtgggttgttcatgcaagtgcccactgtgtcgtcgagccatcagtctcttagtccccacagaagagtctctgaggcaacagcaggaccccgaagtttcccagattctgtcaaagattcatgcctataaccgtttcttcggtggccaacccaccactctctatcagagactgcgagatcttccctttctcttgcacaggct

SEQ ID NO: 50435 - DNA, 1207 bp, Glycine max
  Clone ID: PAT_MRT3847_16552C.1
ggctcgagcttaattgttctgcctaccttgcagctcactgaatgcagtagccaatgatggaggatggatatatcttggaactaacaaaactatggcaaaatcaagtagcactggctacagtcagtggtccctctcaaaggatcatcttcaggtgggtgatacagtgcgctctagaaagctttccaattcatgcaatcctcaaaacatggaggtcccagaaggaaatgttgttggtttagaacgcaatgtagatcatggatttgttctagtgaggctccatggtgttcatgaccctgtaaggattcgtgcatcgactcttgaacgtgtcaccaatggtttgggagctggggattgggtacgcttgaaagaagaagatgacaagcactcgccagtgggtattcttcattctatcaatcgtgatggcagagtgactgttgggtttattggtctgcaaactctttggaacggtaactgttcagatcttgggctcgaggaaccttactgcgtgggccagtttattaggctgaaagccaatgttttgagtcctcgatttgaatggccacgtaaaaggggaggtgcctgggctactggtaagatttcttggatcctaccaaatggatgtctagttgtcaagtttccaggcatgttgaacttttgggatgcaccaagaactgtcttggctgatccctccgaggttgatgtcgttaactttaagaattgtccgaagatgatagagaagtatcaacatgtagaggatcaccactgggcagttagacctgttctgattgcatttggctttcttactgctgtgaaactaggaatgtcaattggaaagaaacttgggaggaacatgaatgctaatgcaatggatagtgaaagtcattatacagataaccagaatgctagccctacatggacatcttcagtggctaacatcttttccagagaaggtgttaacttggctaatggtcgctagttttaccccttctatctcaatattaacctgttctatcatgctgttgttgggacaaacatatcacttgagaattgtaaatttgtaattatacataaatgccaacggggccaacactgaatgtaaaagttgtacatatgccttgtaaacaaaattagctagtgttgttcatacttggcttttacgcaatgcaatgcatatagataattccataggaggaaaaaaaaacaatgt

SEQ ID NO: 50436 - DNA, 608 bp, Glycine max
  Clone ID: PAT_MRT3847_16553C.1
tcttatcatgactagatttgaagtggttttcatcgctaccccagccctcggcaaccttgttccaattgtggaattcgcggatctcctaaccaaacacaaccctcaattatctgcaaccgttctcactgtcaccacgccgcaacgacccctcataagcacctacgtccaatcccgcgcctcctcagccactaatctcaaactcctccacctccctacagtggatccacccacacccgaccagtaccaatccttcatcgccttcgtctccctccacatccaaaatcacaaacaccaggtcaagaacgcgctcctcaacctaaaaaaaaacgagtcaaactcgtttgactcggttcgactcgtcgctctcttcgtcgacatgttctccaccacgctcatcgacgtcgccgccgagctcgccgtcccgtgctacctcttcttcgcgtcaccggcgagcttcctcggcttcacgctccacctcgaccgagtcgacccggtcgagtcggaatccgagttggcggttccgagttttgaaaaccccttgccacggtccgttttgcccaacctcgtgttggacgccaacgacgcgttttcttgggtggcataccacg

SEQ ID NO: 50437 - DNA, 525 bp, Glycine max
  unsure (1)..(525): unsure at all n locations
  Clone ID: PAT_MRT3847_16554C.1
gtcgacggacgtaacaaggatatcaaaatcaaatccttatttctcactaacacctannaaataacaattcaatatttaaatagcgtaaaatatctctctctctagtattcacatatcaactcataataatcaccactccataacgtagtataaaagcagaaacaatgaatgtatgtgctggacgaatcaataatatgttcacgcgaaatccacaagaaaatgaaaattcagaatcatcagattcagtgcttgaagatggcgagcattgacaacacgaccgaagctccaatcacggccaccgaactcgaaacggatctggcagctccggcatcgggtccctgcacaggcgccggagacaaatcttgagcggtggcggcggcgaagaaaagcgccacaataagagcaatgacaaaggacttgaaagaggttgcttgaaatgccattgtgaataaaaaagatgataattgagtgaatatgtaaagaggaagagaaaacaatgaagaaagtttttgaagatgttctcgt

SEQ ID NO: 50438 - DNA, 473 bp, Glycine max
  Clone ID: PAT_MRT3847_16555C.1
gtgtgtgttgttttttttttattttttttttttttttttttttttttttttttacaaaaacgggcaaaatggcaaaggactggttttgccttatttgcttatttcccaaccaatcccctacaggtttttctttcacggtggaaataagaaaacaaaatacttgcgggtacgaaaaggatccaacctgggataatttggaaattatatgggaaggctaaaaacaatatcacttttggaatcaaaggcttttacggaaagccgatttaattccagaggattctcccccttagggggggggcggcctttagatactctaaccctgccccttgcaattttaaacagtttttggaggctggagcttgaaattcttttggggatttttttttgctttggggcaaaggggggttaaccccctttttttttcaatgtgaaaaaaaatatggggctttctttttaccttttctggaaggaaa

SEQ ID NO: 50439 - DNA, 144 bp, Glycine max
  Clone ID: PAT_MRT3847_16556C.1
gttcctgagtatcgatatggcatcttaattctaccacattctaccttggtggtttgttgaacttggactatgatggttgatttagcttgacccgtgcacttactaatataatcactgttagtaggtgacggcgatttttgtttg

SEQ ID NO: 50440 - DNA, 515 bp, Glycine max
  unsure (1)..(515): unsure at all n locations
  Clone ID: PAT_MRT3847_16557C.1
acgaggcgtctaatacccacatccaaggcaaagctatatggagtaacttcaggtttttacgttccatatccatatgcgcatttctccctgttgaatgcagaacctaacaggtgcttagtagactatggtgaaacatagatggtgttttcctggggccgagaggaacgtgatttcttcatacggaagtgaagcattcaaagtgtttatgtattgcatgtttaccccatgatgcggccatcatttcaagtcatgaggacttgatgacctccaatagtgtggataaggcgggatgcaacagtgagtagtggaaaacggaaggattctaagcatcaaagcgctttatcttatccattctctggtttactatctcagtttctcctatttgtgtaaaataacttgggagaaaagttcttccgtatcatattcaactttcaaagaaccatcaaccaacttaaaaatgaagcanagcgagtgaaacataaaaaaaaaaaaaaaaaaaaaaaaaaaaaaaaaaa

SEQ ID NO: 50441 - DNA, 181 bp, Glycine max
  Clone ID: PAT_MRT3847_16558C.1
tagccactgttccatccttcgcttcgtggggtcgcccttccctcttccttctgctcccggccaggtgccgcctttcctttctcttcacgcaggcctcgacggtctgcctagcttttgtctcgactcttttccttatccgcgcgcgcacgacggcgacggcgcacacgtcttccacacaaca

SEQ ID NO: 50442 - DNA, 290 bp, Glycine max
  Clone ID: PAT_MRT3847_16559C.1
gtgttcttttatattttttttttttagggccaagtgaatcagtataacttgtttcctttttcattctttcaaattttgatgctgaccccctttttttcagaataaaaacaaaagtgtatctggaatgggagaaattctaacccaataaaatttacattccattgggagggggggtgggaccctctaaacatatggttaaaaaatcatttccggctaaaaaaaaaggggcttgtttttggccgaaacaagcaggcacaaaggttccatattctaccaatacacttggcctt

SEQ ID NO: 50443 - DNA, 232 bp, Glycine max
  Clone ID: PAT_MRT3847_1655C.1
tgaaaaaaaaatataatttttatctaaaaaaaaaaaacaaagagaaagattaatgggcggacgggggcgggagtacaatataaaacctaaaataaataacttgcgcgggacctgcatgaattctaactttttcatccggaaagaatgtattagacctttgccttaatgattccacataattttcctatctggggtgaaatttattatctctgtcacaattcatgacaaaata

SEQ ID NO: 50444 - DNA, 483 bp, Glycine max
  Clone ID: PAT_MRT3847_16560C.1
aggatttagtaaagggggaaaagataagaaagggtatggagggaatgaatgactctcattgcttgcttcttcttcttctagtcattgtcttctataagaaattgtattatgttggaatttctgtgtgtcttctcctttttctcccttcttctcccttcttcttttataggtgcaaattagtgagtttctgaattagtctgattttcttaattagtcattctttccttaattattctgatttcctgctttcctcaattagtcttctttccttaattagtttgtttttcttaattagccttctttccttaagtagccattctttcctcaattagtttgttttccttaattattcttgtatttctgtgttttattttacttcataaatccatcacttttaatattctctgtacaaaaacttaaatgatgttaatttaacaattattttctcaaaaaggaaaaattagaagagaaaaattataaatt

SEQ ID NO: 50445 - DNA, 211 bp, Glycine max
  unsure (1)..(211): unsure at all n locations
  Clone ID: PAT_MRT3847_16561C.1
gccattcgaaatctgacaagatcgtagctattatatttcatcaataccatgtacgctaaaggggtgttactaccgaatacgctgagcattctaagacctaccgtatgaaacatctttcaactaacaaggatcgngccaaatccaaggtctcgctgttttgccgagaaaattgtataaggttaagaaaagcattcagcaagtgcttgccata

SEQ ID NO: 50446 - DNA, 376 bp, Glycine max
  unsure (1)..(376): unsure at all n locations
  Clone ID: PAT_MRT3847_16562C.1
ttttaatcaatatttactattttattttactcactaaaacatagataaaccatacatgatcaaaccagaccgtacgtactgttattatggccatgaaactcaagtatctggcttccattgccgacgatgtcatcaagagatgttcacataaactggacacttccctcgataaattggtggaagatttttaaagagattgaaccctgaaatgggaaactattgcataaaattacttgaatttttcaccggcaaaggcgctaatgaaatgtgccacaacatannaggaaacatcaatgatttctcatttaccangctgacatataacatgatgcttgcttttaacacacctatctactacaatgaataaccaattatg

SEQ ID NO: 50447 - DNA, 220 bp, Glycine max
  Clone ID: PAT_MRT3847_16563C.1
ggagcagcaacaacaagtctcagctgaaatggcctcttcagttttttgcatctgtggccctcaaacctgcccctttcactgttgagaagtcctcagtgagaggcctttcctctatctcaaggaacccttcttcattcagagttgttgccagtgtcatgacgatcaagactgacaaaccttatggaattaaaggtggcatggtcttcagggatggaactga

SEQ ID NO: 50448 - DNA, 250 bp, Glycine max
  unsure (1)..(250): unsure at all n locations
  Clone ID: PAT_MRT3847_16564C.1
ctcttcttctcttgcggncagggtttgagngnanttctnntagattcnanggaagatgggtaaggacaaggtncacntcagtattggnnttntnnggcatgntgactctgggaantccactaccantggcccctganctacaagcttggatgcattgncangcgtgttattgagagntttcagaatgaagcngctnagattgaacaanaggtcgttcaattatgcctgngtgcttgataagcttaaggcc

SEQ ID NO: 50449 - DNA, 459 bp, Glycine max
  Clone ID: PAT_MRT3847_16565C.1
ttgttcttttctgttgctatttttctgctaagttaacacttctgaactgcattgtgttggggggctatattgcaccataaaaaataaaataaaaaacccccccttaaggggggatcccccaccgattaattacccttgctagctagttaattatcaattcttttacgcccccgatataacaaaacagctggcgcagccttttctgtttctggttaaaaaaactgttattggtgggggataacctggcccccagagggggggaatgaaaagggggaatttttcccaaatgggaaaacaaaaaataaaaattttccctttttgggccggaaaaaaaccccccccccgggggaccctgccccttaaaaaaaaaaaaaatattgggcgcccccccccccccgaaaaaaaaaaaaagggtgtttttttttcccccccccccccggggggggggaccccccccca

SEQ ID NO: 50450 - DNA, 1786 bp, Glycine max
  unsure (1)..(1786): unsure at all n locations
  Clone ID: PAT_MRT3847_16566C.1
ttgtcaatttcctctcacaggtttaatgatacacataacgattgacacatgtaatctacgatgataaaagaaaaagaaaagtggtcgaatcaaagataaacaggcaaattaacatacatcatatatgaaaccaattaaccaatataacttccgatgaatcgaggagagcgtgatgaaaataaaaccttaatttgattgacttacatatatgtttacctctgtacaatgccttaacgtatatatgggagcgcctctttttctccaccccttgatggatttaggatcatgatctctgaggcagtgacaagacgtctcataacttcaacttgagctcgcagtgattgtatataatctagggttttcttcatccaaagacacagcgtccatggattctcctcctggtaagagactcttgagccttcgcgttctcttctggaccagcctcttcgcaacgaaactcgccgccaccaccctatcctttgttctgcagtggactgctgcacggtttcttctgatcaacatgtttctgcagcttctgatccttctggaagcttttccttgttgccggcctctgtggtggtgatgatgatgatggtgacacgtgttccgtgaggactttgttgttgttgccatctcttgaagcattcgcaataagggccctgctccagcgagtggatttgtttctggtggaagccatagctaaatctgctgacagctctatggctttctttctctccatcagactcatgtcatcttgagagtatatttctcgacaccataaaacagtacgcctcagagaagacgacagaaggggaaacttaaaattggagaagacgaaacaagtcagaaaagaaaaatgaaaatagtagaaaagaaggcattaggttaagagtgaaggcagtgagcgaaagagagcatagtaatacttactgagtgcttacagttgctgcgtcgcaaggtaccggcggcgacggagaactatcttctcaattttcgatcactgcattggttctgttgacaagggttttgttcttcctgacttgcatacttgatggcttcaaagttgcagaagttgcaggccacagcatctcaagcgtctcaatttgtatccagtcgtggaactaactactacaagcaattgctggaacagaacaagcaacacattcaggagcctcctacagtagagaaatgcaacctgttggcaaagcaattgttttacactcgccttgctagtattccgagtcgtaatgagtccttttggaaggaacttgattatgccaagaatttgtggaagaacaggaaagagctaaaggttgaagatgcaggaattgctgctttgtttggcctcgaatgctttgcatggttttgcgctggtgagattgttggcagaggatttactttcaccggttactatgtctgataataaccacttggaaagtgtagattttatcagggctaaacactcctaaagccaactgctctggtcatttatacattgtgtggattatggcattctgcatggcaatttttgttatgataagcctcaataaccccttgtagttgaaagcgggatgaaccttgtgttgttctcttattatgttggaaagctagtgatggtactccacaaaaataatatgagtaaggtttgatgagtgacgttgcagtgttacagatccaagcaatgtggtatatgatcaggatctgaattggagttcgtcttatgaaccttctggngttagacannnnnnnnnnnnccccactcatgagtcttttgtgaggggtgccc

SEQ ID NO: 50451 - DNA, 289 bp, Glycine max
  Clone ID: PAT_MRT3847_16567C.1
cggtattaaggtgacatatagataaatatattggtttcctaagttcacaccataacttcactgtatacgatcatactttacctccattcattcagaaagtgcgattcaccactttattacgtctttgatactggatacatctcgatacatatacttgttattgcataagctgtcacaattcatatacttaccacttgctgcaaccaatcatgacattatctgtggtccattgattttaatacgttcattgcaaccacttaactaaagctcaatcctcatagtgctttct

SEQ ID NO: 50452 - DNA, 248 bp, Glycine max
  Clone ID: PAT_MRT3847_16568C.1
tggtgattggcctagtatgaaaatagagattatatggaaggccctcgacaacattaataatttttctttcactacagagtagagactacagcacattgctgtccccttcagcaaatttggggttgcatcccctccgccgaaagctataggaacatgttagaaacgcggtgttagaattagatgcggctttatgtagaacagatgcagagtgttcttttcaattttcctttaaatgtctttattttagc

SEQ ID NO: 50453 - DNA, 233 bp, Glycine max
  unsure (1)..(233): unsure at all n locations
  Clone ID: PAT_MRT3847_16569C.1
ttccngaaggtaaataatgatcatgatcaattccctaattgcattgaggcacattcagttgtggcatgctagtagcacaatgttaatttactactataatgttgttttccaacatgtcacttgatgtacacaaactgttgttaggcctctcttattgtcacactaaattttttgaagggtactaattcatgattcacatgaacttttgtaaattccacgagtcacacacacgc

SEQ ID NO: 50454 - DNA, 257 bp, Glycine max
  Clone ID: PAT_MRT3847_1656C.1
caagaaatggaggagaacaatcgaaaaattagtatcttagaaactcaagtcgagaagtataatgggaaaaactcgcacgtgccaatatctctatctccattgacaaaatctacttcagcaactcaaacagagcgcatcagaacttacatatatatacctcagatgatatggtgatgattccataatctcaggactcgatctcaggattcgtgcgccagaaacgacattctcaatctcaggcggagacgtgaacagat

SEQ ID NO: 50455 - DNA, 330 bp, Glycine max
  Clone ID: PAT_MRT3847_16570C.1
aaaaaaacccccccccggggccgggtaaaatttctaaaatccccatccccctgtggaaaaaaaatttcccgaaaaccctttttttgcaaaagggtttcatataaaagggaatcagggtcgccccaagctccaaaaatgggccctaaaaccggccctttaaaaaaaattggggacccaatagggtaatcagctaaaaccgcccagggagaaaccgccccaatggaaaacccaaagcccccacccaaaaggggacccttggcatcaacggccccctggggtgggcttaagggacccctttcaaagggggtgcagcaaaagcccccccaagct

SEQ ID NO: 50456 - DNA, 243 bp, Glycine max
  Clone ID: PAT_MRT3847_16571C.1
tcgaaaaaaaaaaaaaaaaaaaaaaaaaaagaaataaaaaaaaaaaaaaaaaaaaaaagataaaggggacaccttcctataatacggttacctaccttaccaactcttgcatgctaacactactctcttgtatatcctcacctaaattaattcaactgcccgtctctatacaacttctggacagtcaattcccttaccttacccaacttattcccctttcatgacatcctccttttcccagct

SEQ ID NO: 50457 - DNA, 450 bp, Glycine max
  unsure (1)..(450): unsure at all n locations
  Clone ID: PAT_MRT3847_16572C.1
cgatcgcataccggaacgagtactagagattgtcagtattgcggaaggacattttcgcgtaacgatgtacttcaaagacatctaaagacgcatgtggggcatcaagttggggatggtagaccgagagcgtcacctagtccatctatcgctcctgaggttccggattcaaggtcaattatccatcaaacacctcagatccaacaagaccagatctatcctcaggaccctctctctgcaaataccaatctgacggttcaggctggaccatcgactggcgattcagctataactggaccggtgtatacgactcaacaggatgaagcttggagaatccttcatgggctggtacaagctactcaacctgtttctgccccttcatactctctcaaacaagatgtaatcaacccattccccgatatgttcagcaatcaagccgcangttcatgggac

SEQ ID NO: 50458 - DNA, 412 bp, Glycine max
  Clone ID: PAT_MRT3847_16573C.1
ggctatttttctcttctgcttctggttctcatattttgtgttattctttgattctcacctttctgaggatttttccatcttagttcctggaggcaccaggaacctgaccaaataaataaaccttctttttcttctaatttttctgaagtttcattttatagtccaatggcagcttggatattatcagaatgtggcttgaagcctcttgctccagtaattcctagacctagaactggggctgctatgaggtgcaacctgatggagaggaattgggggctgaaagggagtgcccctttgagggttgctttcattgaagaggagcacaagagcgttgatttaaccaaaggcactaattgggatgagcatgagaagcttccagaatttgaccctggtgctccgccaccattcaact

SEQ ID NO: 50459 - DNA, 3116 bp, Glycine max
  Clone ID: PAT_MRT3847_16574C.1
cttttatctccaaactcggcgtgggtatctgggctttatcccagtgagtgctttttttctgtaactaaccccaatcatcaactcaatcagcgaatgaattggtggacggatgagtactcctcggtgatgcacctcctcttgtcctccctcgcccaaactcaatccctgtgagtgctttctttctgtaactaacttgttccctcgttaaccctaatcatcaactcaagcagtgaatgaatctgtggacggacgagaactcctcggtgatggaggccttcatgtcgtcctccgatctctcctcaatctggccctcgccggcgccgccgcaatccacggcggtcttcaatcaggacaccctccagcatcgcctgcaggccttgatcgaaggcgcccgagagacctggacctacgccatcttctggcagtcctcttatgactattctggctccactctcctcggctggggcgacggttactacaaaggcgacgacgacaaagccaaagccaaggccaaggccaaggtcaaggtcacttccgccgccgagcaggaccaccgcaaaaaagttctccgcgaactcaactccctgatctccggctcctcctcctcctccgccgcctccgacgacgtcgacgaggaggtcaccgacaccgagtggttcttcctggtctccatgacgcagtccttcgtcaacggcggaggacttcccggacaggccttcttcaactccgctccggtgtgggtcaccgggggcgaccgtctctctgcctcggcctgcgagagggcgaggcagggacacgtgttcgggctgcaaaccctggtttgcataccgtccgcgaacggcgtcgttgagctggggtccaccgagttaattttccagaacccggatctgatgaacaaggtgaaggttctgttcaatttcagcaacaacaacttcgacatgggttcttcttggcccgccaccagcgccgatcagggcgaaaacgacccttcctcgctctggctcagcgatcccgaagttagggattccattaacactgttgctgctaccccttcggtcacggttcctgcacagactcaggggatttcgatttccaagaccatgcagttggaaagttctattcaaacccctggttccagtactttaaccgaaacccctagttctattcacgcgattccgcagaaccagagcgtcttctccagagaattgaacttttctgagtatggtttcgacccaaagactgggaacaatcagaatcaccattctctgaagccggaatccggcgagattctcagcttcggcgagagcaagagaacctcctacggcggcgtcaatgggaattccaattccaattcccattttttctccggtcagtcgccgtttgttgctgctgcggatgagaacaccaacaaaaataacatcaacaacaatgggaagacaaagtcaccgaattcgcgcggtagcaacgacgacggaatgctttccttcacctccggcgtgattcttccggcctcgaatttgaagtccggtggcggcggcgattccgaccactcggatctggaggcttcggtggtgaaggacccggtggtggagccggagaagcggccgcggaagagagggcgtaagccggcgaacggaagagaggaaccattaaaccatgttgaagcagagagacagaggagggagaagctgaaccagaggttctacgcgcttcgtgctgtggttcccaacgtgtcaaagatggacaaagcgtcactcctgggcgacgccatatcttacatcacggagctgaagtccaagcttcagaccctcgaatcagataaagatggaatgcagaagcagctggaaggtgtgaagaaggagctcgagaaaacaaccgagaacgtttcttctaatcacgcgggtaatagtagtagttgtaacaacaacaacaagttgtcgaatcagaagttaattgacgtgttggagatggacgtgaagatacttgggtgggacgcgatgataaggatccattgcagcaagaagaaccaccccggggcgaggttgttgacggcattgatggagttggacttggacgtgcaccacgccaacgtaaatttggtcaacgatatgaccatgctacaagcaacggtgaagatgggaagtaggttttacacgcaggagcagcttcgtgcggctctggcggctaaggttggggatgcacgatgatgttggctctgcactttgcggcagcgtttgagattatgtgtgtgtttgtgtcgtgttattagctagctagctctttgtaagttgtgctgctctgggatattttaagccttcccggtagctgtttctgtaaaattataagctttttttctttattgggtagcttagtattgaattttgaggtaatcaaattgggaagctccatggagtagtagaactagctagggacacttttcatcaaatctgtgggtggagtggagatagcagcagctatatgtggaaataggggtaattttatctgttttagattgtgtatatattataataatatcataaatgtgaacagcatcatgcaagttctcaatattattattaataaaaaaaaaagacgatgcagttagagagttctattcaaacccctggttcgagtactttaaccgaaacccctagttctattcacgcgattccgcagaaccagagcgtgttctccagagaattgaacttctctgagtacgggttcgacccaaagagtgggaacaatcagaatcaccattctctgaagccggaatccggcgagattctcagcttcggcgagagcaggagaacctcctacggcggcgtcaatgggaatactaataccaataccaattccaattcccattttttctccggccagtcaccgtttgttgctgctgtggatgaaaacaagaagaataacatgagcaacaacgggaagaaaaggtcaccgaattcgcgtggcagcaacgacgatggaatgctttctttcacctccggcgtgattattccggccacgaatttgaagtccggcggaggcggcgattccgaccactcggatctggaggcttcggtggtgaaggacccggtggtggagccggagaagcgcccgctcta

SEQ ID NO: 50460 - DNA, 1566 bp, Glycine max
  Clone ID: PAT_MRT3847_16576C.1
cggaaggaccgcccaccctcgatggatattttactgtcgtggagttattgcgtcagacccagggaatatcgtatcctctgtgaaaaggccgtgtttataatatagctccatacgtgaagttttaccctggaggtgttaatatgttgttgaaggcagtgggaaaagattggacataagtctacagtaggtgctggatgggggtttgtttcaattcgatttcttctcttctctgcagaaaatcgaatcaatcgatggatgctttaatttcgtgtggttattgaggaaatttcatatccgcaagggcagagagtagaaggaagaagagagaaagagggaagctgctgctgaatcgtaatcgatcttatatctacactctaccatggacattgatgatgatttcacattttgtcaggtcagtgcacctgttgatgttgaaacaaacaagcttgcttcagatatagctgatatttccattaaagaagaatcttcaaatgcatctaatactgctcaggataatgctttacccaatcagaaggaggctaccgttggttctttgtctttcactgtaactagcacagcttctagtcggccaaatgaatccaccacaaaattagtaccaactcaggctaacatttcgtctctaaagtcaccggcacagaagaattccgttaagaagccaacggttcgggccaaagttccttttgagaaaggctacagtcaaatggactggctcaagctcaccacatgcaaacacatcctgaccttgcaggtttgaaagggcagtcaaacaagagacttatttctatggatgaagttagacaaaattagtaccaactcaggctaacatttcgtctctaaagtcaccggcacagaagaattccgttaagaagccaacggttcgggccaaagttccttttgagaaaggctacagtcaaatggactggctcaagctcacccaaacacatcctgaccttgcaggtctgaaagggcagtcaaacaagagacttatttctatggatgaagttagaaaacaccagacagagggccaaatgtggactgtattaaaaggccgtgtttataatatatctccatacatgaagtttcaccctggaggtgttgatatgttgatgaaggcggtgggaaaagattgcacatctttattcaataaataccatgcttgggttaatgctgaattcttattggaaaaatgctttgtgggtaccttagatgaaggtcagtgaagatttcattctaataatgcataaacacatgaagatggcttggctccaatccgttatacctcttcatgggccctctctatttactgaccaggggccatcaagcaaggaggaataaattctgtaggtatacacgtttctgtttaaagatctcaatgggagtttgttctacaattatggatgagtacagttatcttgtaaactagaaatttggattaacaatgtaacaattctctgtgtgatgcattgccatttcatttttttgggtgaaaaaaaaacaaataatttagataaaggatactgtagcctaaaaaaaaatacacggata

SEQ ID NO: 50461 - DNA, 554 bp, Glycine max
  unsure (1)..(554): unsure at all n locations
  Clone ID: PAT_MRT3847_16578C.1
ccagatcataatccntagnnaaatccnnctttgaaaacntcaaacagtgggataaaggggannagaagtttactgggagaattctggctggctcatnntgggatgtnnctttcgaagacaaagatggtgccccaagctctttagaaataccctccaaaagaacactccggatgaaattttctttatactaagtggaatggccttgaaaaaagatgggttccatccaattttctgggattcaaagcctttttttttctttaaaaataaccccccaagaatgagacttttgggggaggggggtttaaaatttggaaccccggggatttttttggagaaaaaaaatttttgggggaaaaagttgtggaacaatttccctcttgggggggggccccacaccccccaaaaaagaggacccccccccaggggggggtgggaacatctgggggaaaatgaaagaatttttgggcccccccccaaaaaaaatttcccccccgggggggttcccccccttttttataaaaggggggccgggtgttgctttttttataaaaaaa

SEQ ID NO: 50462 - DNA, 507 bp, Glycine max
  Clone ID: PAT_MRT3847_16579C.1
ggaaggcccaacgggagggagaaaaaaaaaaaacccccccaaaaaactatttgggggttttcaaccatccaaaaagaaaaggacaaaattttccaaacccaaaccccttacttatttaaaaaacgcggccaaggggtaaattccaaaaaaaaaaaaaggggggagctagggggggggggtaaaaaaccaagaatttggagcgggcccttcctaacagggggagcatgaagggggaagggaaaaacgttttggggcggaccccccgggggggggaaaatttggccaagcccctgggcaggcacaaaatggccatgggagaaaaactttttttggggggcttgggggatcttttggaaagggaacttttttttaagccctggcacggggggaaaactctttttcccattccttggggggggggggaaaggcacaaactttttggcccggggagcattggtttttttggcccccgaaaaggggtcaaaagggcccggagggatctgaaaa

SEQ ID NO: 50463 - DNA, 1930 bp, Glycine max
  Clone ID: PAT_MRT3847_1657C.1
aatacacattcacattgttctcttgttcgcagaatattatccaataatgtttatgtatgcaacttcaagtgttgccatgcatgatgaagaaatctttactactattgatttcatctatcacgttaaaattctaaagcaaatataaagtacaaaacaattactacatctttttacaattccagaaatacaccataatatcatggatagtcgtagacaggtacagaaggtcaagatactcaacaaaatcttggtgaggatgaagcacgagcaggattaagcaagacattatgggtaaacaactgtggctcctgaccgttcgtttgcttgcgtaatttggccagttctattacaccccattgcattttctctatgtttagtctcatatctctcctctcttgggagaagctttctctgctggcttcattggacaaaactaattgggaatgcttcatccttggactctcagttactcggtcacttgttgaaatttttggctgttgagaaataagagcttgcattgcaacccttggaggtattctggggtttttggccagatctttacaagcttcaaagctgagtttgctgtaattaagacatctacacagtctcgatctttcctcaaatgtgatagttggatgagactcaagatagatgtcaatggctttgtagaccccatcatagcaatcccttgcagtgtctggcaagcattctgctactccaaggaatttagagatcttgaggttctggtcagggcatatctctctcaaatacgtgtcaattaatctaccaacccttttcactttttgtactccatccaaaccattaatatcaacaaataatctaacgcatcttatcaccaaattaacatcataatacactcccatgtcatgtcatcagactatctctcatactatgtagctgctcaagcattccaccaatcaatttctccaattcagttctgcagtctctactcaacccaaacttagatacaatccttagtacccaaagaagacctctgcaagaaaatatctctttaccaacagatatgaccccataagcagctgtttctgcaagagcagcatactcattgctgttcctgcaattaaccactttgctttgagtagctatatttttcagataatgcaacagaaatcttgtgaggattaagtccttgttatcagttttgtatgctccaatagtctggaagagtttctcaatgatctttggtggtaaagttgccaaatcatcaaaccaccacgccttgcgcggcaaacttgacttgattttttctggggtagttttcttggatgagaaagagaatctctgggcgaaactgctttctggtgaagaagaggacgacgatgctgaaggcgaggaagtgaggaggtttgaatctgaattctggacaaactttgccaagacactaatgatcttctccaagagaccatagccatctgcatatgcataaaacagctggcaactcttgagacttgcaagtatgtcattccatttccagtgatagattctctcaagaaaagtttctgtttgttgcaagagattgttgctgaatgattcctcagtcattccaagataaacagcacaacagtgaaggagagacacattagccacagtgatctggattttggcattgctgtaacaaaaccttgaaactagctcaaacccttctggtcctccagggaaatcattgattctaatccccaactccttcacatgacatcttctcttttggtgattcaatagtttcttcaaccctccacagtattttgatatgaccttctccttcaaaaggaaaatctgctgaccatcaatcttgattaacaagtcacaaggctgcggtttcgctaacttctctttcgatgaaaacaaagaaagaaaaaaagtagtgattttgtttatgcacccccccccc

SEQ ID NO: 50464 - DNA, 1180 bp, Glycine max
  unsure (1)..(1180): unsure at all n locations
  Clone ID: PAT_MRT3847_16580C.1
cataaataccgcggacacacattggatagggggcagagcttgaattgaatcatctcccacacccatcagccatcaccatctccgatgagatgttccttcattaggcctatcgtgggcttttatttgttgggctctaagactttacctacgtgggcttttgttataggcccacagaagccggcccatggtgtaaggtgaaagccgtaattcaactttctcaggggtgggtggatgggtgtttgtttcaattcgatttcttctcttctctgcagaaaatcgaatcaatcgatggatgctttaatttcgtgtggttattgaggaaatttcatatccgcaagggcagagagtagaaggaagaagagagaaagagggaaggtaataacaaatccctcgctagagcctagaactagaattagattctgcctgtgatcatatattatattacgaaattcaattgcagctgctgctgaatcgtaatcgatcttatatctacactctaccatggacattgatgatgatttcacattttgtcaggtaaacatagcattagcaagcatgaaatgccattntgttnttatcttcatatttattntggtaatgatgatgcatgntattggataccatgagtgtatataggtcagtgcacctgttgatgttgaaacaaacaagcttgcttcagatatagctgatatttccattgaagaagaatcttcaaatgcaactaatactactcaggatagtgctttacccaatcagaaggaggctactgttggttctttgtctttcactgtaactagcacagcttctagtcggccaagtgaatcaaccacaaaattagtaccagctcaggctaacaactcgtctctaaagtcaccggcacagaagaattccgttaagaagccaacggttcgggctaaagttccttttgagaaaggctatagtcaaatggactggctcaagctcacccaaacacatcctgaccttgcaggttctcatactcagtttttttactatgcaattgcaatcattatctttgttggctcgtctttcaaaatttcttccaattgcttagagctttgtaagagaaatacatattaaagaattaagagcttctggataagctatccaaactgggtttgtggttgattgttatagttgatacttgatacttgaaaatagc

SEQ ID NO: 50465 - DNA, 972 bp, Glycine max
  Clone ID: PAT_MRT3847_16581C.1
cagatcacagcgatcagataaaggattatgttccaaaatatgcaatgcggtttgtgaccgcagtttccgacgctatttatgagagtgtctctgcagctacgcaccgcatcttacagaagaaaccatattagaaatatggggagccgtacgtgcaaactatttatcagctatctatgcatttttccatacaaacgtttggtataatgtcaatgcatacaatttagtttacatctttatccttcttcgtgttgaacaggaatggagctaccttaggggtggtctaactactcttgatcgtgattatggattgatcaataacattcaccatgacattggaactcatgtcattcatcacctatttcctcaaattccacactatcacttagttgaggctgtgagtgtctctctaatttactatttgttttgaaacaatggatagtgattttacataagatgttgagtttgaatgtttcttttgcttctcttgcagactgaggcagctaagccagtgtttggaaaatattatagagaaccaaagaaatcatctcctcttccttttcaccttattggggaattaataaagagcttcaagactgaccattttgttagtgacaagggggatgttgtgtactatcaaactgactctgagattaatggctcgtccaaatcagagtgaagattaaaattcttttttatatagacaagagagacttatacacaattcttattgctctaaagattgtcttgagtttcttacttagagttgaatccgtcattaataaagggatagatggacggatcatataatttcaattgtaactacatgatataatgtttaggttatatgtagtttatcattcttgaacagtgaatcctctgtataaattgattatattgaagtggtaccttgagtcatgatcaaattgttaatgtatttgatcagaactgaaagacctcgattaaatagtaatt

SEQ ID NO: 50466 - DNA, 1142 bp, Glycine max
  Clone ID: PAT_MRT3847_16582C.1
ccacgcgtccgatcgtttgttcgcaattcaatctccaagtgataagtacaattttctctccccattcactcgcattgacttttgctagttgaagaccttcattggtgtcaaattcagaccaggaggcctaacatggttgctgaactgaatgtgggctcccacagactatgacttgcctcagtttaaaggtttctccgcaagatgcgtactgatgtgcagcctctattaaattccatcatgctgagcagttatttagtttttcaaagaggaagttgggggagggggaactgtgttgttatattttatcattgaatagtaactgagctattatattttatgatttagtactacttttcgtaaactgtaaactttttctcacattgactagatgaaaaatgaacattgtggatcatgactctctttttgacagctcaatttgttgcaaaatatgaagctgtggatgtaattgacttattgatatcaacattgaaagttttgtttcttcctgtgttggttggtgcatttcttaatcaatatttccaatctcttgttaaatttggcatgcagacatggaagaccatgttagtaatatgtatgaggtggtgaatatgccaattgatggggcagcaaataagtctgatgattgtagtgatgcattcaacactacagaggtctttcctttccgagaagctatgttgaattgggctcgagatgttgcaaaagagaatggatttgttcttattattttgagatcagagacatctacaagatccacaaaatatactagatctacaagatgtaatcaaaggaagacatttgtaattatgggttgtgatagaagtggaaaatatagaggaccatacaagaatgcattatcccggaaggtgagtggtactagaaaatgtgagtgtcccttcaagctaaagggaaaagcattgaaaaaggctgaaggatggatttgtacccatgacttaaacattagtgggtcatccatatgctggtcggttgagtgctgaagagaagtcctttggtcgatgctttgacaaagagcatgatgaagcctaaagacattctattgaccattgaaagatcataacatgggtaaccgtcactactatcaagcagatttacaatgcacgaca

SEQ ID NO: 50467 - DNA, 1090 bp, Glycine max
  Clone ID: PAT_MRT3847_16583C.1
gcacgagggtaatccctgcagttgccttgaaaaattgttcagaagcttggacactgtaactcgtatgttaagattcacagcaccttttccacttcttgcatttcctgtgtacctttttagtaggagtcctgggaagactggttctcactttgaccccagcagtgacttgttcgttcccaatgaaagaaaagatgttattacttccacagcttgttgggctgctatgttgggattgcttgttggattggggtttgtaatgggtccaattcaacttcttaagctttatggtgttccctatgttgtaagtttcttcctcttttccatcatttccatggttctttttgaatcaagaatgaatgaagttctcatttgaatttcttggaattgaagatattcgttatgtggttggatttggtgacttatttgcaccatcatggccatgaagacaaattaccttggtaccgtggaaaggtatccttcattctttaaagtctttcttatgaaaaggactggtctatttgtgtcttgacatacttttgttatgtgtatgagtttaattttcatgcattgttagtgtattttttttatattgttaatcaattaaaaatcatcattgatatgacttgtaaaagtcaataaacatatcatacatggttgaatgataatgccaatacatacactatttgctctatgtttattggggtgttaatattttcatattcattgttgaacaggaatggagctacctcaggggtggtctaactactcttgatcgtgattatggatggatcaataacattcaccatgacattggcactcatgtcattcatcacctatttcctcaaattccacactatcacttagttgaggctgtgagtgtctctctagtctactatttgttttgaaacaatggatactgatttacttaagatgttgagtttgaatgttgtttttgcttctcttgcagactgaggctgctaagccagtgtttggaaaatattatagagaaccaaagaatcagcagcacctcttccttttcaccttattggggaaataataggagcttcagactgaccattttgttagtgac

SEQ ID NO: 50468 - DNA, 226 bp, Glycine max
  unsure (1)..(226): unsure at all n locations
  Clone ID: PAT_MRT3847_16584C.1
agaaaaaaaaaaccctagccaacacaaccatcatggccacctctgntatncagcantccagcattcactggtcaaactgctntgaagcagcnccaatgagttcgtncgcaagaccggtggcgccggaaaaggtcgnactaacatgngcngnacccgtcaagagtgatccncaggncattnggnaactcannttaccntccnactccactatttcancttagtggtt

SEQ ID NO: 50469 - DNA, 392 bp, Glycine max
  Clone ID: PAT_MRT3847_16585C.1
gcgcttttactatattttgtttttctctctcacaatttttctgcttgcttctacttcgtgtttgtctgacgcttgctgaaccagtcttgcatagtcagagaaaacaaacgtaagcaagaagaaggagaacttcgccaccgttgtggctgccatggaattcacagctgccaccgctactctcacgaagaagctctccaacggctgtggctacagcgtcaccggaagatctgcgtacgacggtgtcttcgccactcctatcaagctccgcgctccgagcttctcctctcacttcgacgattaccgcgagattttctgcacgtcgtcgcccggttcctcgattccgatccttgaacttccggagctcaaccagaggagaaagaacgacgatgttt

SEQ ID NO: 50470 - DNA, 206 bp, Glycine max
  Clone ID: PAT_MRT3847_16586C.1
gtcgtaatgatgtgtgaagtgtgtgctatttttaacaaacgagagacaaaacaccagatctggcaaagaataactaatcatccactagggaaaagggtcacatcaacaatgacgacattggacgtgtcaactctgggaagtccacccccactggtaacctgatctacgagcgtcgaggtattgacaagcgtctgaattgatacgtt

SEQ ID NO: 50471 - DNA, 502 bp, Glycine max
  unsure (1)..(502): unsure at all n locations
  Clone ID: PAT_MRT3847_16587C.1
gttggacgttggagatgacaaagaagtaaatcttgaaccatttcctaaaaggtgatttcagagactgttcataaagtacattgcttggacctataagttgtttcaccacatagcattgacaattccacatataatactacttttacctttgatttgagttgttttttacatggtagcaccgtgcttgggtgctatttgcactgttgggttggtaatgtccttcaagaagagctccattcgcataattctaactgtctcttttttctggctacaactttactcgctgatgccaggttgctataattatggtttgtaatgataaatgggttctgcattgaccattggctttaccgttttcttggttcacttggctaccatacccatcccggatactgggattagtccagctaggagctttagtgccactgttatacacaacaatagcaaattttgggatgaccatgtacgtaattatgtctctttgaatcttatatctgnctcg

SEQ ID NO: 50472 - DNA, 333 bp, Glycine max
  Clone ID: PAT_MRT3847_16588C.1
aattcggctcgaggttgcttgtgtttgattgtgttgaattgtgttgttgcttgcattggatgcagttggtaggatggtgaagtgtgagaagtggattcgggatgatgaagatcacttggaggggtctaaggcgacgtggtggttgaatagactgatagggcgcacgaagaaagtaactgttgactggccattcccgttttctgaggggaagctttttgttcttactgttagtgctgggctggaggggtatcgtgtttctgttgatgggaggcatgtgacctctttttcttatggcactggttttactcttgaggatgccacccggctttcgtt

SEQ ID NO: 50473 - DNA, 378 bp, Glycine max
  Clone ID: PAT_MRT3847_16589C.1
ggaatcacaaaagagaccttttctttcccataaataaaacaatcgggttcctacaaaaagcatgggctaaaacttttcaattttaaaaaggctttaaaaaaatttttttttttttccctccctttgaacagattacatttctccccctggtctgaacttttcaaaaaaaaaagggacctcatgaaggaatgaccactttatcctttccataaataccctgaacctcccgagtagcagcttggaatgaggctttccatattcaaaagttcttttgggtgaggggagagccagccccattttgaatagcatcaaaaagcatatccgggttagtatttttcagctcttgaacaacagcatagagggtttttccattctcaa

SEQ ID NO: 50474 - DNA, 469 bp, Glycine max
  Clone ID: PAT_MRT3847_1658C.1
ggataaatataaaacagacgtttttttaattaagctcgaaaacaccggggggggaatttcagaccgatacactgaaaacataccaaaatatacatataaagaagtacatattaaaaaaagggggggccccccattttaagctttttcctccccgaaattaatttcgggcccggaccttgaggggtaccaatttttccttttatggagtgttataaaagttgggcgtaataagggaaatagctttttcttggggaaaatggttttccgttcaaatttcaaaaaaaaatccaaccgggaaatttaaatttaaaaatcggggggccctaaggggggggctacttccctttattgggttgggcttaattgccctttttccagtgggaaaacttgcgggcccatttgatttaataaatggcccaccccccggggaggggggttttgctttttggccccccggggggtttttttt

SEQ ID NO: 50475 - DNA, 479 bp, Glycine max
  Clone ID: PAT_MRT3847_16590C.1
atttagattcgatgagaatatcacgactgacgtgagaattggccgattgggttccaaaacgacgtgtcgcataatttccaacagaaaagtgacgctgaagtgcttaatgctctttcattctttcccatctcttctaattccacacacactacacagagccaaccaaagaaagaataaaaagggaaagcgaattccgaagaagcatccatccattcatcagagaaaccgcaaaatggcttcagcgactaagcagcaacaagagggagagaaaccggcgaagcgaaaaccggttttcacgaaagtggatcagctgaaaccgggaaccaacggtcacactctggtggcaaaggtgttgtcctccaacactgtgttgcagaagggacgaccctcttcttcgcacaacattcgtcccactctcatcgccgagtgcctcatcggcgacgacaccggcaccatcatcttcaccgcgcgcaatgaac

SEQ ID NO: 50476 - DNA, 482 bp, Glycine max
  Clone ID: PAT_MRT3847_16591C.1
ctcgtgattcgttctgagtacggctgcgagaagacgacagaagggacaggtcggaccaattgatacgaatagcgctactttattctaagctaaggaactaagaaaagctaattgtggtaattgttctcttcttttcttatttcctctattccttatttatagattttcttacaaaatatcctataatttgttataacaaaattgtgaatattgtcactaatggtaatgataataaaacgtgcaaaatgcttgggttggcatccgttgaatagcaaaatgcttgtgttggtatccgctgaattgttatcagacaccttaacgacatcactctttcatcaacgagtactatgtgcttgcatttaatcaatctttctttgcgtcagtattcttgtgttctagcatgttaaaatagaaaatccaaaatttatatataccgagatagaggattaaagcttgatctaacacaaatacttttatataac

SEQ ID NO: 50477 - DNA, 367 bp, Glycine max
  Clone ID: PAT_MRT3847_16592C.1
gctgatgtgcctaccatagcacagattgaagagctccattcgatgcagaggctgatgaatgctcctgatttaactgataatactgatctactgttgagcattgagttgttggggttacatggatcaggtaatgctttaacaaacaagatacgaccttaatgataagcttgagtcggcttacacacaagaattttttgatggaaattatgcaggggattgttgggtaccaatttttgataattgtctttatcctagacgttacttacctctagaggcgtgttgatgaaatgggtcacatgcgcaaggacttgaggggtaacccctactgattggacaggttctgatatgacgatccctcctcagatat

SEQ ID NO: 50478 - DNA, 397 bp, Glycine max
  Clone ID: PAT_MRT3847_16593C.1
tagtaacggcgagccactctgctggactgctgccttaagaccacagaaggggacaaccacttgcatcattaaagggataagccgtaatctggcaaccaaacacaaccaaaatacgctactcgttaagggctgcactataccagaatgtctcacggaagaggctgcgcatatatgcctaatgtggtcactggggtgtcacaactgtgcctaacgtaacgcgcttacgcaacatcttacttctctggacgacctgtaggatggaccattaacactaatgcttgacccaatggaaaaagactttgagctggtgatatcctaatcataaactatgactaaacgacctacaatgatgcagctgaagacagaaattgaaacaacagctagaagacaacaacat

SEQ ID NO: 50479 - DNA, 1448 bp, Glycine max
  Clone ID: PAT_MRT3847_16594C.1
aagagaataagtgctcccaatttaattctttttactaacaataatgtgtttcacgtagagagtgtagggggaagacgtgtgggagctcgagagagaaatgaacaagaaagagattgaaaagtggattggaggagatgagagtgcctcggagatgctgagtagagtgagcagcatgcgacctttcttgtttcctccgccgctccacagggttcctctccgcgtcggaaacgtcgtcgagcttgtggggccctctccttccgccaaaacgcacattctcatccacgccgccatcacttccgttctccccaaatgctacggaggcctcgaccacttggtcctctttctcgacctcgattgtcgcttcgacattgcgcgcttctcccaattgctcattcatcgcattacccaacacggaacggattcttatgataaaacgctgtatgctctctgtatggcccgttttttgtacgtccgttgttacgacagctttgaatttcttcacactctcaggacattgcattgtcgcttagagaaggagaaagaagttcacggagttggtgtccacctgctcatgattgacagcatcggagcttttcattggatggatcgtgcatcgatgttcttgtctcaaagagaaaacagcaaaaaaaaaacttttccttcagactgtgtcagaagctgtagttcagaatattaaaaaacttttcaggtgcaccctatgcttattatagctacaaagtcagtgatttttgggaatagatattctacagcttcaaatgaggtcaaagggaatatggaggaaggattttcaaaaaatgtgacaagaaaccatcaaaattacctgtatcgtgaatacatgccttctgtctggcagtcctttgttacacacagaatacttgtacgttcttcagatgagcatcctgttacaaccaataatcaaaactcctcattctatttgttggaatggttattgccaagattgagttttccggataagattgtagtgaaagatgctggtgtctttgtcgattcatgaagcacttgttgcaaagggatctctgtatgtgatccattatccttctttcagttgacgtaaaggtaaggaaaaaaggttggattggaaggatgaagtgcatcctatgtttggtagcacatttgcaaaagaaaggaaagaattgtggtgatagaattgtcgcaagccccaccattttcttacgcccttttggaaggaaatgattatatatttacatagattccattcatttatatgtattttcattatatcaatcaaagcctaacaaatttagaatgcaaggacagccaggtgaattatcattcccaacatactgaaaggtagtgggccatggtagagtgcaaactgcatagctagaaattcaggtcgccgtctgttttactgtctagtttaattgattgctatgatttgatgt

SEQ ID NO: 50480 - DNA, 1042 bp, Glycine max
  Clone ID: PAT_MRT3847_16595C.1
tagtagagagtgtagggggaagacgtgtgggagcgtgagaagagaaatgaacaagactgaaaagtggattgagggagacgagagtggcgcggagatgctgagtagagtgagcagcgtgcgacctttcctgtttcctccgccgctccacagggttcctcttcgcgtcggaaacgtcctcgagcttgtggggccctctccctccgccaaaacgcacattctcatccacgccgccatcacttccgttctccccaaacgccacggaggcctcgaccacttggtcctctttctcgaccttgattcccgcttcgatgtcacgcgcttctcccaattgctcattcaccgcattaccctacacggaacggattcttatgataaaaccctctatgatctctgcatggcccgttttttgtatgtccgttgttacgacagctttgaatttcttcacactctcaggacattgcattgtcgcttagagaaggagaaagaagttcacggagttggtgtccacctcctcatgattgacagcatcggagcttttcattggatggatcgtgcatcgatgttcttgtctcaaagagaaaacagcaagaatatggaggaaggatgttcaaaaaatgtggcaagaaaccatcaaaatttccagtatcgtgaatacatgccttctgtctggcagtcctttgttacacacagaatacttgtacgatcttcaggtttggactccattgccactggttacaattgccaattgtttttgtcaccagccatgatttcagcatattcttgactttcagatgagcatcctgttacaaccaattatcaaaactcttcattctatttgttggaatggttattgccaagattgagttttccggataagattgtagtgaaagatgctggtgtctttgttgattcatgaagcacttgttgcaaagggatgcctatatgtaatccattatccttctttcagtgatgggtaactaaattattgtgtcttgtctcttctgaactttctaaatatacgcttgtcagtatcattattact

SEQ ID NO: 50481 - DNA, 289 bp, Glycine max
  Clone ID: PAT_MRT3847_16596C.1
gaaacaaaagggactaaagaaaattaaggttgtaagagtgtaagacaggacatacacagctggttttttataataggccggtcaactgaataaaccaacaatcaaacaacatttgggtgttaagaatgcctaaaacaggccactgatgaaataaggaggtctttcttcaattctattttcaaccttgggtgtggccaatgatgaaataatgggtttttttttgagaacaattttcaagcttgtgacacacccgagtgaacaaaatggtactggttgggaaaaaccattt

SEQ ID NO: 50482 - DNA, 375 bp, Glycine max
  Clone ID: PAT_MRT3847_16597C.1
acccacgcaaacagccacgcgaccgtgacggagcgggggaatggcagcacaaagaggtttgtttccctccccaaaaaattggcgcacctttcgtttttttttcgtgatgttagtcggtagaagctggtgacggagaattagagagattatccaatccagtatccattgattccgagatctagcttcactctgcgaaacgatcaccgtgtcatctcgatctatctatcgccttcaaatctgtaacttttttttttttttcgtttcgcaagatctacagagtcatcttcccaacaaacaatcatgcgttctgatttgccaaacaatgtctcacagaaacgattataataattagtcgtccttacccattagctcgta

SEQ ID NO: 50483 - DNA, 634 bp, Glycine max
  unsure (1)..(634): unsure at all n locations
  Clone ID: PAT_MRT3847_16598C.1
accacgcgtccatacaggctgccaaaaaaacaacaaaaggggggattggcagcacaaaaaggtttgtttccctccccaaaaaattgccgcacctttcgtttttttttcgtgatgttagtcggtataagctggtgacggagaattagagagattatccaatccagtatccattgatcccgagatctagcttcactctgcgaaacgatcaccgtgtcatctccatctatctatcgctttcaaatctgtaagtttttttttttttttcgtttcgcaagatctacagattcatcttcccaacaaacaaccattctttctgatctgccaaacaatgtctcacagaaaggataataataattattcttccttacccattagctcgtatctagaattgcagcctcaaaatgattcctcaaaatccttacaaaggcccacttttgacgaatccgaggtgtatttgggatccaaggtcgatgacgacgacgatgacgatttggaaatcgacatcgataattatccccttattgttatggggcccaatcacggttctgggatacctgnggctgttttcaatttaacaaccactgttatcggggcagggattatggccctccctgccactatgaaagttctaggt

SEQ ID NO: 50484 - DNA, 265 bp, Glycine max
  Clone ID: PAT_MRT3847_16599C.1
ccaacggggccgattcttatggtggggaatttttactgagtttgacggttgcgaaccaacacacctcaggggcatatattggcgtttcttagaagtacatttatcagcaatttggtaccgaccggagttgatctgaattgcctcctctcgcaggctgaagatcttgtgattgggtgcctagtgacgatatcgatctgcatttttgagcatggatctgccgtcttagtatatagaatgctagcaccaatcccctttaattgggttg

SEQ ID NO: 50485 - DNA, 422 bp, Glycine max
  Clone ID: PAT_MRT3847_1659C.1
gggcggggaaagcccgttttggaaaaacccaaatttagtatttccctttcctttttaaaaggactttcatcccaaaaggccttgtctcttccttcggggcccaaaaaattaaaaaaacaagggccttgaacttggcctggggaagggggcccctttatctgcaataaaaaacaggaggccgattttcactctaaaagttcatcaccctgggggtggggacccgggaacttgccttgccttgcctggcctcaaccaaaagtttttaaatcaacatggggatggggctttccatttataattccggcctaaacttgggaataagtttccaatgggcctggttcctgacccccataaggggatgacctgaccttttgaagtttttaaggggtgggggcccccccttggggcccaggggccgtggc

SEQ ID NO: 50486 - DNA, 486 bp, Glycine max
  Clone ID: PAT_MRT3847_165C.1
gcttgaacactcagcgtgtgagtgtgtgtgtgtacaagtgtgcctcgtacaaactaaggataccttatcatcgcttcgcaccaaaaactactacttggatactacgaccatcgccatctgtgatactgtgatatttcgtctgcttcgagcggcggatacgtacactagagtacaaaagaaaaagactttaccgtggaggcacagtacctactaaattgttgccaccacgatgacgccaaacccaaagcagggaggagtaatatgagaagtgtatttgttgccacaacaccaacctgctcctcaacataggccaacatcacttccatcaagatctctcaattacagaagtgagaaggaaaggttggaatcatttgctggcttcccatccaatgcaatggatgtgaggcaagcttgctgctgccggtttctggtttaccaagagtgaggacataatgcgttgtgcattttgcaacgttgaagtgggac

SEQ ID NO: 50487 - DNA, 483 bp, Glycine max
  Clone ID: PAT_MRT3847_16600C.1
gaattcggcaccaggagaactagagtgaagcatacaaggtgttttcgtctttgtgatactagtgaattgcgcatactctgcccagttctcagtttcaagcatggatccggaggctgcacgaactgctcgagaatctctagacctagcattccatatgtccaatattcttgatacgggtctaagaaatgggaaaccctcattgttgtcatcatctcttgcgtcggcttcttcttctttgccataataaatggattttttttattagatgccattctgtccatgcttgcttaagttctctaatccatcttttttgtctgttcttgatgttgttctttgaattgctttgcttgttcttttgtatgagcttcatttgatgtacagtggcattgttttagtacaaaaattgatgtgttgcaattaggacctcctatttgaaggcttatctttgagagtaaattttcagttagcgcaaaaaaaaaaaaa

SEQ ID NO: 50488 - DNA, 565 bp, Glycine max
  unsure (1)..(565): unsure at all n locations
  Clone ID: PAT_MRT3847_16601C.1
ttgacgcgcttgctgggatggaaatanattccactgcttgcaatcttattctgaacataagctcggaattcggccagttatgtctgttgcagagacaagagtcctgtttgtagagaattattctttgcatgagctgcttagcctcattgaagattttcttattgagggaaaagtaatagtaaacaatagagtatatgctgaaactttgtcttgtgatttgagagttaatgattttctggattgtgttaatcaagtatcatccgatgtagcttcaagtgaacaattggcggcagcaagtattatattagcatcagtatgtgctgcaactgattatgttggatttatttgtgatgcttcatatcatattcttcagtcatgcaagtgggattctctgatggtgctgactattctccatatttttgcttatttgggcggagagaagttttttaacatggataattttggattaatggtgaccgttttgaagtctctagttatgtttcttgaggatgagagcccatctgttgcatctgcctggcttccttcaataaatcagctgcatgct

SEQ ID NO: 50489 - DNA, 527 bp, Glycine max
  Clone ID: PAT_MRT3847_16602C.1
cggctgcgagaaacgacagttggttggttagcagttgaatctcctggtttctggttttgtgatctcttctgaggttgttgttgtggcatggcgtacaggagaaggcaaggtatatccaagtcttccaccttcaaggaagaatttcatgatccatcattggaagatgacaatgcttctccttcaatcttctcatcttcttcaacaccaccaccatcatctctcgctgctcaagccatcaaagctgctgcttctcgtcgtgaaccttctctttcctttgcttttgcccccgccgagtttgaccatcaaagatccaagagctttggggcttatggaaatggcaactccaagtctggtggtttctggggtgtgattgcgcagaaagccaaatcaattctggatgatgataagccaaccccacaacatgacaccatgcctcaaacccaaacgctcaagtcacactcatttaataccttatcagattcttctgcagttcataactccccttcacaattcaagcctggatatga

SEQ ID NO: 50490 - DNA, 373 bp, Glycine max
  Clone ID: PAT_MRT3847_16603C.1
cggccgggccgggacagctgcatcactccgcagctgctcgacgccgtcgcgttcggcgagaccatctacatggtgatcggcttcatcctgctcggcctgtcgttcggccagtcctcgggcgcgatcgcctcgaacttcaagcaggcgtatcgctacacggcctcggcgctgacctctgacatggcctggctgttcggcgccggcttcgcgccgctggtcgcgctgttgcttgccaccaatctcggcgtcatcgcctcgggtgcgtatctgctctcgggcgcgttctggacgctgctcgcgctctggctcagcggccagcgcgaggcgggcgacatggacgcgggcgcttagtcaagcgcggagcttgtagggt

SEQ ID NO: 50491 - DNA, 576 bp, Glycine max
  unsure (1)..(576): unsure at all n locations
  Clone ID: PAT_MRT3847_16604C.1
gagagagatgactgcctctgcgtctgggccgccaagttgggcccaccgaggcagccaacgctgagagagaggacgtggctcgagtttttggtcagagctggtgttgttagagaagatgtcaaaccgaacgacggcgttttcgtagatctgtctcgcgttgggaataataatagtgatttgggattggggtttcaccacatgaacaaggttgctgctgctgctgctaccggtttgatgggtaaccggttgaacgatgatccgcttgtgggtcttctgtcttctgcttacttgcctttgaatgttaatggggtgggagcatcgaatcagctgccacagatgctgagtccactgcatcagcgatcgacagcagcttcagcatccgcagctgcatcaactgcagcggcacccgcagatatgtcctaagcagagtacgatgacttttgcagctgctccgatgcctcagggaatggtgaggggtggggttgtggggcttggtggtggtgtcctgtgtggcagtgggcgggggggtggggtgggtggttgggggggtcgggcaccggagtacgtgtangtact

SEQ ID NO: 50492 - DNA, 589 bp, Glycine max
  Clone ID: PAT_MRT3847_16605C.1
gttgcaataattttttttaccgtttctagattttgattataaaaaccttactgtgaggaggagttttgtgtattcttacgattaatatatgtcattagttgttaaaacgcgggttgttgagtgtaatttacctgctacttggtagaatgattctatttcagcaaaaaaaaaaaaaaaaaaaaaaaaaaaaaaaaaaaaaaaaaaaaaaaaaaaaaaaaaaaaaaaaaaaaaaaaaaaaaagggggggcccccccccgggggcttcttcaccccggaatttattccgggccgggcccttgagggcttccaagtttcccttttggggggcgttttaaagcttgggggaattctgggcaatgcttttttcttggggaaatttgttttccgttaccattcccccccaccttccaacccgaagccttaagggtaaaacctggggggccctatggggggacttaccttaatttattgggttgggcctccttgcccttttccaattgggaaacctggcgggcccgcgttctttatgaaatgggcaaccccccgggggagggcggttgcgcttttgggccccgggggggtttttttt

SEQ ID NO: 50493 - DNA, 869 bp, Glycine max
  Clone ID: PAT_MRT3847_16606C.1
cggaaaacccggtcgacccacgcgtccgatttattactaacacggacgcgtgggcggacgcgtgggcggacgcgtgggaaaaaacaaaacactgggcctggggaccccgctcactctcaaggtacttcccactgttcccattttatgcccgtactaatctgacccttttagtggcatagattgaggtacaattacaaaagcatattacccgtatcatatcctttctgctgcaaacccccccccccccaaacacactgcgttatttttttcaacaacttctcttctcttgtactactagctagatagatactaaagcttttctatttatttatttatttcccggcactgagttgagttaatttttgtgtcatagtctcaattagctggatgtgacttgtgtggttagggtttacatgcagaaacgcatgtgcttcgtgtctaattcatcctcagacaaggttttgggacagagatctgaattttattaagtagaaaagaaagtatctatctatctatctatctatctatctagaaaggttttgagaagaaaaaaaaaatcaaagatggcgaatcgatggtggactgggaatgtgggaatgataagagagcaagagttgatggagaacagcaacaacaacaacgctactactacaccgacgaatagcagcaacagcaacactaatgcgaacacaaacacgaccgaggaagaggtgagcagggacaacggagaggacctgcagaaccaaaacctcggaagccacgaaggctcggagccaggaagcagcggtcggaggccacgtggcaggccacctgggtccaagaacaagcccaagccgcccatagtcataaccaaggaaagtcccaacgca

SEQ ID NO: 50494 - DNA, 2076 bp, Glycine max
  Clone ID: PAT_MRT3847_16607C.1
cccacgcgtccgtccacgcgtccggtaggtgacacaacaccaacaagtggatggagctctgtttgcttgggaagttgaaaactttgaacacagtacaagaaccgcttaccagggaaacaacccaataccacttccaccattaacaatacacagataacccatttattgctaacatcattatctttccgtccattaaaacgggatggtaaaaaacaaaacactgggcctgggggccccgcgtccgcactctcaaggtacttccccactgatccgattttatgcccgtactagtctgacccttttagtggcatagattgaggtacaattacaaaagcatattacccgtatcgtatcctttctgctacaaccaccccgaaacacactgcgttttttttgtgtcaaacttcaaccggggctttcttacttctcttctcttcaactttttagtgttttttttttttttttctcgtgtcgggtccttgagcttctatttgtttatttatttccggcagcgagttgagttaattttcgtgtcatagtctcaattaggtggatgtgacttgtgtggttagggtttacatgcaaaaacgcatgtgcttcgtgtctaattcatcctgaaacaaggttttgggacagagatctgaatatttcaagctatctattttgtttctctatctagaaggttttgagaaatcaaagatggcgaatagatggtgggctgggaatgtgggaatgataagagagcaagagttgatggaaaacagcaacaacaacaacaacaacaacaacgctactactactacaccgacgaatagcagcaacagcaacactaacgcgaacaccaacaccaacacgaccgaggaagaggtgagcagggataacggagaggaccagaaccaaaacctcggcagccacgaagggtcggagcccggaagcagcggtcggaggccacgtggcaggccagcggggtccaagaacaagcccaagccgcccatagtcataactaaggaaagccccaacgcgctccgaagccacgtcctggaaatcgcctccggcagcgatgtcgccgagagcatcgccgccttcgccaaccgccgccaccgtggcgtgtcggtcctcagcgggagtggcattgtagccaacgtcactctccgccagcccgccgcccccgccggcgtcataaccctccacgggaggttcgagatactctccctctcgggtgcctttttgccgtccccctcgccgtccggcgccaccggactgaccgtctacctagccggcgggcaggggcaggttgtcggcggcaacgtggcgggctctctcgtcgcctccggaccggtgatggtgatcgccgccactttcgctaatgccacttatgagaggttgcctctggaggatgatcaaggtgaggaggaaatgcaagtgcagcagcagcagcagcagcagcaacagcagcagcagcagcagcagcaacaacaatctcaaggtttgggggaacaggtttcaatgcctatgtataatttgcctcctaatttgctacacaatggtcagaacatgcctcatgatgtgttctggggagctccacctcgccctcctccttccttctgatcacccttgccaatatgatcatgtctttaatctctcactgacttgcgaattaagtactatgttaattaatttctcacggtttttcttgcaagcatagctagctagctagcaaggttagttattaggatggttttgttaatttgtgcttcttagagactcgagtcaagtagatgatgttcttatctttaatatactttgtagtactactggtttgttttggttcgttttgttaatttgtgcttcttagagactcgagtcaagtagatgatgttattatctttaagatactactttgtagtagtagtactactggtttgtttatttgttgttggttttacttctgtctaatcaagctgcttgttttggtggaaaagtttaattatgattgtgtgtagggataattaataaggatggagtttgaaatggtccggggaataaaattggagctgtgtgctggaatttgaaccc

SEQ ID NO: 50495 - DNA, 223 bp, Glycine max
  Clone ID: PAT_MRT3847_16608C.1
ggaaagacttgatgaagaagagggagagcgtgtgtagtggtaatgggtgacattagacgaagctctcggatggagtacgaggctctttcactgcgccaatctggatccttgatggcattgtcattcgatggtgaatgacggtgttagatcaatgcgtacaatgttgtgtggaatttcgatgtcctcaactaggagtagatggccgcacttgaccgtgtaggcg

SEQ ID NO: 50496 - DNA, 106 bp, Glycine max
  Clone ID: PAT_MRT3847_16609C.1
taaccataagcggggtttgtgtttatgggctcatatccttgcttttctcacggtttctccgctctttatggggcttcctatctctcttaggtcccatttacaacag

SEQ ID NO: 50497 - DNA, 419 bp, Glycine max
  Clone ID: PAT_MRT3847_1660C.1
aatatgtgcctgatttaatcgctgagatcagtgcggagatctgggagttggatatggactacagaccctacaacggtgacgacactgcagcagaccttccaccaacccattacaagggaagatgcagacgaggaggtggacatggcacagctaatgggagatcagctgctgacccaaggacgtaccgaaagatggatggggagaccgatatggagacccaagagcatgaagttgaccgagaagcattcagagcagttctaggagacgccgaagctcaagccggtgacaaagctagggagaaagcaaggctgattacagagctgagaaaggaactgggagtgcacaaagaggagctcagacaacttataggtggagatgatgctcatgaggtgatgcagaggataaaggcatggagacag

SEQ ID NO: 50498 - DNA, 509 bp, Glycine max
  unsure (1)..(509): unsure at all n locations
  Clone ID: PAT_MRT3847_16610C.1
aatcaatcatttacatgagaagcancgagccaaataattaatgaaaccagtaattcaaancttaataaaacttgtaattcaaaaatgcatccactaatatttttcagcatacaaactgtagagaattaacacaaaatttagtcctcgtgtatcctcaatgtagatacagattaggaaaaagtgtccctgccgattgcacatttggttattatgaagaatcaattgctgctgtttccaacattagtctcttggacttttgtaacatgcatatggattccccagtaccagcataactttaggataagtaacatcaagcaagcatgaatggtaactggggaatccatatgcatgttacttatcctaaagttatgctggtactgttgtttctttttcagatgtctccccaagcgtaaaccgaacaaaacggcgcactttaatgttctctccgagtgcagctacagtttgcttcaccaagtctttcactaaaacactgtcatccttaataaaag

SEQ ID NO: 50499 - DNA, 4010 bp, Glycine max
  Clone ID: PAT_MRT3847_16611C.1
aactgactttgttggtagaggtgagaaattcaaggagttggtttcacagttcacttcgattggaacgccaatgcgtgaatcgtgaatgtatgaaccaattctgcctgctgctcgccacactgctgcgactcaaggagaaagagcaacgactgcaggtatttcgccagaaattcagcgtactgtcacgcaagtggtagccgttcttgttctccctaactttctgggtgtgtctgtgtgcgcgttttggccttttgaagcttccgaggtggcaaagatgaactgatcccaaaatatataactcaagttttacaattcaagccaacatgaatcctgtaataccatgctctattggcaatgtttcaattattcctgtattcatctattcaacaaggatgagtaacactttaacaagattcaacttagtaaggttcctggagaagatcggtctaccataaatccaataattgaagaagttactcagtcagatctcacaatcgatttgaaaactgacacacctgttgaaatagaaaataaatacagaataaagatcttttgtcaaaaccagagcagataagatcaaagattgttgaagggcggataagaaaaagacttgaggagctggcattgctcgagcagtcctacattaaggatgataaggtagcagtaaaggacttcatcaagcaaactattgcaactattggagaaaatattaaagttaagaggtttgtgcggttcaaccttggagagggtttagagaagaaaagccaggattttgctgctgaagtagcagcacaaactgcagcaaaaccagcacctatgccagcgaaagagcaacctgctgttccagaagccaaggagaccgagccaaagcaatcaacagtagcagtctcagcctcattggttaagcaactgagggaagaaactggagcagggatgatggactgtaagaaagctctagctgaaactggaggggaccttgaaaaggctcaagagtacctcagaaaaaagggtctctcaaccgctgacaaaaaatccagcaggctagcagctgaaggcagaattggttcatacattcacgattcacgcatcggcgttctaattgaagtgaactgtgaaactgactttgttggtagaggtgagaaattcaaggagttggtcgatgatcttgcaatgcaagttgtggcctgcccacaggtgcagtttgcaggtcgagaagatcttccgctacgctttgtgacgaaagaaaaattaatgtacgagttttgcgtatgacctgcttacaagtaacattgacttttaagaaggaggaagatactgcaggattggactcaacatttaatctgggggtttgtcaatgatgcaacaaacccttttgttgtttattttcgttagaattaagataatgcttcttttttggatgatatagagaattctcacactgaggttaaaaaaccatccactgctagtactttggaagaaattaagggaactgtcaatcaaggggaaactgtattggatgttcctgacgtgcagggggaaccagaaagcagcaagttgacagatgatgttccttctgctgaagatgatatttctgaaaatgtgggaaccagtgcaactaatggctcgtcaacagctattgtggatgatgaaagtaacctagtcagcaatgtttctagcccaaagacaggtatagatagtgccattgagaaggaagaagaggtagcttttggaagtttaattcctgaagaggatctatctactgtaaatccaataattgaggaagctactcagacagatgtcacaacaatcgatttgaaaactgacgcacctgttgaaatagctaatgaaaatgtaatagaaactggagttgatcaaattgttgcagaagatgagaaacaatcacaaactcctaatgcaatggaagagtttgcagctgcagtactaacagacagtgatgtggtcgaacctagccctgataaaaatgatgcaattacagaatcagatattacatcgagtgcaccagctccccaagaaagtgcaggtgatgatgttggagctattactgagaacattgacagcgatactagtttgagtggacaaagtgacgagttgtctcctgagggaagcttgactacagatgcaacagaagaaactgatcaggttccttctcctgaaagttctgccactgaagtagtaaaaacctccattgatgatcctgaagaagaagcacaaaaacaaactccggctacagagaatgaaaattcttttacctcacaagttgaagacaaagaggttgcaattgcatctgataaaaatagcagtttatctaattctgatggacaaactggtgctacttcaggagaaagcttgagtaaagcaactatatcaccagcacttgtgaagcaacttcgggaagaaacaggagctggaatgatggactgcaaaaatgcactatcagagaccggtggggacattattaaagcacaagagtaccttaggaagaaaggcttatcaagtgcagacaagaaagcaagcagggtaactgctgaaggaaggatcggttcttacatccatgacagcaggataggtgttttggtagaagtaaactgtgagacagattttgtctcacgaggtgaaatttttaaagagcttgtcgatgatatagccatgcaagtggctgcatgccctcaagtagagtttcttgttactgaagatgttcccgaggaaattgtgaacaaagaaaaagagatagaaatgcagaaagaagatcttttgtcaaaaccagagcagataagatcaaagattgttgaagggcggataagaaaaagacttgaggagctggcattgcttgagcagtcctacattaaggatgataaggtagcagtaaaggacttcgtcaagcaaactattgcaactattggagaaaatattaaagttaagaggtttgtgcggttcaaccttggagaaggtttagagaagaaaagccaggattttgctgctgaagtagcggcacaaactgcagcaaaaccagcacctatactggtgaaagaggagcctgctgttgcagatgcagaagccaaggagaccgagccaaagcaaataacagttgcagtctcagcctcattggttaagcaactgagggaagaaactggagcagggatgatggactgtaagaaagctctagctgaaactggaggggacctggaaaaggcccaagaatacctcagaaattatgttctctcatctgctgacaaaaaatccagcaggctagcagccgaaggcagaattggttcatacattcacgattcacgcattggcgttctaattgaagtgaactgtgaaactgactttgttggtagcggggagaaattcaaggagttggttgatgatcttgcaatgcaagttgtagcctgcccacaggtgcagtttgtatccattgaagatattccagagactattgtgaacaaagaaaaggaacttgaaatgcagagagaggacctgctttcgaaaccagagaacatcagagaaaaaattgttgagggaaggatctcaaagaggcttggggagcttgctcttctagagcagccttttattaaggatgacagtgttttagtgaaagacttggtgaagcaaactgtagctgcactcggagagaacattaaagtgcgccgttttgttcggtttacgcttggggagacatctgaaaaagaaacaacagtaccagcataactttaggataagtaacatcaagcaagcatgaatggtaactggggaatccatatgcatgttacaaaagtccaagagactaatgttggaaacagcagcaattgattcttcataataaccaaatgtgcaatcggcagggacactttttcctaatctgtatctacattgaggatacacgaggactaaattttgtgttaattctctacagtttgtatgctgaaaaatattagtggatgcatttttgaattacaagttttattaagttttgaattactggtttcatt

SEQ ID NO: 50500 - DNA, 1252 bp, Glycine max
  Clone ID: PAT_MRT3847_16612C.1
ttgcttctagtcggcggtcgcccttttttttggttttttttttttttttttttttttttttttgccttccatcaattatttcaactataccatgcagttttaaatcaaccatttacatgagaagtaacgagtcaataattaatgaaaccagtaattcaaaacttaataaaacttgtaattcaaaaatgcatccactaatatttttcagcatacaaactgtagagaattaacacaaaatttagtcctcgtgtatcctcaatgtagatacagattaggaaaaagtgtccctgccgattgcacaattggttatgaaaattcaattgctgtttccaacattagtctcttgcatatatgcttttggaacatgcatatgaattccccagtaccagcataactttaggataagtaccatcatcaagcttgaatggtaactggggaatccatatgcatgttacttatgtcctaaagacttatgctggaaatatcagcaattgattcttcataataaacaaatgtgcaatcggcagggacactttttccaagtctgtatctacattgaggctacacgaggtctaaattttgtgttaattctctacagtttgttggctgcaaaatattagtctatgcattttgaatcccaactttcctgagttactgttgtttctttttcagatgtctccccaagcgtaaaccgaacaaaacggcgcactttaatgttctctccaagtgcagctacagtttgcttaaccaagtctttcactaaaacactgtcatccttaataaaaggctgctctagaagagcaagctccccgagcctctttaagatcctgccctcgacaattttttctctaatgttctctggttttgaaagcaggtcctctctctgcatttcaagttccttttctttgttcacaatagtctctggaatatcttcaatggatacaaactgcacctgtgggcaggctacaacttgcattgcaagatcatcaaccaactccttgaatttctcacctctaccaacaaagtcagtttcacagttcacttcaattagaacgccaatgcgtgaatcgtgaatgtatgaaccaattctgccttcggctgctagcctgctggattttttgtcagcagatgagagacccttttttctgaggtattcttgggccttttccaggtcccctccagtttcagctagagctttcttacagtccatcatccctgctccagtttcttccctcagttgcttaaccaatga

SEQ ID NO: 50501 - DNA, 114 bp, Glycine max
  Clone ID: PAT_MRT3847_16613C.1
gggtcgatcaatcggcgcgccagagtcaacaaaaggggatctccatctcagggtcgtatcatccacatttcatcaccagttcatacaccctgcatcgcgtgtacaaacacgtgg

SEQ ID NO: 50502 - DNA, 935 bp, Glycine max
  Clone ID: PAT_MRT3847_16614C.1
caactgatccaccatgtctttacataactttaacttatatttaaaaggatacaaagtacagagggaaagatagaggaacaagggttttagggcatggtctagtgcttataaataccctgcattagccactacatttcacaaactgaggcttgaaaacacaaaagaaaaaaaatgggttcttctctgtggacctgtctgattttgttatcacttgcttctgcttccttcgccgccaacccaagagcaccaattgatgtgccatttggcagaaactatgtgcctacctgggcctttgatcacatcaaatacctcaatggtggttctgagattcagcttcatcttgataaatacacaggtactggcttccaatcaaaagggtcctacttgtttggtcacttcagcatgtacataaaattggttgctggtgattcagctggcacagtcactgctttctatttatcatccacaaactcggaacatgatgaaatagactttgagttcttgggaaacagaaccgggcaaccttacattttgcaaacaaatgttttcacaggaggcaagggtgacagagagcaaagaatctatctctggtttgatcccacaaaagaataccacagatactccattctctggaacttgtatcagattgtgtaagcacacttcactcaaactctcgcataccctttttcattttttcaccatttgttggaaatcccagtcatatagctaaatattatgtatataattggagggcaagcacattctaagatgggttagttttatttatttatttaagttcaacctaaatctaaattttaaaatggcatcaaaatctttacttattatatatagatgttcaggcttacaaattttaaattttatggtaaaaatgttcattccttcaccattcactaccaatttgattaaaataattc

SEQ ID NO: 50503 - DNA, 946 bp, Glycine max
  Clone ID: PAT_MRT3847_16615C.1
agtttcctcaatctactttttcctcaacatctcagagttcctctgctttcatctctaatccctcattcatcacaacacaagtcacaatacaacaatgctagatccagccactgaattggtgccaccaccatcttcacccacaatttcttccatttcctcttctgatcttgacactgagtccaccggatcattcttccatgacagaagcaccacattggggacactaatgggagtgaacttccccaccattgcattcagagtcccatcgcagcatcggaaccctaattccgccgccgaggccgccagcggagcaaggaggactgccgccgcaaccaagaagaagaaaaaggctaattccgccgcaacgacggcggagagacggcggaggtggtggcagctctgccgcgacggcgacgccaggccggcgtctctcggcgagtttctggaggtggagcggcggttcggcgacggcgcgttctacggaacggcggcggagctcgaggggatggtcgccggcaaccagcagaggaacggcagcagggtgctcttctccgacgggagggttcttccgccgcaggcagacgtagacgacggagcaccgccgccggagagcctctgtaatcggtttccggtgtcgcttgccggaatttgcagcggcggtgcggcgtagtgttgtcataataagggttttcaatttttatttatgaaagttttattttttggttttatggaaaatttttatattaatttttgggggttgtttggttgttacctaattggaagattaggattctttttgtccgtggtttacgtgcaaaacgcaagctttgccctttgcctttttccttttgggctttttactttttctccttttgttcttcttcttttgataattatgcttatggtggtccacataataattatatatcattcatattataaatac

SEQ ID NO: 50504 - DNA, 280 bp, Glycine max
  Clone ID: PAT_MRT3847_16616C.1
gagaaacatactattatacccttttttcactttttttcccaccccgcagcacattgcggggggggttcttacacacaggggggcctacaaaacattccttatcaacttgatgatgaagaaagactggacaaattttgaaatgatgatctctgtactgttatgaaacaaatccctccaacccttaagttaactctaactgcttcaaatactattttcaatcatcaaaatatatgagaaaagactccttactgaatctgactttatcaccccccacataaaa

SEQ ID NO: 50505 - DNA, 439 bp, Glycine max
  Clone ID: PAT_MRT3847_16617C.1
ggctcgaggttgaaacacaaagaagaaaaaatgggttcctctttgtggacttgtctgattttgttatcacttgcttctgcttccttcgccgccaacccaagaacaccaattgatgtgccatttggcagaaactatgtgcctacttgggcctttgatcacatcaaatacctcaatggtggttctgagattcagcttcatcttgataagtacactggtactggcttccaatccaaaggatcctacctgtttggtcacttcagcatgtacataaaattggttcctggtgattcagctggcacagtcactgctttctatttatcatccacaaactcagaacatgatgaaatagactttgagttcttgggaaacagaaccgggcaaccttacattttgcaaactaaatgtgttcactgggtggcagtgatgacagagaacaaag

SEQ ID NO: 50506 - DNA, 1977 bp, Glycine max
  Clone ID: PAT_MRT3847_16618C.1
agggtaaactcataagtgaatgcaactattattaactttctaaggttaaaggcctgcactctgcatgacatttatatgctgagagcacagcaaaatgccccactgatcacataaaaatatccgttaaatttgatgaaaatacagtaaaaataaaaaggactaattaatacaagaaaacaaagtgataatgatagcgcagttttgagttctacaagcaaattttaagcagaaaatgctgctcagtcagaggagagacctatatgagatttgatcacaaggagtagagtaggacacgtccccttgtttctcagagtttccataataattacgaatgaacgacaccaatcttcttagcaaaatcatccccatcttcttcttccatgtaatcttcctcttgattttcaccctcttcaccttgctcgtactcatagtatccctcatcaccttcaccttgttcatactcatagtccgcatctctctgatcatctacttcataatactgatcctcacctggatgcaaaaccaccattccctccactgatttacccttatttgattcttcccatgcctcagtgaattaaagccttgattatagtttcccacattaatttgggcttgtagattttaaaaacaaaaaaatccacttcataaaaagtaatctggggctggtttcttagcaggggttccacatgatgcctggggaacagctttttactaccggaactgtttatttcactttcaaataaactccatgattgcttctgagatgcagcttcatcttcacgagggaaacagaaccgggcaaccttatatttcccattaactcaaagtctatttcatcatgttctgagtttgtggatgataaatagaaagcagtgactgtgccagctgaatcaccagcaactcagaacatgatgaaatagactttgagttcttgggaaacagaaccgggcaaccttatattttgcaaacaaatgtgttcaccggtggcaagggtgacagagaacaaagaatctacctctggtttgaccctacaagagaatatcacagatactcagtgctatggaacatgtaccagattgttttctatgtggatgactacccaataagggtgttcaagaacagcaatgacttgggagtgaagttcccatttaaccaaccaatgaagatatacaacagtttgtggaatgctgatgactgggccacaaggggtggtttggagaaaacagattggtccaaagcccccttcatagcctcctacaagggcttccacattgatggttgtgaggcctcagtgaatgccaagttctgtgacacacaaggcaagaggtggtgggatcaacctgagtttcgtgatcttgatgctgctcagtggcaaaaactctcctgggttcgccagaaatacaccatctacaactactgtgctgaccgcaaacgctaccctcaagtctctccagagtgtgctagagaccgtgatatttaatttgaataacgtgatattaatgcgaagtatctatcagttttactgagtattatcacctctcagccatagaacctaccaagacatataatttaatataagcttccatctcctatttttattaccactaccataaagttcccatctacttaatttcatgaaggccgcacctaagtgctgatacaaaattcaatttggggttattgcttgtattgttgataatttatgtcatcatctattgctgttgttatggtatgtataccagtttgaggtatgtaacaaaagatatggcaatgtgccttaatttgtatctgtaatactatctcattctcaatcaaaatataccactgttacactagcatcccctgtcatccctgtctaggtgatcagcgccaccatttgttggaagtattattctccctcggaagcggttaccgaggaacgctctcattcagaggtaactcaagtgaatccttccgagagaagggcctcgagcc

SEQ ID NO: 50507 - DNA, 342 bp, Glycine max
  Clone ID: PAT_MRT3847_16619C.1
cccgaaatgcagcaagctttattttagcatacagtgatccgaatccaattgagcgaattcaaacttaagggaaaaaaaaacaccactatgttgtacatattagtggtgtctgcaggaacataaaaaatgaaagttatcaagagatgatgcacagctttaattaatttcccaatcactagcacttcaaccccgcgaggtttttgttgatcatctctctcaggacaaagctatccacagatgtttgggtttgtacgttgtattttagggatgaaattttcttcaattcaaggacttgagaattggaaggggtttgttaatggcaactgggcccgttttttaaat

SEQ ID NO: 50508 - DNA, 398 bp, Glycine max
  Clone ID: PAT_MRT3847_1661C.1
aaaaggggccaaagaataaccctttaacttatttgggttgtgaccccaatccctttttttaagaaacccccccgccacccttaaaatctttaagaaaccttacctaccccagggagttcgggggattccacttggaatggaaacaccttcattcatttctcccttgcccaatattgacaggggaaaaaaagtgtggaaaaagtgttttttcctatttgccccccgaaacccggactctatttaacaaatttaaagttttttaaaattgggtgcggggcctaattccttttggggtttcccaaaaaaaaaagcccctgatttggtcgttccaggaagccttccaagcacactgatgaatgggaactgggcaacattttttttccttccaagggaaactt

SEQ ID NO: 50509 - DNA, 271 bp, Glycine max
  Clone ID: PAT_MRT3847_16620C.1
ctcgagcgattcggctcgagcccaatcagctccactttttccattccatccatacattgtcaccaccacattaaacgcagaacacaaccacccccactctaacaactgccaccgtcagccgcagcacgccgccacattactccggcaacaggtcaaccatctctctctttctccttacattgtagtccctactccctagtgttaccttaccaagccattgctttatcttttcatgttttcttatctcattttagtagtccctccctagtgc

SEQ ID NO: 50510 - DNA, 412 bp, Glycine max
  unsure (1)..(412): unsure at all n locations
  Clone ID: PAT_MRT3847_16621C.1
ctacaaatagcttcttccaacgttgaatattcaattcatgcatctgaaaaagaaaagccttccatagcagcctaagaaatgaagagctctaccttgttcgctctctttctactttctgccatcttcacctcatacctaccttctgcaaccgctgatgtcgtgctcgacacnggatggtggtgttcttcaaaatggtggccaatattctgtgttgccggtcatgagaggaagtggtggtggactagtagtacgtgcaactggaaatgaaagatgccctctcactgttgcgcatactcgcaatgagctcgataaggggattggaacaattatgtcatactcattacgagtcgctgttatcgccgaaggccatcctttgagcatttcgttcggttgttgtccagatatgccggct

SEQ ID NO: 50511 - DNA, 335 bp, Glycine max
  Clone ID: PAT_MRT3847_16622C.1
ggctcgagaacaccgtgaccacctcccctcctataatcaccggcctccaaccacacaaaaagaaccttttaacgtctgcaacaaggagaacactcatgtggaggcagatcgtgaacgttaccatcactacccagctatgcatacatctgagctcctaccgcacagagcgcaccttcggacgcgaagggcaagggccgacactctagacctccgcacgagaagcatactccttcagtacattaattaatctaacggaggcggtacagaccaccccgcatgcactgttgtgaaaatatagaacccactgatggttgaagacagtgagaagcccaatc

SEQ ID NO: 50512 - DNA, 272 bp, Glycine max
  Clone ID: PAT_MRT3847_16623C.1
cgaatcgagcggtgtttgcggctgtggattacgaacgagcgaccttcttcgtttctcgcaaagtttaagtcatcatgggtaaggaaaagactcacatcaaaattgtcgtcattgggcatgtcgactctgggaagtcaactacaaatggtcatttgatctaaaggctttgaggtattgaaaagcgtttgattgagaggttcgagaaagaggctgctgagatgaacaagaggtcattcaagtatgcctgggtgcttgacaagctcaaggctgag

SEQ ID NO: 50513 - DNA, 271 bp, Glycine max
  Clone ID: PAT_MRT3847_16624C.1
gtctgcttgttcttgtttgatttgttgattattactcgaggagacaaatcatataggaagagggttttgggatgaggggagcgccaggggacatgcgcgagatcccgtgtggctcactattggaacataagctgaaatgagattgagtattaaattaatggtttggatagaagtatgatacttgatagaacattatggcggcagttgatccatgtaaccgaccccacctagtgggataatgcgttgttgttgttgttgttgtatatgtaac

SEQ ID NO: 50514 - DNA, 488 bp, Glycine max
  Clone ID: PAT_MRT3847_16625C.1
tccaaggaagcgtttcccgatcgatcacgtgatatggacgctcgctcgctatgctttggggggggggagggcggcggcggcgggagggcgggggtggggggggtggggggggggggggggggggggggagagaaagtgtttttagggccgtttgggagcaagctcaataaaggaaaagagggtatgggggaggtaataccatatgggccgggaccatataaggaaattcaaaataaggagcaaatgaaagtcaaagggaaaatgttcaagtaattggaagaccccttttaggaccccattgaaaaaaacaaagtagtggggctaaataagattagggttatgccgcctactattcccgtaagttactttattgggggtatgggtaaaccgtagtggcggtggggaattgggggggccagtaaataaatattttttataaggcctcaaaataccccgcgcccctgtcatttcaaggttccctggatcga

SEQ ID NO: 50515 - DNA, 222 bp, Glycine max
  Clone ID: PAT_MRT3847_16626C.1
cctcgagccgattcggctcgagggggagcgaagatgggcctcttcacccagaagaggtggtacgactgttttagggaaagtaccagttccaaaacctatcaacttacccagtcagaggttagaaaatcatggttgaacccaaatgtggagattgttcccaagggtacactcagctggggtagtagatcttcatcttctacatctaatgcatgggggtcttct

SEQ ID NO: 50516 - DNA, 818 bp, Glycine max
  unsure (1)..(818): unsure at all n locations
  Clone ID: PAT_MRT3847_16627C.1
cgcctcgcaggtaccccggtccggtaattacccgggntcgactccatcgccgtccggtaattatttcgtttctaatcgaaattgtgaactgtagccatagctgcaaccatcataagcctatttccggccacaacgattttcagattctcagntcctgacanctgctctctcgcttacgagccttctctagcacagcgatgccattcctgcatgtctctcctanttctcttgtttgttcaagttcctgggctctgcttgcgaactcactctgccatgctgtgccgctccacactcaagaaagagagagctatatccagntgatcagagtcctagaagccacttatctnngtggcagatgaaatgaagtgcaggtanntgttctcttagtggtttaagacacaagctttttagttttgcttttagcaaccccaacnncgtatatnntgattctgcattttcttagttcatgcccctttgacnnagaatttanntatgcactgagaaggcaactagacatnnctcactaacncnntatctggtctcttcttatttgnnaaaaagtaagaaaaatggagaaccacaatnngcataccattnnttcttgagggaaattaccncgtttaagcggctttgggaaattttcttctttggaccnnnctctctgtctaatgtcttttccttaccctcannattgtttgaaatttcataactggatnntagtttgggccgcatttttacttatttaaattgggtgggcatcccatgttttctaaatggtttttttattttcttaaatttttcccccaattttttgtatc

SEQ ID NO: 50517 - DNA, 307 bp, Glycine max
  unsure (1)..(307): unsure at all n locations
  Clone ID: PAT_MRT3847_16628C.1
agtcgntgcacgcgtacgtaagctcggaattcggctcgaggtcanncntntctcataagtagananctgcnggatngntntatacttnnctnnnntgacnccgacatngncannntgtaatngnatgctccngngnanntgccncgntgtnangntcgnnnaggnagaaatccgtgcnncntnangcatatncncntaaccnnnanggtgnnnacnggtgnaagtncnngggntngnatgagacgcaacgngcaatnctgatnatnccgtcntccnggantagangcatatcncacgggncgatggt

SEQ ID NO: 50518 - DNA, 233 bp, Glycine max
  Clone ID: PAT_MRT3847_16629C.1
ttgcgagaaagttttattgatatattaagatgcggtagacgaggtaaccgagtttgttcattcacctttactaatcctagcacattcaggcgcacgaccgaagaccctgcaatctacaaagggtttagccataaaatcgaaatacgtggtcgatctaaaatatccatgctgacattcctgagcattcgacgatgttactcttatatcgtgtctcctagacctaattcagatga

SEQ ID NO: 50519 - DNA, 1479 bp, Glycine max
  Clone ID: PAT_MRT3847_1662C.1
atggagcaagaaatggaaaagagaaatgtagtcagaattgaagaaaatgaagagaaatgggtgcatgatgcatctgtggattataaaggcagagttcctctccgtgcttccactggtgtatggaaagcctccctctttgtcctcaggattaagcctgctgactatgtctcaattcatcccaagtttaaaaccatgcaacaatggggtatgccatcggccaaggaagctgatcaatttgatgatgatcacttggaagaaaggaagaagaaaatgtctttttttaattggtggaatttcgctatgtgctttgcattgctgcttggtgcaacagtggttgtttatgttcaagactttgttagctggggagttgctactcttattgtcactattcttatgactctcactgtcatagctttctgtatgggaaaacgtttttacaggtacaggaggacagaaggaaaccctttaacaccaattttacaggtcttaattgcggcaatgaggaaaaggaatctatcttgtcgttcaaaccctgctttgttgcatgaggtcccagagtcagagaggtctcaaggaaggcttctgagccacactaacaggctcaggtttcttgacaaggctgcaataattgaagagaaacgtatcgaacagaagtacaatccatggagattagcaacagtgacaagagtggaggaaacaaaacttgttctaaatataattcccatatggctaacttcattaacagttggagtaaccgtgggacaaggacagacactctttgtcaaacaagcagccgctaccaacttaaagataagccacagtttcaaaatcccaccagcttccatggcctctgttacagcagttggtaccttaatagctgtcccaatatatgataggattactgttccaattatgaggaaattcactggcaatgaaagaggcatcagcatccttaggaggatcagcattggcatggcattatctgtcatagtcatggttgttgctgccttagtagaaggaaagagactaagaatggctacacatgaagtcctcactgtaggggaaactaggcatgagactatgagtgtggtgtggttgataccccaatacttgattcttggcgttggagattcattttctctagttggcttgcaagagtatttctatagccaagttcctgactcgatgagaagcttaggaatggctttgtatcttagtgtgcttggagtaggattcttcttaagcagctttctaatcatcattgtggaccgtgtcacggggaaaactggcaatagttggattgggaaggacataaattcaagtcgtttggataggttttattggatgttggctgtgattaatgctttggttttgtgtgtctttctcttggtgataaaaaggtacacttataaggccgttcagagaagagctattgaaactgattgttgcaagagtgatggggtggagatggtagcttga

SEQ ID NO: 50520 - DNA, 252 bp, Glycine max
  unsure (1)..(252): unsure at all n locations
  Clone ID: PAT_MRT3847_16630C.1
gcccagtgttcctcttcttgttgcctcctcttttaagaacaaacacaacaagaagaaagaagagggtatttctgcagcancancaccatcanccaccgaatgtgctctttctcctttctcaccccaacaaacaacaaccaccaccagcctctgtngccanatatttaacaacaattactacaacttgactaaacaaaantgtttttcttnttttcttttntttttaccatggaactggctttgagtttggga

SEQ ID NO: 50521 - DNA, 574 bp, Glycine max
  unsure (1)..(574): unsure at all n locations
  Clone ID: PAT_MRT3847_16631C.1
acataaaaacaccggtctttatcttaaacatcgagtttcaaatccctcaaaagtacaatagagcgtgtaccttggaaaggaaggaaattaagttaatctaaatcaccttagaggcataacaggtggagccagagaattcccactttaagtaacagtatttatgcgatgaagtatgtgctacgatatgttctttaattgtacacagatttaacataatcttcctaaggttgtgcctgaaacaaaggagaacagaaggcttcaacatagaagaccagcaaataaaacaccagacaagaaaatgcgaaaatcaagagactaggtatccattaaagaaatgcagtgcatatatatctctaaaagcattgtcatgaaattctctgaaaagcagaaacatttataatttaattttgtctataaaactcaaaactaaatatcttgtacgttgaaattaatccttttatgtnttggtagctattcaaatttgnaaatcattttttagttaaaaacttgttcaaaaaaatccaaaacaaaaatttgaaactactacgtaattattttaaatctaaagtttcca

SEQ ID NO: 50522 - DNA, 254 bp, Glycine max
  Clone ID: PAT_MRT3847_16632C.1
gagaatacaggtatagcattggccgatgctatggctagttcgtttagggggcgcgccaggtctgatatgtagaccagctgctctcaagactgtgaatggtggaatcctgcttgcagagcagcaatgacgatagcatttaatccgaacccgtgttctgatgcatggagtttagaatttcttgaagcgtaccggatttcaatgggatatcatttgggtcactgggtggactgccaccccaatgcaagatgttcagg

SEQ ID NO: 50523 - DNA, 1032 bp, Glycine max
  Clone ID: PAT_MRT3847_16633C.1
ctgggaaacctgaacgttgttctcagttttccttataaaacccttgtaagcgcctcctttctctttcgctctctttcgctcgctcggctcctgctgaagcagaagggttcctcactctcttcatctgattgaacaaaatgtacacctcgaggaagaaaattcacaaggataaggatgccgagcccactgaatttgaggagacagttggacagtacttgttcgacttggagaacaccaatcaggatctgaaaagtgacttgaaagatctctacataaaccaagctattcaaatggatgtggctggtaatcgcaaggctgtagtcatctatgtgcctttcagattgaggaaggcattccgcaagattcatcttcgacttgtcagagagttggagaagaagtttagtgggaaggatgttgtcttgattgccacaaggaggatcgtgcgaccgccaaagaaaggctctgctgttcagcgaccccgaacccgcactttgaccgctgtccatgatgccatgctggaggatgttgtgtatcctgcagagattgttggcaaacgggccagatatagaattgatggctcaaaaataatgaaggttttcttggaccccaaggagcgcaacaacactgagtacaagctggagaccttttctggagtttacaggaagcttactggaaaagatgtagtatttgagtatccaatctcagaagcctgagatgctgctgcttggtttaatggagtattgtttttttggcagatttttctgttagaattacatatttatgttaaacaataaccaaaattttgacttctggaattttatttgatgcttcttcaccttgatgacattaaaatcaccaagggagagtattttctgtggctatacttggatttagattggttttcctttaggataaatattgaaccttggctttatttgttacacgagtgttgtgttgtccacagtgcatatttggttggggtttcttttggaaaaataatttgaatcaaacataacggaatttcttgtgccc

SEQ ID NO: 50524 - DNA, 175 bp, Glycine max
  Clone ID: PAT_MRT3847_16634C.1
attcggctcaaggtaatcgtctggctgctaacttctagttcgcaaagcctatcagcaatgattatctatgtaaaatattttcccccctaaaagtgatgaagtttgcaatgttgctaaaaaaatgaaagcactggctagccagtgctttcgtaaaaaaaaaaaaatagaagggtgt

SEQ ID NO: 50525 - DNA, 539 bp, Glycine max
  Clone ID: PAT_MRT3847_16635C.1
gtttagtgggaaggatgttgtcttcattgcccaaggaggatcggtgcgaccacctaagaaaggctctgctgttcagcgaccccgaacccgtactttgaccgccgtccatgatgccatgctggaggatgttgtgtatcctgcagagattgttggcaaacgggtcagatatagaattgatggctcaaaaataatgaaggtttccacgcgtcccaaggagcgcaacaacactgagtacaagctggagactttttctggagtttatagaaagcttactggaaaagatgtagtatttgagtatccaatctcagaagcctgagatgctgcttggtttactggagtatattgtttttggtagatttttctgttagaaatacatattgtgttaaacaatatccaaaattttgacttctggaattttatttgatgcttcttcaccttggatttagattggtttcctgggttaatattgaacgatggctttatttgttgcaaaactgttgtgttgtccacagtgcatgtttggttggggttacttttgc

SEQ ID NO: 50526 - DNA, 332 bp, Glycine max
  Clone ID: PAT_MRT3847_16636C.1
cgccaatggaggagcaagtaggtgacctctgcaaggctcggctaaacccagggctttgaaactggtccagccccataagactgcattggtgccctttttactttgcaagaggaggaaattgaggcttattctggagcatataccaacttctgactgatggacgttggctgaactatattccgaccctatgaaagctgcttcatgaaccttcgtcagtagtgtgatcaggatctatgccccctgtccgttaatgcaatggggctgcagatcctctcctttgtaccaccctaatcggaagtaagtgtttttaagtggatcttatgaaactttac

SEQ ID NO: 50527 - DNA, 248 bp, Glycine max
  unsure (1)..(248): unsure at all n locations
  Clone ID: PAT_MRT3847_16637C.1
cagganttaaaggaagataaagataaatcaatcacctttacagaaaaaaaagaagtaatcaagaaattcccggggacgttttctatacaaaatttggctactttggaaaacccaccctcgagaacggatataaaaatggggggcgggctagtaggctgcggaaccataaggcagattcttccacggattcaaaggttttatttggtggtttatccattttagcattacctcctatgtttttcccctct

SEQ ID NO: 50528 - DNA, 455 bp, Glycine max
  Clone ID: PAT_MRT3847_16638C.1
agttatatcattaaatggacatttccaaaacaaagattaactaaggaacctgaaaacatttaaatgcttgcgcggaaaaaacgcaaccgaggactagccacactaactagaagaaaaagggccaaagcagcacgggggtgttggggcatccgaagaaaaccaaaaacacccccattatgcggaagactatgaccaggaaatgcagactccacattcaaaaagatcatgtgacaagaggccccatgcaccggcaccggggaacaaagggcaagttaagcgcacagttctaaactaatttctctgagcgggggactccgaacgatgcaaacccgaagagacacgtcgtattccactataccgacgactacggagagtaggcctgctaccatggccgccagggggaacagacaaacctcttctaccagaaccacgaccagtatggggctcctccccat

SEQ ID NO: 50529 - DNA, 496 bp, Glycine max
  Clone ID: PAT_MRT3847_16639C.1
ggctcgaggtggcggcggaggaagaggacatgagggtggttttttgtgatgttgcattggggtgcaaggctgggcctgcttctgaggatgttcactccttatgctgtgctcattgcctgcgcacacctttatggctcctctgactaactttgcagtctgctccactacacactccacatcatagctcgtctgcattccctttcccttctcttttcaccccaccttcctgatcctctcttcttctttattctttttctgccggcagcacctaattcgttttcgacttcataattctactacttcttcactcataaaagcagattgaacgacactgaacaaaacggctcttactgcacgacgaggacctccatctttagcagaataaccacagcctcattcaccactggctcaaattccatatctgtcctactggcctactagccctcctacatggcctgaggccataccttttgctttccacattttattgcgatgc

SEQ ID NO: 50530 - DNA, 220 bp, Glycine max
  Clone ID: PAT_MRT3847_1663C.1
caggtgatgagccagcagatggaactcattgaggaaatgaacagtaggcaagagcaattagatgagaggctgagggcgggaccagggaggccacaaagccctcttattgggagacctatcctatataaagcctatagaggggcaggagctgacagctatcagtgagccttaagccatgggtgggtaaggcccagccagagtgagaatctaaaggagaaac

SEQ ID NO: 50531 - DNA, 250 bp, Glycine max
  Clone ID: PAT_MRT3847_16640C.1
ctggcattcggctttgatcgggcactcagagcacgcccacttggcggggcgaaaagcccagcatgagcaaggacgagcaaccgcaagaagaccaccaccacccccctgatggatgatgaggaggcaccgccaccagtgtgcttaacttccattacaccaagctcaacaagcccaggcccgacaggccctacaagagcttcgacgacgaaggaagaaactcccctcgctgcagccggaattccagatgctc

SEQ ID NO: 50532 - DNA, 475 bp, Glycine max
  Clone ID: PAT_MRT3847_16641C.1
aatcagcggatgagttgtggttaggggtgagcattcaagaaaacatttgaaatgaatatatttgggagaaaataagaagtagcacatatcatggaacagaagagagaatctcgtctgagatggtcaagcagggagaagatcaacaaagtttcagaatgagttgatcaaatagacaatagactaataaatatgagtagagctagaccagggaaaattatgagaaactgctgaaaaggcctagatctaaatggattctccgaaaatttggcattttacaggacacaataacatggcttgatccacaaagccaaccctacaaagtaggaaaagacttttgttttgtaagaatttagagaagtgatggctaaaagggaaaaaaaaactgaagctaaaaacaatccaagtattggaatttggaacatcacatgctctttcgattcaaccaatgacttccgtgtcaaagttgagttttatg

SEQ ID NO: 50533 - DNA, 287 bp, Glycine max
  Clone ID: PAT_MRT3847_16642C.1
agcaccggcaccttgagatcaattttttgctccccgtgaaacacaataaatggcggggtttgatgcactggctgctgcacacatccatgtaacatatgctgctgaaatgtgctcattcacaataatgagtttattacaatctatttacttgccatacactatattgagtgtctgttaactcgtacaggtttatacatcactctcatgcatacatggacatgcaaaagtgcactttattgctattgatattgacaattgaaaaaagcttgaagatattgttccatcat

SEQ ID NO: 50534 - DNA, 349 bp, Glycine max
  Clone ID: PAT_MRT3847_16643C.1
actcggtggccggccttcgtccttttttttttttttttttttttccttttttttttgttttcttttaaaaggatggcctctactattataagtaagagctcataaacccaatcacaaatgggctatctgaatttgaggatcgagttctcactttgagtataactagtccctctttaggaaagatcatctcaacaagcacctaacctgttgaactttccaggatcacaccattttgccctgatcctgattacaggcttacatgcccacgcagtgactttccaaagccaagttccaaaggcaactgatttgggaacccaataagccggcaaaggggccctgctgaacctct

SEQ ID NO: 50535 - DNA, 1524 bp, Glycine max
  Clone ID: PAT_MRT3847_16644C.1
acggctgcgagaagacgacagaaggggacccaatattctttactttcttcctccgtcttcttccctttcaaaccctagaaacagcaaaatcccccttttgatgcaaatgggatcactccaccaactctagagccacacccttcaagatttagctcatgcccacttcaattatggctccattttccacttccccccacttcacagccttcaccttcctcatcttgttcctcaaaacacaagcttttgatccactctctttcttttccttcacggattttgagaaagatccaaattttaagtcaagtgtggggctttatggcaatgcaaaagttgtcaataatggttctgaggttcttctttctggtaatggtggtgggagagtcatgtacaagaagcccttcaagcttgttcatggtgaagcaagggaattggtctcattttcaacctactttgggttttcaatgtccttggatagtgagaagaatggcttggcttttgttatggttccaagtggtattgaaggtgaggtttttggcaatagttcatatgggttttcttttggattgaaggaaagggaatttaaggttattggtgttcagtttagtgcttatggtaggaatgggggttctggtagttgtattgtgtccattaatgttggtagttctgttcctgttaaaacaatcaaatgcctcatctgtcattatgggtctaaaaagtgaggggaaattgcatgcttggattgattatgaggcgagttcaaagcgcttagaagttaggttgaatcaatatggtcaatcaaggccagttgatccattgctttggcattcaatggacttatcaaatgtttggggtactgaagagatgtttgcaggctttagcacagtgaaagagaataatacttctcaaacatgctttctctattcatggagctttattgtgaggcattttccacattggatgcattttgagcctctgaatccaaaggtccttgctaagaagactgaaactccagcagtgaaatattataggagtttttgccttttgagggttcttgctgcaatgatatttggtgctggatgtggagctttgacagcattcattgtgctctatttgtggaccatctttggtaataaacgacccgtggtgccagaggagtatgctatgcagcctgtagattttgattacaagaaagtgaacattgttgtagataaaacaaccatcatagatgctaaggagtagatctacagttggatgcttgcattgtaaatcagtgtttcttgtattcaggttttgctttgttgtagtttgataaagaactgttttatttacttatgtcattgtctatttttgagcaaattgagatccagatctaacttgtattgaggattacatggcttacccttttttttttgtttctgaatcatgaccaaatgtccaaatctatgttactattattttattaaaaaaaaaaaaaaaaaaaaaaaaaaaaaaaaaaaaaaaaaaaaaaaaaaaaaaaaaaaaaaa

SEQ ID NO: 50536 - DNA, 765 bp, Glycine max
  Clone ID: PAT_MRT3847_16645C.1
tcgcccacgcgtccgaaaacctcatccatggcttctcttctccgcttcaacggcgtctccctctttcccttaccttcccaacccacacgtgaccccatcctccccaaaccgtcacgcctcgtaacggtgcgcgcggaggtgaaagagacctccgcacccgccgccgccacatcctccgacgaaaagatccgcgaaatcctccgcaaccgtgactacgacaagaaattcgggttcagcgtggagatcgagtccttgacgatcccaaaagggctctcaaaagaaaccattggtctgatctcgtccctgaaggaggagccccactggatgctcgaattccgcctgaaggccttggataaattcctctccatgaaggaacccacgtggtctgacaacacttaccctcccatcgacctccagaatatctgctactactccgcccccaagaataaaccctctcttcaatccctcgacgacgctgaccccgagcttctccgctacttcgagaagctcggcgtccccctcaacgagcagaagcgcctcgccaacgtcgccgtcgacgccgtcctcgacagcgtctcaatcgccacaacgcaccgcaaaaccctagaaaaggccgcgttatattctgctccatctccgaggccattaaggaatatcctgatttggtgaaaaagtatttggggaaagttgtcccgtcagacgacaactactacgccgcgttgaacgctgcggtcttcacgacgggtcgttttgctacattcctaa

SEQ ID NO: 50537 - DNA, 1571 bp, Glycine max
  Clone ID: PAT_MRT3847_16646C.1
cttgaatgaaatgcataggcaaaatcagaggtaaaattgaggatgaataagtgatgcatccaaatcaattaagccaagctcataccattgtttgtgttatcgaaggccaaagcttataatcacttctgtgaccccagttctgtatattttgcaggtacagacttgaagttgggcactaactactggtgtgcattatctacataccatggggtgtttttcttcaaaagtcatagccagatcaatcagcttccatgaagagagaaagaagagatcacagagaaaaactaacggcattccattgctggaagatctaatcatctccactggtggcagtgaccagtaccttgctcttttctgtgcagctaacacagtatccaacaaactgcattctggaagtttaagttctaacacttcctcaaaactggccattgagcctgccagtgccagttctgaaactatcaagaagttgaagctgccatcatcagcaagactaggccaaggagaagggaaacaaattgagagtgataagaacaggtccaaaagttggcaccaatttccagaacacattgtgcagtctcttgctcaggaggctcgagctggttttgaagataaacatgacttgagctccaagggtgctgcgcgtagtaggagctttcacacattgaaggaatatgatgatatggttaaaaaaatatggttggccgaatccctcacagatcagcaaagtgagtttaatgatgaagaagatgctggttcaggagctaatacaactcatcatactgaggatagggattgtgtcatcaagaagatgcaaccaccatgcttaaacaaaaattattcattggaagaaatagaagaaagaaaagtagtgaaggagaccgacaacttgagtacaacatcagaatcagcacagtagctacaactccaagtcctaaaagtcacatatctagttcaggtattaagaatgagggagtggttccaagccataaaacaagcacaattgagaagggaattaagagaaaagctgtggcaaagaggctagaatcacttagaatcccaaccggtgtcgaatatccagcaattgctagtcttagagaatggctccctgcaagtggaatatactctcctgaatcctatgtcaccccaaaatttggcagttattctatcatggacattagaaatgcaaatgaatccagtgaggattctgtatttagtccagagttggtgtctgcctttgaacaatgtatgcaaaaacttgaagcagatgaagaaaacattctgaaacaaattgtagagaatgtggaggaagaaagtgaagcaagcagccccaagaaagaacaccatgcatagaaaatcaaacaactgaaggtgaattttgttaataatggataaatcatagacaaaattgttatttctactccactactctatttttcacatcttcaatgcctgtatgcatgtgaattttcaggtcacaattttttttttaatttgagagtattctgagaagagatgccaatttacatggcagtgaatgtaaatgtactatgcctacatccaatgccttgacc

SEQ ID NO: 50538 - DNA, 193 bp, Glycine max
  Clone ID: PAT_MRT3847_16647C.1
tcgagtgagaacgaagacggtgaagaaattctctttgcaggtgatagaacgtcactactctcgcatgaccctggactttcacacgaacaagaagctttttgaggaagtggcgattattccctccaaaatggcttagaaacaaatctcggggggttttactcacctgattaaacacttatcagaagggcctgtg

SEQ ID NO: 50539 - DNA, 212 bp, Glycine max
  Clone ID: PAT_MRT3847_16648C.1
gaacacgcactctgccgcacggtgtgtgttcctcatctatcagtggcaacacacgcctaatgaaaatggtcatcggcacggctgaacatctatgtctccttatcgtctacacgcatgatcatccgtttgaatcgctgccatttctcatgttcatttccgcatatcaccccttcctggattttctctgcctgccgctggtcttatctgctcaa

SEQ ID NO: 50540 - DNA, 337 bp, Glycine max
  Clone ID: PAT_MRT3847_16649C.1
tcgccaaaacactacaacaggtggcacaagagactttatggatcgagatcactagagccagtgtgaggaaaatgaaggaccttatactttttttttctacaactataataccacagaaatgccatgcgtacaaaatactacctattcgaatgaacactatctatggaccccggactccggaggtgaaatacgcaagatggatgcttgctgtagaagaacacaacatgtttcgctttgaaaccattcccgaaaagtgcgttgaagcaacagacgactacatgcatgaccaacaatatagatcagactccaaaacagtttaccaacatgcttactttta

SEQ ID NO: 50541 - DNA, 1566 bp, Glycine max
  Clone ID: PAT_MRT3847_1664C.1
atggagaagagaaatggaggcagaattgaagaaaataaagagaaatgggtgcatgatgcatctgtggactataaaggaagagttcctctccgtgcttccactgccagcaatcttatctcgtacctgactaaagtgatgcatgaagaccttagtacagcaagcaagaatgtaaactactggtcaggaacaacaacccttatgcctctggttgggggatttgttgctgatgcttacactgtggttttcttgcttgccctttactgcatctcctttggtactggaggatacaaaccatgcttggaaagttttggagctgatcaatttgatgatgatcacttggaagaaaggaagaagaagatgtctttctttaactggtggagctttgcactgtgctttgcgttgctgcttggtgcaacggtggttgtttatgttcaagattttgtcagctggggagtagctactcttatcctagctattcttatggctctcactgtcatagctttctgtgtgggaaaacctttttacaggtacaggagggcagaaggaaaccctttaacaccaattttacaggtcttaattgcagcaataaggaaaaggaatctaacttgtccatcaaatcctgctttattgcatgaggtccctgagtcagagaggtcccaaggaaggcttctgagccacactaacaggctcaggtttcttgacaaggctgcaataattgaagagaaacattttgagcagaagtacaatccatggagattagcaacagtgactagagtggaggaaacaaaacttgttctaaatataattcccatatggctaacttcattaacagttggagtatgcgtgggacaaggacagacactctttgtcaaacaagcagccgctaccaacttaaagataagcgacagtttcaaaatcccaccagcttccatggcctctgttgcagcagttggtaccttaatagctgtcccaatatatgatagggttgttgttccaattctgagaaaagtcactggcaatgaaagaggcatcagcatccttaggaggatcagcattggcatgacattatcagtcttactcatggttgttgccgctttagtagaatcaaagaaactaagaatggctgcacatgaagtcctcacggtaggggaaactaggcatgagactatgagtgtgatgtggttgataccccaatacttgattcttggcattggagattcattttctctggttggcttgcaagagtatttctatgaccaagttcctgactcaatgagaagcataggaatggctttgtatcttagtgtgcttggagtaggatttttcttatgcagctttttaatcatcatcgtggaacatatcacgggtaaaactggcaatagttggattgggaaggacataaattcaagtcgtttggataagttttattggatgttagctgtcataaatgctttggttttgtgtgtctttctcttagtgtcaaaaaggtacacttataaggccgtacagagaagagctatggaaactgattgttgtaagagtgatgaggtagacatggtggcttga

SEQ ID NO: 50542 - DNA, 462 bp, Glycine max
  Clone ID: PAT_MRT3847_16650C.1
aaaaccccaaaaggtcccccagcatttccgaaaaaaggggccccccctcccataaagccccaaaagccccggaacaggggggggcccccgagggggacgcccccccccacggcccgggggaaaaaaaaacacccccaacaccggacccttacgggggaaacccctaataaaaaatttccccccttaaaaccattttttaaagggggccctggcccgaccccccaaaaaattttccccaggggggaaagaaccccacgggcccaagagaaccttccctttttcattccccccccaacattccaaggaacaaaagccccctggggttacctgggggcaaatttgggggcgaggggagagaaaaccccccccccccggggggagggggggatcatgccccccgccccctgaaccctgggaagacaccgccaggaaccaccgggggggggtggggattggcccccc

SEQ ID NO: 50543 - DNA, 323 bp, Glycine max
  Clone ID: PAT_MRT3847_16651C.1
tccaagaaggtttcccgtcatcactgtatgacgtcctccttcgttggggggcgggtgggggggggggggggagtgggggagggggggggggggggggggggaaagaaaatcccctttaggggattggggaggagtttttaaaagggtgcagatatcgtcgcacagaaactcggaaaatcccgtatagggcctaattggctttaagttaacggataaaataaacccaaaaaaatagaagagcccctaattagggaagcgtatagggaaaccaaaataaatggggattataacctcaacggtagtaagggggggaaaaaagattt

SEQ ID NO: 50544 - DNA, 396 bp, Glycine max
  unsure (1)..(396): unsure at all n locations
  Clone ID: PAT_MRT3847_16652C.1
ccnnantttttattttttttttttttcaaannaaaaaaaaaaaacccttgggggccttcgaaagcgtttttatatggccaggaaaaggaaaagcccggactttaaatggaaaacatggccccggaaaaacaatccctggggggggaaaactttcccggcctcgaaagggcaaaaaggggggacctgggtttcaaggctaaggtaaaaaaggtgggaaaaacaaaggcccagctaggggactccgggcttcagggaggggggtaaaactcacccttttatgacgggcctgagggctttccacaactctgctctaacagcctcccaagggttcacctccccatttccattcccaccatgtaccatgcaaaggcccaaaatgttatccggagcctcagc

SEQ ID NO: 50545 - DNA, 232 bp, Glycine max
  unsure (1)..(232): unsure at all n locations
  Clone ID: PAT_MRT3847_16653C.1
gcgagcaaaggcttaagtttctgggcgtggagctgcacctggggggtggtntccatcaatacgggggtgggcaccattcatataacttntattctccctttcatttttacatgtttatgtgacaaataaattcnaacagaaacttattaaatacatttctttattactctttatttatatttctattatcccaatattttttttaataactctaatatttttatcttcactt

SEQ ID NO: 50546 - DNA, 998 bp, Glycine max
  unsure (1)..(998): unsure at all n locations
  Clone ID: PAT_MRT3847_16654C.1
ttttttatttcaaaagatataatttatactatattctaatgattgttcaattttccatgccacgaaaaaaggaacgcagcagataagtaattcagaggtgattacaataccttatggcttttggtgctacctagacgtggtggttaccgccgtcctgaatatatgcatgagggatataaaaaggaaaataaaggccacatgcaaaaaattaaaaaaaatcacgaaaccacttatatatatatatatatatatatatatataaaattacaagtcatcgtcactttcgtcactgtacgaaacaaggccagttagggcaacaacttgggacttatcagcttcgccattcaatgcctgtactggctccaaagacttactcttatcattcacaggagtgtttcctgcttttgaaatttcctcagcatttccttgatccaccttggcttttttagcttgaggcttgacttttataatcatgcctaatgggcgagaggctggattcttctttccagcagacttctgttcctggacgacaggtaatggagttttttcctttacttcatgcacgatgttggactgtgcttccaccgctgcttgaaagcttcggatttgttgggcttcctcatctgccacttgtcgttcatattcccttcttgttgtttcataagtatcaagaaactcagtctcatcttcgtctaaagctttaggaggtctgtgcttgaacctttcattaaattccgcatcttttttatccttattctcctttagaatctcgtagagaggtctatccctctgggcagtgccgtcttcaactcgttcacctcttgtttttttagcttctaccaattggtcttcggagacgaagttcataatcctgataggacgatccgaatcttcatccatggcttcaagttttgcgaactgcgactgaaacttcaattccgaaaagacagaaaagagaaagtagcaaactaagatggtgaagaagcncganncgtggg

SEQ ID NO: 50547 - DNA, 764 bp, Glycine max
  Clone ID: PAT_MRT3847_16655C.1
ggagcggataagtcgaagcgttacttttattacttgaacaggtttttgagtcagaagttgagcaagactgagtttgataagttatgttttcgagttcttgggagggagaatcttccattgcacaaccattttataaagtcaattttgaagaatgcctgtcaagccaagaccccaccaccaatccatccgccagatcccctgaagtctggagaacatgcttcagacatgtctcctggcagggaagatgggcatgaacacagtgttgccagcttccaaaatcaaagtcagaaagcacccgtttggtcaaatgggtttttgccggcatcccctaaggttaggtctggagtacgtgaacggaagctgagagataggccaagccctcttggaccaaatgggaaggttgattctgtttctcaccaaatcatgggtacagaagactgtggtagtaaggttgacatggagaatggaattcgttctccatgtgattaccagagaccaatacagcatcttcaagctgttgctgagctacctgagaatgaaaggggagatgttgttcagaaacctgcagaaaaaccaagaatacacgggaaagggccggctgaaatgtcaattgttgaagacggggaagaagtggatcagttaagtcgcctgggtttctctagaagtcccttgatagcaccacttgggattccttactgctcagcaagtgtaggggggagcccgcaaaacattgccagtgagtagtgctggtgattttgatagct

SEQ ID NO: 50548 - DNA, 379 bp, Glycine max
  Clone ID: PAT_MRT3847_16656C.1
ccttaaaaggcacccccttttactaaataaaaaagttttggtgcgaaaaaagtttgaggaaaaaaaaaagaagacttccaaccggcttttggcaccaaaaggttttgagcttgatgattgggatagtgataacgccctgtagtcaacatgggggtctgtttccacataccaaaacctaatatttgatcaatcccttgatgcttccccggggaatctaattattttttttattatttacaaaagatatatgtacatatattttgttatttccagtctcaaatgatattttagattttcagttatagctcaatacaatgatgatcttaaatttggagaagccttagataaaaaaaaaaaaaaaaaaaaaaaaacaaaaacc

SEQ ID NO: 50549 - DNA, 323 bp, Glycine max
  Clone ID: PAT_MRT3847_16657C.1
gtgtaataaggatttttggtaaggtttttccttggtaagaattctcacttaatttaaatttttaaatgtataattttttttttctaacatgctttctgtcaccaaatgtcctataatttgaagaaaaaaaaaccttgaagttactctttttttttgctccaccaaattgattagacattacaaacgatcgacacatattagaaaacagggcattcgctcctatcccgcgaatacctaggggttcaaaattatcttatccccaagactgacggcaattccctaaattttacttaccaatctgaagtatgcactcaacttaccat

SEQ ID NO: 50550 - DNA, 564 bp, Glycine max
  Clone ID: PAT_MRT3847_16658C.1
gggtgaaatggcttcttcaatgactgaaaattggaaaaatgctgaaactgtctatgaattcgaagctaccgacttggatggtgctccagtgtccatggataaatacaaagacaaggttttgattgtggtaaatgttgctacatactgtggcctaactcgagccaactacgctcaactgaatgacatttacaatgaatacaaggatagaggtcttgaaattgctggatttccttgtaaccaattcggtaatcaagaacctggatgttccgttgacataaaggaatttttgttaaaaaataaagttacatgggatgtttatgataaagttgatgtaaatggaaaagatgctcatcctctctggaaatggctgcagcacaagaaaggaggtttcatcactaacggaatcaaatggaatttcactaaattcttgattgatcgtaaaggaaatccagttaaacgttatgctccaacagatgagcctaagactttcgtcacagatattgaggcggaattggccaaataatcaaacccatactctgtctattagctgcggcttggtcattt

SEQ ID NO: 50551 - DNA, 1891 bp, Glycine max
  Clone ID: PAT_MRT3847_16659C.1
atgaattcccgggtattgtgcgtaagtgcgagagagagaggtggtggaaagctggttaaacattcgcaatcccgacacaccgccaaaaaaccctcgtacccggtttcgatttccaatgggttgcacctgacctaggtttccacctttctcttccttcatatctttgtcccttcttcccattcctcttctcttctcactcccaacaattcctcaattctccctccatcacacgccatgtccaacagggtttgcaagttctatgcccgtggagcatgtttgaagggggatcaatgtgattttgctcatgagaaaaaggatgatatttgcagctattataaaaaaggatcctgtgcttatggtagtagatgcagatataagcatgtcaaagcttctcaagcgtcatcttcagcaaatggacgccattctcctgttttggatcctgttgtgaatcataccattaaaggaacatcaagttgggttccaaaggctgtgaagtcatcttcatcggacaagcgtgcaaggagctcacaacaaaagaatctgccctctcttgaaaatgatgttggtcaatccagtactagtagtgttataccatctgaacatttgttctgtgcatttgctgctgccaactgcccccttgaagataaatgttctcgcattcatggaaatcagtgcttatactgtagaaaattttgcttacatcctactgatcgaaaggaaaaagaaaaccatttgagaacttgtgagaaaaaggaaaaataccttcaggctttgaaagatagtcaagaagtagagtgcaatgtttgtttggaacgtgttctgtccaaacctaaaccagctgattgtaggtttggtctgcttcctgaatgtgaccatgctttctgtttatcctgtatccgcaattggcgtaatagtgccccaacctctggaatggacatcagtaatgctggcactgctaatacagtcagaacctgtcctgtttgtcgcaaactatcatattttgtcattccaagtggtatttggtattctactaaggaagaaaagcaggaaattattgacaactacaaggcaaactgcaaactaattgattgcaagcattttaactttggaaatgggaattgtccatttggggctagttgcttctacaagcatacagtgaagcccggctcttacacatggatacatcacaggccaccacctcaacgtagacagaaccattttgatgtgcatgacatgttgaacatgctccaggatgttgacttaacaagtgcagaatatttttccatcatgagggactcggacctttatgatgatatggatccattcgagatgatggtatctgataggcttgctggtgattcaggtccttgtttaggtccttttgattctgatgaggaggacttggatatttttcagatggctgcattgtcagaagtgctggcttctggtgtggatgattttggtcccgaagatttcggtgatgaagatttcaatcctatggaggctgccttgttatcaatgatgatgcattctaatatggaagatgaagatgacgacgatgatgaagaagaatacagtgatgaagactactagatttacttagttcatataaaacccatctatagaccagttgttgaggtagttatctttggcagtatggtatcctatcactttgctttgaaaagtattgggggcaggaacttcaagatttattctcgtttattttgcttatactcatgcctatacctggtatttgtgatcatatgccattttgtatattttctaatatcacgctattgaaggagttttggcttgagggttttgcttagtcttgtctcactgaattgcatgttttgaattgtgattgcgctatgtataaatatggcttgtt

SEQ ID NO: 50552 - DNA, 3291 bp, Glycine max
  Clone ID: PAT_MRT3847_1665C.1
agagaaatggaggcagaattgaagaaaataaagagaaatgggtgcatgatgcatctgtggactataaaggaagagttcctctccgtgcttccactggtgtatggaaagcctccctctttgtcctcacaattgaatttagtgaaagggtaagctactttgggatagccagcaatcttatctcgtacctgactaaagtgatgcatgaagaccttagtacagcaagcaagaatgtaaactactggtcaggaacaacaacccttatgcctctggttgggggatttgttgctgatgcttacactggtagattttatatggtcctgttttcttcatttgtatacctcatgggattaagcctgttgaccatgtctcaattcatcccaagtctaatgccatgcaacactaagatgtgccaacagcctaggaaggttcataaagtggttttcttgcttgccctttactgcatctcctttggtactggaggatacaaaccatgcttggaaagttttggagctgatcaatttgatgatgatcacttggaagaaaggaagaagaagatgtctttctttaactggtggagctttgcactgtgctttgcgttgctgcttggtgcaacggtggttgtttatgttcaagattttgtcagctggggagtagctactcttatcctagctattcttatggctctcactgtcatagctttctgtgtgggaaaacctttttacaggtacaggagggcagaaggaaaccctttaacaccaattttacaggtcttaattgcagcaataaggaaaaggaatctaacttgtccatcaaatcctgctttattgcatgaggtccctgagtcagagaggtcccaagggtttcttgacaaggctgcaataattgaagagaaacattttgagcagaagtacaatccatggagattagcaacagtgactagagtggaggaaacaaaacttgttctaaatataattcccatatggctaacttcattaacagttggagtatgcgtgggacaaggacagacactctttgtcaaacaagcagccgctaccaacttaaagataagcgacagtttcaaaatcccaccagcttccatggcctctgttgcagcagttggtaccttaatagctgtcccaatatatgatagggttgttgttccaattctgaggaaagtcactggcaatgaaagaggcatcagcatccttaggaggatcagcattggcatgacattatcagtcttactcatggttgttgccgctttagtagaagcaaagagactaagaatggctgcacatgaagtcctcacggtaggggaaactaggcatgagactatgagtgtgatgtggttgataccccaatacttgattcttggcattggagattcattttctctggttggcttgcaagagtatttctatgaccaagttcctgactcaatgagaagcataggaatggctttgtatcttagtgtgcttggagtaggatttttcttatgcagctttttaatcatcatcgtggaacatgtcacgggtaaaactggcaatagttggattgggaaggacataaattcaagtcgtttggataagttttattggatgttagctgtcaagagaaatgtagtcagaattgaagaaaatgaagagaaatgggtgcatgatgcatctgtggattataaaggcagagttcctctccgtgcttccactggtgtatggaaagcctccctctttgtcctcacaattgaacttagtgaaagagtaagctactttgggatagccactaatcttatctcgtacctgactaaagtgatgcatgaagaccttcaaacagcggccaagagtgtaaactactggtcaggaacaacaaccctgatgcctcttgttgggggatttgttgctgatgcctacactggcagattttatatgatactgttttcttcatttgtatacctcatgggattaagcctgctgactatgtctcaattcatcccaagtttaaaaccatgcaacaatggggtatgccatcggccaaggaaggttcatgaagtggttttcttccttgccctttactgcatctcctttggtactggaggatacaaaccatgcttggaaagttttggagctgatcaatttgatgatgatcacttggaagaaaggaagaagaaaatgtctttttttaattggtggaatttcgctatgtgctttgcattgctgcttggtgcaacagtggttgtttatgttcaagactttgttagctggggagttgctactcttattgtcactattcttatgactctcactgtcatagctttctgtatgggaaaacgtttttacaggtacaggaggacagaagggaaccctttaacaccaattttacaggtcttaattgcggcaatgaggaaaaggaatctatcttctaaaagtacatgcgtattaaattaaattaatgcaaatcaattcaatgaataggtttcttgacaaggctgcaataattgaagagaaacgtatcgaacagaagtacaatccatggagattagcaacagtgacaagagtggaggaaacaaaacttgttctaaatataattcccatatggctaacttcattaacagttggagtaaccgtgggacaaggacagacactctttgtcaaacaagcagccgctaccaacttaaagataagccacagtttcaaaatcccaccagcttccatggcctctgttacagcagttggtaccttaatagctgtcccaatatatgataggattactgttccaattatgaggaaattcactggcaatgaaagaggcatcagcatccttaggaggatcagcattggcatggcattatctgtcatagtcatggttgttgctgccttagtagaaggaaagagactaagaatggctacacatgaagtcctcactgtaggggaaactaggcatgagactatgagtgtggtgtggttgataccccaatacttgattcttggcgttggagattcattttctctagttggcttgcaagagtatttctatagccaagttcctgactcgatgagaagcttaggaatggctttgtatcttagtgtgcttggagtaggattcttcttaagcagctttctaatcatcattgtggaccgtgtcacggggaaaactggcaatagttggattgggaaggacataaattcaagtcgtttggataggttttattggatgttggctgtgattaatgctttggttttgtgtgtctttctcttggtgataaaaaggtacacttataagaccgttcagagaaga

SEQ ID NO: 50553 - DNA, 447 bp, Glycine max
  unsure (1)..(447): unsure at all n locations
  Clone ID: PAT_MRT3847_16660C.1
ctccatagaatatacgtccctcttactatcgagaacactacggggctctatcatgccattttcaaaccccatnacgaccagttattttctccaaatcatgcttattaatttcctccaatttttaatcatcaacaaactcccaatatattaatcaccacttgcctcttacattctactatgttaccttcttttatatcagatttactttcacttataccaaatgcacattacttcaatatatcaacatattatctgaaaaatattatagaatatgcaaataataactacttcacttctattataattgttcacaccaatcttatgtaaccatattctcttttaatcataagtctacctgattgtcctactcctcatttcaaactctctaaacttttttttcacaactaaatcaataataattaaattccaaccttcaccaaccccaac

SEQ ID NO: 50554 - DNA, 248 bp, Glycine max
  Clone ID: PAT_MRT3847_16661C.1
ctgaatcttacttacaactacggacgcaaagaccctatgcttcaggggtgtctacgcatccattgtgagggctctcaacagagcgctgttgaaccccaatgcttatggagctggagctatacttttaacctgagcctgttttgtgaccaggttgaagaaggctattggctattggcttcccaacggcatagtgaccagggtgggctgtaccattgttgccgtggagatgtcttacgatcatgattgga

SEQ ID NO: 50555 - DNA, 383 bp, Glycine max
  unsure (1)..(383): unsure at all n locations
  Clone ID: PAT_MRT3847_16662C.1
cggtttctttggttcaaattagaagctaaatattatgtggaattttcaatctcgttattggttaattatctactttaatattcaaattaaacgaaaactccgaagatttcatctcttcacaaaaatattaatccactaacatttgcaaacaaaaatttaccactcttgctcaaaaaaaatnttctttgggctcaaacaacccatatatttggatacttacctaagcagacccaaaaaaatttttaaataccacatcgactgaagacgaaatgacctctaaataatgggtccccccaagaattatatttcctaacctggttttttctttaaaaaataaccttttataaatgggggtttctctatataaaaaccaaaaatggttc

SEQ ID NO: 50556 - DNA, 205 bp, Glycine max
  Clone ID: PAT_MRT3847_16663C.1
aaagtgaagctaaatagacattgtattgagcgtattctgcaatgatttgtcattgctcatagtcgtaccgaaggatgagggtctatacaagctcctcagatatatcagtattaagactattgaaagctacacattagaaatattgtagaaaagatagagggattggctccgtcatggcacagacctcatattgaggcctagagac

SEQ ID NO: 50557 - DNA, 188 bp, Glycine max
  Clone ID: PAT_MRT3847_16664C.1
tcgccttcgcgtgcgctgacgcctatggttgttctctgggaaaacactgtgggcgccgcggcaagacgtttgcttcatggatgcgttgtgggggcgccgggtttatctgcaaaacacttctgacggcgtactgtgtggtgcgtggagtgatgtattctttcatgtgcgactcagcatatacatttctt

SEQ ID NO: 50558 - DNA, 277 bp, Glycine max
  Clone ID: PAT_MRT3847_16665C.1
ggcacttcggtgctggatgatgccccttgctgttctcttcactcttggtcttgcgagagaaagccatgccagatacaaatatttttggcatgctgttaggccaaccactcccattccaagatcattgggagagcatctaaagcctggccctgcaggtgtggaaatagatgatcaccctgtgcaaattgaagaaacacagaacccgagagcctagttctgttaaaaacacgttcatcctgtctaaacagtgaaggtacaaataatacagcctgccttt

SEQ ID NO: 50559 - DNA, 233 bp, Glycine max
  Clone ID: PAT_MRT3847_16666C.1
gcgagagcgactcgtacaggaccaagcatgccacgctcgttgcaacctccttaaggtggacagagaagaatgtgtagaaggtgaaattccatgaccacgaccacgaccacaacacccgtagagggatcctcagcaacgcggttagtaggagtaagtcgcagttcagcaaccacggcctctcccattcccacggccacaacctcgacatgccgaagagcacgtgcttagatagg

SEQ ID NO: 50560 - DNA, 144 bp, Glycine max
  Clone ID: PAT_MRT3847_16667C.1
agggttcgaagagcgcgacaggggggctctatactcatactgaggactggatctgatagccagtcacaacgtctgtggcctctagaatagggtgtatatcattgtcacccccatttcagctactgccagtcttcagggagaaga

SEQ ID NO: 50561 - DNA, 267 bp, Glycine max
  unsure (1)..(267): unsure at all n locations
  Clone ID: PAT_MRT3847_16668C.1
aaaaaaacaaccgacccacgcgaaaggntttaaaaaaaattaataaaaaaactctttcatacaacaaaataactttcctacccgctcgctttattttaaaatcactcccccccccaaaacaaaaaanttaataaaaaaatccttatattacccaacacaatactctacaaccacacccacctttcatcaccattctaaattactaatattcccttaccaatcaccctacctaacaataactcacccaaaaataaaaattttttaaac

SEQ ID NO: 50562 - DNA, 1224 bp, Glycine max
  Clone ID: PAT_MRT3847_16669C.1
cggattcggctcgggtaggccacagtcacacacagcctttgcctttgcctttgctgttcagtgctcccactcccagtccgggccgaggcagaaaatatcggaaactaacctttcacactcacacatccatcgtcatatctgaattggcaactcattattaaatcaattacgaaaacgaagaaacccaacaaaacaatggtagtagcttagctaattgcctaattgaatgaatctcaatggaacctcctctcatcaacgactccacattctcttccgctaacccttccttgtccgagatttggccctctcattttcccacagaccacactcccagtaacaagagacacctctccccctcgactgattgtggcagcaataaacatatcaaatcatcaggatcaggatcccaggatcaaaacggtgccttgaaggcgggtgaagtggacgcgacttcagtagccggtaacaagttacccgaacaaacggcgaaacctagttcttccgagcagccacctaagcaagactatatacacgtgcgagctagaagaggccaagccaccgatagccacagtctcgctgagagagctaggagagaaaagatcagtgagaggatgaaaattcttcaagatatagttcccggctgcaacaaggtaattggtaaagcacttgtgctggatgagataattaattatatccagtcactgcagcatcaggttgagttcctttctatgaagcttgaggcagttaattcgagattgagcatgagccctactattgaatgttttccttcaaaagaagttggcactcagccatttgaccttgccggaataatatttggatcacaaccggccaggggatatgctcaaggatcacagccgggatggctgcatatgcagatagctggtggttttgagaaagcaacataatttaagggaggttcattgggaatgacagatcaatcagtgtggttggttttacattgaaaaggaaaaaagtcacttgggctggttggttagcatggtctgctctattaacaacctagtcaattgatgcaaaatgttgtaaggtctgtatgttctttgtcatagtatgatatcgattgtaagaaatgcatctaatttcctcgcgcatcatctgactgggaatgtagtgctgcactatgttagcaattgaaataatcttattgtggtttagttttcgtattaaaaaaaaacaaaccaaaaa

SEQ ID NO: 50563 - DNA, 427 bp, Glycine max
  Clone ID: PAT_MRT3847_1666C.1
gtttcctttttaaaccgcgagcataggttgccgcaccttatgaccggcatcaaaagcagtcgcaacttgattccaagaatctatcaatgaattcctactttgttgagtacgacttcttagggcactgaaaattactctgtgtgctggccacagacttggtgacaaatttcctgttgcattattagtttatctgctgaacactctgctattggatataggactttgtgttagatttaaacttctactgaaacttcttcagctgtctgcttaatcgcaagttcaagctggagaaagtccgggtgagtgctcccactctcctatctggtctaggacttcgtgggaggactcttccatggcactactttctttaactctctctttcacactgatccgcatagtcgctcaaagaggtccttattgaaaaact

SEQ ID NO: 50564 - DNA, 574 bp, Glycine max
  unsure (1)..(574): unsure at all n locations
  Clone ID: PAT_MRT3847_16670C.1
actagctgtcgatctatcgctaggaactgtgccaggtgcctgtgcactgaatgacctgaccgtagcggggtaaacatttgcagaccgagcagtttcagtcagggctgcgccccacccaacaccataaccgcctaccgctaggtgtagatagggtagggccaccccctacatagccagcttggccccacttagggctagagtgctacagaaaactaagagccatgtagtgctggaccaaggggcactgccacggccgcgtattggggttacacagtcaggccaagccttagccggcgcccacgcaaccccaaacgcagccgttcagagaactccaaccactgggtacggaagtaagaccattatagaaggtacgcgtgcctagcaggcgaggggaactacggaggccgacgtggggtgccggtactggtgcgtaaacggtcggcgggagggcctaagcaagagtgacaagtggcaggcgcaggngcgggggtggtgaaggtgagcgacgcagcngaatggannaaaaaaaaaagaaccctccatcttcatgacgcactgtcgtcatttcccagga

SEQ ID NO: 50565 - DNA, 1261 bp, Glycine max
  Clone ID: PAT_MRT3847_16671C.1
gttttttttttttttttttatctaaatcaatatataatatattgaaattgtgttgttgcatggacgttaagtttatatacttctccaacatatcaaataagatactcttacttaggttgaaagactagtgtggaccttgttcacaacaaaatcccaagggaaaaaaagaaaaagccgagaagtaaatgaacaatgtggatgggtgtgtgtgtgagtggggtagggggataataaattagcagtattcattaagaagttatagccgcatcgtataaacaaactaggattgtttgaaaatgttgatgactttggaaaaggtttatcggaaggcttgctggtcgtcacaacgagtagctcagaaattcactattgccatcacaaaggcactctaccaattaaatccaactgtgaaacaaaaaacaaattcaggaacacacgatttcctcattgcacattattctacttcagccaaataatcatcaatttcggctggtgtcaataccctgaaatttttatcagcaccgattatgccaatttcaatgttttttcctgagatctgtccctcaaacccttccttcagagtcaatattgctgtgtggactgaatcatcaagctccatatcatctgtgtacctcttctcaagaaaagtctttgcattagaaacatttttccccatagcagaagctttccaagaaaaatatgaacctgatggatccacctgatataattgtggtccattatcatcaaatccagcaactagcagtgacactccaaaaggcctaacaccaccagactgagtaaattcctgcattacggcagcaacttccctaacaagttgattgacaggaattggttctttatataaccgatgatactgctcagcttgtttcctgctttttcgaaccaaaactcgaaaatcgggacccatgccactatatacgacacctatatttggtgttaataactgaattttctggactgatgtttcatcaaccaatatagatggcaatttcttctcggtagcaatgacaactccatttgcagcttttattcccaaagacgtttgtccagagccaacggctgtcaaagcatgctcaatctgaacaagctttccagaagggctaaatgtggtgagagaaaacgaatactgactatcccccatgataaaccgcacaagaattggacgaggtttcgaggctgccctggtgactcaaagtggaagtagggactgagtgcaaacctcgagccgattcggctcgag

SEQ ID NO: 50566 - DNA, 1103 bp, Glycine max
  Clone ID: PAT_MRT3847_16672C.1
accaggaaaggaatttgagatcgcagtgcaattatattgcattgaacttaaccggcaatatataaaataataaatttaaggaacaatcatcagagattctaaaaagggaaaaataataattagcaatattcattgagaagtcattgccgcgtcgtctaaacaaactaggtctgtttgaaaatgtttatgactttggaaaaggtttatctgaaggcttgctggtcatcacaacgagtagctcgcaaattcactattgccattacaatgtcactatttaagcctccaattaaacccaactgtgaaacaacttcaggaacacaagatttcttcattgcagattattctacttcagccaaatagtcatcaatttcagctggtgtcaataccctgaactttttatcagcaccaattatgccaatttcaatgttttttcctgagatctgtccctcaaacccttccttcagagtcaacattgctgtgtggactgcatcatcaagctccatatcatctgtgtacctcttctcaagaaacgtctttgcattagaaacatttttccccatagcagaagctttccaagaaaaatatgaacctgatggatccacctgatataattgtggcccattatcatcaaacccggcaactagcagagacactccaaaaggcctgacaccaccagactgagtaaattcctgcattacagcggcaacttccctgacaagttgagtgacaggaattggttctttatataaccgatgatactgctcggcttgtttcctgctttttcgaaccaaaactcgaaaatcgggacccatgccactatatacgacacctatatttggtgttaataactgaattttctggactgatgcttcatcaaccaatatagatggtaatttcttctcggtagcaatgacaactccatttgcagctttaattcccaaagacgtttgtccagacccaacagccgtcaaagcatgctcaatctgaacaagctttccagaagggctaaatgtggtgagagaaaacgaatactgactatcccccatgataaaccgcgcaagaatctgagagaaaaagaaagagaggtcgcagcggacgcgtgg

SEQ ID NO: 50567 - DNA, 1256 bp, Glycine max
  Clone ID: PAT_MRT3847_16673C.1
aattttttttttttttttttttttttttttttttttttttttttttttttttttttttttttttttttttttttttttttttttttttttttttggaatttaagatcgcagtgcaattatattgcattgaactaaaccggcaatatataaaataacataggaacaatcagattccttggaggggggatataataaattagcaaatattgattaagttattgccgcatcgtctaaacaaactaggtttgtttgaaaatgttgatgactttggaaaaggtttatctgaaggcttgctggtcatcacaacgagtagctcacaaatttactattgccatcactctaccaattaaacccaactgtgaaacaacttcaggaatagacgacttcttcatagcacattattctacttcagccaaatagtcatcaatttcggccggtgtcaataccctgaattttttatcagcaccgattatgccaatttcaatgttttttcctgagatctgtccctcaaacccttccttcaaagtcaatattgatgtgtggactgcatcatcaagctccatatcatctgtgtacctcttctcaagaaacgtctttgcattcgaaacatttttccccatagcagaagctttccaagaaaaatatgaacccgatggatccacctgatataattgtggtccattatcatcaaatccagcaacaagcagtgacactccaaaaggcctaacaccaccagactgagtaaattcctgcattacagcggcaacttccctaacaagttgagtgacaggaatgggttctttatataaccgatgatactgctcagcttgtttcctgctttttcgaaccaaaactcgaaaatcgggacccatgccactatatacgacacctatatttggtgttaataactgaattttctggactgatgtttcatcaaccaatatagatggcaatttcttctcggtggcaatgacaactccatttgcagcttttattcccaaagacgtctgtccagagccaacagctgtcaaggcatgctcaatctgaacaagctttccagaagggctaaatgtggtgagagaaaacgaatactgactatcccccatgataaaccgcacaagaaactgcaaactggactaggtttcggggctgcgctggcgactcagggtttcgaggctgcgatgatggggtgaggaagtgagttcgggtttcgactttcgtgttcgggaggccacaaacaagggcgttctcgagcc

SEQ ID NO: 50568 - DNA, 540 bp, Glycine max
  Clone ID: PAT_MRT3847_16674C.1
catgtccgagacagaaatcttcttccttattaataaaataaacaacggttatggatatttggatcgtgaccgacaatacagaaccataaaaatgcaagagaatgtcgaagaaattagagatctattactctcagtctcagatccaaacataacatagagttgagaagagagaggctgaccaaagctgaaagcatagccattgttggacataagctgtttgttggccataataattccgacgggagctgacaacggtcatggcccatgctcccacatcagatattgcgcgacgatttcttttcgcgtttccatcttcgtaggggggaggggggaaatggtaaccggtttacggacactagatctacacaggctagcccgaagccgcagatctggaaatgtacagtggcacaagttcggttttccgaatttaactttaaattcaatctcaatctgagtgagtatgcgcaactgggatgaactaaaattttatcagaagagaaaaaatcggacgcgtgggtcgacccggggaattccggaccg

SEQ ID NO: 50569 - DNA, 1136 bp, Glycine max
  Clone ID: PAT_MRT3847_16675C.1
gcgatcgcagtgcaattaataatgcattgaacttaactggaaatataaaaataacagagataaggaacaatcagattctaaaagggtgaaaataataaattagcaatagtcattaagtcattccgcaccgtctaaacaaactaggtttgtttgaaaatgttgatgactttggaaaagggtttatctgaaggcttgctggtcatcacaacgagtagctcgcaaattcactattgccatcacaatgtcaataattaagctaccaattaaacccaactgtgaaacaaacaacttcaggaacacaagagttcttcattgcagattattctacttcagccaaatagtcgtcaatttcagctggtgtcaataccctgaactttttatcagctccaattatgccaatttcaatgttttttcctgagatctgtccctcaaacccttccttcagagtcaatattgctgtgtggactgcatcatcaagctccatatcatctgtgtacctcttctcaagaaacgtctttgcattagaaacatttttccccatagcagaagctttccaagaaaaatatgaacctgatggatccacctgatataattgtggcccgttatcatcaaacccagcaactagcagggacactccaaaaggcctaacaccaccagattgagtaaattcctgcattacggcggcaacttccctgacaagttgagtgacaggaattggttctttatataaacggtgatactgctcggcttgtttcctgcttttccgaaccaaaactcgaaaatcaggacccatgccactatatacgacacctatatttggtgttaataactgaattttctggactgatgcttcatcaaccaatatagatggcaatttcttctcggtagcaatgacaactccatttgcagctttaattcccaaagacgtttgtccagacccgacagccgtcaaagcatgctcaatctgaacaagctttccagaagggctaaatgtggtgagagaaaacgaatactgactatcccccatgataaaccgcgcaagaaatctgcactcacaacttcaccgagagagagagaagagggtagcagagttgtgtttgcttgttctccccttctgtcgtcttctcgcagccgta

SEQ ID NO: 50570 - DNA, 458 bp, Glycine max
  Clone ID: PAT_MRT3847_16676C.1
gtgaaatttaaaggtgcttggtcaatttccacttagatctataacatggtttagttggaaatacttaatttgaagatatattttatttttattttcataaataattattaaaattttgcatttgttattcaaatattttctttcttaaaggaaaaaattgtatattgcagaaacatgattttcaaaagtacaatgatattatcaaacccttcaatagtgtgaaatagaggaaaagaaaaaaaaaaggacagaaataatggggcacaaagtatgattcatgcatgagtgaggtgatataaagaacaagagacataataaataaattaaaagtagttagtactaaataaaatgtaagggaagacgacaagatataataatgagttaatagattacaattctgataatgaagaggagaagatataataataatcctataaagtaaaagaatatggtttttg

SEQ ID NO: 50571 - DNA, 280 bp, Glycine max
  Clone ID: PAT_MRT3847_16677C.1
tgacagtagagtaccctgacattctagctcgatatgtccaacaccatcctgtctgacgatgagtagcatttcgattcgattgccagaatccggcgcctcgaattgttatgctcatctagcctgtatgagtcgctagaacggttacatcggcatggaaggacgctcatgctttgttgttgtacatctctactttttaatctggaattcacggtcacgcctttgtgccattttgttggtctctcgaaaccttcactttttcagaatgcgtatgtatttagtg

SEQ ID NO: 50572 - DNA, 232 bp, Glycine max
  Clone ID: PAT_MRT3847_16678C.1
gctgtgcgtacatgtgatgggcgtagttcatgagatgaggtggtttcaggtagactactggcgtgtttactctccaagtacgggttcagtatctgtttccaggtccgactggtcacagttgtaagtgcaccatctgatctagagactacagcctggctttgttaggagttacggccaatggtactactgtgggagtatggcaaattggagttgattgagaatggcgtgcttg

SEQ ID NO: 50573 - DNA, 169 bp, Glycine max
  Clone ID: PAT_MRT3847_16679C.1
tacagatgacactggatctattgtacggcatgagggcggagccttggaggctctgtggctaacatcagcggctattggcgcaaatgattctatcccattgtttcccaagctgttggaagttgcgctgcttgcatatacagtgtggttcacttcccgtgacctgcttttc

SEQ ID NO: 50574 - DNA, 419 bp, Glycine max
  Clone ID: PAT_MRT3847_1667C.1
aaagggcatgaatcctttcaactgctttctcgtgaataattggaaaattcaaatccgtgtttattaaccactgcaaatgcaatcttcaggactcatccccaatcaagagatcttaggggtaatttcttttcttataccccacccaagataatttttttttccccaaaaaaaatacctgaaaaaataaaataagccccccccacctcatgaaaacctctggcctaggttctgggatatgggccttaattccctggcctttcgggaacattcaaaaaaaaaatcccccttacccctaaaaagctttggcatacaatttttgaaacttaccaaagttttttgccccacttggaggcattgccttgaataggctttttccttattttccaatttttttttaacttggtaaactggaaactggc

SEQ ID NO: 50575 - DNA, 280 bp, Glycine max
  unsure (1)..(280): unsure at all n locations
  Clone ID: PAT_MRT3847_16680C.1
tcgcaagcacgcgtacgtaagctcggaattcggctcgagnttaantaatcactnctagaaacanatcnacttttgcaattcnacancnnaaannaccganacatcatnananatgaatatcgagtatctatctgactangaanaaannaacancnacaactnagattangggnnatgaagatcaaagnanatntcaacgaatgagcnagtccatcaccacatnaaanagcagaaacacnanagtaccacagagcacaananangnagtnaacatcnacan

SEQ ID NO: 50576 - DNA, 822 bp, Glycine max
  Clone ID: PAT_MRT3847_16681C.1
tttttcttcgtactcctgggcttgcttgatgaattcaagcttgcaacttctgatttctcacaaatgaaatcaagtgccagaatctaaggtgagtacaaataatatttacaatgagttacaatattttttttttccaaaacagttgttcatactcattactgagtcaaaaaaaatgaagctctcagatatttcagcacatgtagtgaaggaatcaatcaacagcttcgtcatcaagaaacttgtggcttcgtcatcagtaacttcactgtataaagaaaccaagtaacaaattatgatcaaataaataagaaaaaacattcatatgaattgaataatgagaaaagtgataatacaaaaacatgtcaacagcttctgttttggagatcaaggtaagttccttagaagcaaaatatttacagaaactatgaagatttttctcttgacagaaattacatagatgtttaaggaaatcattgaactgttttggttccttcacagacaaaaagaattgttaatataacaagttaaaaagccaaggccgataaaacaaagaaattcaaagagtgatagcaaataaattaaaggttgaacaaggaaaatcctaagcatcttttatgtgccggaatatgggagatggttgcctgctcaaggatgcaacccttgcgaagcacaactaaacattccagtgctttaggatagttatcgccttcgtgggagtaccccaccagatcaaatattttctttttcgtttcattaattgctttttctacccaatctggactatccctgcgtgaaaacaaggcttcaaaatcttggacaggc

SEQ ID NO: 50577 - DNA, 566 bp, Glycine max
  Clone ID: PAT_MRT3847_16682C.1
agcaatttgatgcggcgcggggtttagacttgagtgtgcattctgagaggagtagagagaagatggggaagaagacgaagaaacccggcaaaggcaaagagaaaaccgagagaaaaaccgcgagagccgaagagaagaaagctcgcagggaaaccaagaagctctctcccgaagacgacatcgacgccattttgttgagcattcaaaaagaggaagctaagaagaaggaggttcacgtcgacgacaacgttcccgcgccttctcctcgctccaactgctccctcaccgtcaatccattgaaggagaccgagttgattctctacggcggcgaattctacaacgggaacaaggttacgtgtttgaattgtgtttatttgttgattgagtgatatgatatgtaccgagtgaattgttgttgccgcaatgtgaatttgtgcagacatttgtgtacggcgatctctaccggtatgatgtggagaagctggaatggaaattggtttcaagtccgaatagtcctcctcctcgcagtgctcatcaagccgttgcgtggaagaattatgtttata

SEQ ID NO: 50578 - DNA, 448 bp, Glycine max
  Clone ID: PAT_MRT3847_16683C.1
cccacgcgttgtgtcaggattacgccccggacaacacacaccaatgacgacacgggggccgacggtggggaaccgcacaatacccaagctaagaagccagagaaacagcagaaagaaaacgaggatgaagaccaggaaaggcctccacggaaaacaaccactcgggaaccaccaaaatacaaggaacagaagacgggggcggacacagcaaaggttgggaagtcgagcaaagcacaagccatgccaaaaaagcactggtcagacagaagggcgacacggacaagatacgcgaggggagctggaaaacagccacagaagagaaaggctagatgcacacaacaacgcaaccaggagcaggacacagaaggcccgacaccctgggaaacaaacaaatgggaccgcaacaagaggcgtagaagcaccggcaaataacaacagaagacaactg

SEQ ID NO: 50579 - DNA, 334 bp, Glycine max
  Clone ID: PAT_MRT3847_16684C.1
gcattattttgaggataatgtgaaggaaatcctaaattttcgtggatttaattctgaaattggcctccaaattcttgttgataaatcactcataaccattagttacgggaagatttatatgcatgacttgttgagagatttaggcaagtgtattgttagagaaaaatcacctaaagagccaagaaagtggagtagactatgggattgtgaagatctctacaaatttatgtcgagcaataaggaagcaaaaaatctggaagccatagttgttgaagatgaaccagggatgttttctgaaacaacaatgagatttgatgctctatcaaaaatgaaa

SEQ ID NO: 50580 - DNA, 510 bp, Glycine max
  Clone ID: PAT_MRT3847_16685C.1
ctcaaaagctgaagactttgcaatatcatccaaaattgatgccattgcatcttctggaacattcactgataactctgttgtgaaaacatcatccaccttgcaagctggtttgaaaaaatctctggtcagccgaccttctaggcaccttggacctcctcctggtttcagtcatgttcctcctaaacaaggttcacccactgtttctgattcaattagtgggaatccaattatggatgattacagttggttggatggatatcagttgcctgcatcaaccaacgatttaggccctgatggtcctcttacttactctcagtcaaatcctcatcaaattggtttgagtgggacagccagttttccctttcctggaaaacaaattccatctacactgcaggtggagaaacagaatggttggcgagattttcagactttggagcttttaaaagcacaccataatcagcaggtgcagtcacagttggccccaaatggaaatcagcattttactccact

SEQ ID NO: 50581 - DNA, 446 bp, Glycine max
  Clone ID: PAT_MRT3847_16686C.1
cccacgcgtccgtctacgcgtccgaaaaaaaaaaaaaaaaaaaaaaaaaaaaaaaaaaaaaaaaaaaaaaaaaaaaaaaaaaaaaaaaaaaaaaaaaaaaaaaaaaaaaaaaaaaaaaaaaaaaaaaaaaaaaaaaaaaaaaaaaaaaaagggggggccgtttaaaagaaccaaaatttacttccgggggcttgcaagagaaaatttttttaatagggcaaccaaaattaaattaatgggccgggttttaaaaacgtggaaatgggaaaaaccttgggttacccaaattaaatcgcttggaaaaaaatccccttttcccaagtgggaaaaaaagaaaaaaggcccaaacgaatcgcctttccaaaaatttgcaaaccttaaatggaaaatgaaacccccctttaacgggccaattaagcggggggggtggggggttaccccccaag

SEQ ID NO: 50582 - DNA, 416 bp, Glycine max
  Clone ID: PAT_MRT3847_16687C.1
gatctataaccttgggcacgcgatttctcctatacagcgccagaaacctttatctgcgcattgctggaaccggaggtagaggaaacatcaacagtaagccgttactagctaagtagtctcagtcgcaggatggaacctaagaatggaccgctgagtgttcgaatgcattcaatgactgacactgtacctaaccagctaaatcacaccattcctcaatttatctttgtatgagatgagggccattctggatctacttgaggacaaattgagtcgagctgcaaatatgccgaatagctaaggacagtcactgtgcatttctcgtgatccgcagacttaacatgctgctgcaacacatcccctggcactacaggtgcttacattatcccccatcgttgaaaataaaggttggtcaactc

SEQ ID NO: 50583 - DNA, 245 bp, Glycine max
  Clone ID: PAT_MRT3847_16688C.1
ttatagatttttgttttcttctatataaaaatctctgctaaggcgctggacacataacaattcatccatacctctcatagtcttgtatgctaatgtcagtaacacaaacctcatcaccttaccaaggtaaggtttataatgtagataatcgtatatacaaaatgtgtatctacatattccaatgacacccagttaacttagctttacacataatataaagacataggtcttgagatactggcatt

SEQ ID NO: 50584 - DNA, 275 bp, Glycine max
  Clone ID: PAT_MRT3847_16689C.1
gccgtatccttgttccttaaattacttcctcaactctctctatccgattcttcaataatatcacgcgtttcttgtacggtatccatcttcgggattctattcatcattcttttgcttccttaatcagcacgcggattcatgtttctgcagcatccaatttgattacaaccccaattattctccaattactgccactaaatatttggaacatctgattttctagtgcattgatggctaccccaagtaaatcaacaccaataatagcgtcagacact

SEQ ID NO: 50585 - DNA, 472 bp, Glycine max
  Clone ID: PAT_MRT3847_1668C.1
gggaaaatcaagtacatgttggactgccactcatgcctaaagcagtggtcacacttctgcttaacagaaattcttggtcgggtgagataccaaatcactttagcagaattgagtcatcttcagcatctagatctttcatcaaatcatctcagtaagatgcccccatcttccttgatctctttgccaaacattagctatttgaatatagccagtaatgagctaagtggatcccttccacagaaactaaactgtggcagcaaactctggttcgtggatatctctagtaacaagttaaatggcggacttccttcttgcttggccaatacatcgggtaaaagagttgataaatatggtggcaactgtttagctgctgattctcaacctcagcggcgagggacttattgtaaagtatcaagctcgggaaggaaaaacttctggagatggaaaatagctgcagcagttgccatgatta

SEQ ID NO: 50586 - DNA, 424 bp, Glycine max
  Clone ID: PAT_MRT3847_16690C.1
aggggacagggaaaaaaggtggaaccatgaaaattcattttcacgcccaaattaattatccaagcacaagttagtattattcaaattccaaaataattaattgcaatagctattaacagtacaccaacatgaagctgacaaattggttttgaggatgcaccctgaacttattgcatgtcttcctattgcggcatggtaatgaaaactgggcgcggttgatagataagaacaaagaagttattggaagggctgatacgtgttatggttacaacacagatggaggaaatacccacatgcatgcaggcatcctggttatgcatttgaactcaaggaaggttacgtcaatttaaacctcgaaaacaatcgagttatgacccattcttggatgggaattcaatgaaaggtgttgattttgcacgtgggg

SEQ ID NO: 50587 - DNA, 299 bp, Glycine max
  Clone ID: PAT_MRT3847_16691C.1
aaaaataaaaaacctaaacttttttaattgggtgggaatttataaatacaatccccgaaaacccgggttttttttttcatcctttttaacctttgggggggaaaaaatatttgggttttcccttttttaaaacggggggttttttaaccaattaagtcgatttttccactggggacccctttaagggcaaaatttgatggcttaatcagcccttttggaacaagtaaaaatttttttttttttattttaagcgtagaaataaactttggaacccgacccttgggccgaccctttgttcc

SEQ ID NO: 50588 - DNA, 325 bp, Glycine max
  Clone ID: PAT_MRT3847_16692C.1
cctctcttcccctttcataatatctgcaacccccccgctatccaattccaccaagggaggagtagcacaacttcgtttcggatacgacttgagatgaaaaccgaaaagaaaacatcatcgagccaaacacagaaaaaaaaaaagattatcttcttaaaataaatcaatctaaacatacactaatcataaagaggataacaaaccatatcacatcggctttctttgaactacacaatgctgacaatgtcttctacaacatatcgacccaaaatcaattaggccggcggcgaagctgtgacggcgtgcgtggaggatgacgagcccc

SEQ ID NO: 50589 - DNA, 885 bp, Glycine max
  Clone ID: PAT_MRT3847_16693C.1
ctctcctctaacttgtaagcaccataccacattatctctctttcgtttcctttcccttctcactctttctctatctaccctttcccttccatccattagagagtggaaaacatcatccatgtgttcatattatgttaggtcatggatacaagagctaccactctgtgttaattccttcttaagaccaatctgtgaaaggtttgacttttcttgtcccttgaatcccgagaacacaagccaaatcaatctcctattgctaacataacctatagctagcaagttggcaaattgcgttctagcacaagcaaattgatggagctagctagctttaaattgccttagtgagtcatgatgcatcatctttctttatcattacaaaaaaatataggttaagaaagttcgactcagttcagagtagggaaagcctctgatcttcttgttcttgaaagaaaacactctcaacactcaacagaaattctggctaatccttggtggaccggtcatcaggtggggttgggtgtaggggtagaccctgcagcaaccaattcaccttcttccaacctaaacaaacgccacatggacctttccatcaacgaaagaagccttgttagagaaagacaagaggaagaagaagaagaagaagatgaaagagacaacggtgatgaacccaaagagggtgcagttgaggctggaacacgcaggccaagagggagaccccctggttccaaaaacaagcccaaaccccccatcttcgtcaccagggacagcccaaactccctcagaagccatgtcatggaggttgccggcggggccgacgtggcggaaagtgtgggcccatttgcacggaggcgccagcgtgcggtgtgtgtccttacgggagcggtt

SEQ ID NO: 50590 - DNA, 358 bp, Glycine max
  Clone ID: PAT_MRT3847_16694C.1
cggctcgagggggtggcatctatacccgccaccgaattgttttaagatgagtaacagctcaaaggctgtcttttcctagccagtgggcaccgaacgttcgaccccggttcacagactccgcgagatgatcaaggaaaccgtccctgaccccaggaagaacatcttgtgacacttgacaaagagctaaaacaaagctaccgccatcttgctgcagctacgcttgattcataagaaagaagaaataccttacgcgaacagacagaacctcactgttggtgcctttggagacttctagctatccacactaggggacgtcagataagaaacatggattgctctggctgttcgtacaatacct

SEQ ID NO: 50591 - DNA, 268 bp, Glycine max
  Clone ID: PAT_MRT3847_16695C.1
cattcggctcgaggttcccagtgtgctagaaacatggactctgctttgcaaagactaattttgagagttctcagtttttggactatactttcctagattttcagggtgccatcatgtgtcaaaagctattgacgaataatccatctccagatccaatcttgttagtagagtcacaaccaaaaatgcgatgtttcttctcgaagttgctgtgtaagtttagtccaccaagtagaagagattgacgaaggagggatgatggatcaacaaa

SEQ ID NO: 50592 - DNA, 413 bp, Glycine max
  Clone ID: PAT_MRT3847_16696C.1
aacgaatctcacatttaaattagaaaagactgttgtgccacccaagacattcaaacgcatacactggttccataaccaagtgcaatcaagatgagctactgatgtaatctaaaataagacaaaggatgtgggaggagtacattggcaaaggtgctcttgggacagacaaggaagaaagttatactggtgcccggggtgaaacttacagctaaagtgaaaggtgttggtacctccccaataaaaccctcttaacagaggctgctcgatatgttatcgacattggtctgactcttgacttttcacatatatgctggctaatgtatggtgtaggtctgaccctttgatttactgccgttttttgccaagaacctatatttagcagaattcatgtatgatatttaagaagtcgaaca

SEQ ID NO: 50593 - DNA, 168 bp, Glycine max
  Clone ID: PAT_MRT3847_16697C.1
ctcggaattcggctcgaggagaattttccaccccgttcgttttggggctgacccgatccataagcgggtgggtatttttgacacgcgtgcgggtttcaacaacacagcgaaccgcgccacgctgaccgagtaaaccggcgatgcctaccccgacaaccggcgccaacc

SEQ ID NO: 50594 - DNA, 539 bp, Glycine max
  Clone ID: PAT_MRT3847_16698C.1
gaattaccaaatggaaggttctcttctatttgtaacttaatgaaataccaattgggtcctttatgagtaaggaaaatacaacagatgatcccccccttacaatctttttccctttttaatagaactatcaccaaagccttcacccctgtcagaagtaaattcctcccctttctttttacaaaatactatcataaaaacattcacactcccaatagcccaaaaattattgttgcagtttctctcctcttttacagaaaactctccagaacttctctttttttccataagtccccaaaaaaccttaccccttgaaggaagacaattgctcccttttatttttggtggctcattttttctccttggacctcaaaattccattttcacatgttgcaacattcattcggcgccaagtttttcaagtttctattttttgggatctgtttgtttcgtcctagtctctatcgcttccgtttcgagtttgccatcacatacgtcttcgagggaacctttgcctgatgtgcttagtagagcttgcatga

SEQ ID NO: 50595 - DNA, 1374 bp, Glycine max
  Clone ID: PAT_MRT3847_16699C.1
tactcgagccgattcggctcgagatccatcgaacatcgaacctagtaaaacaaagaaatggcttctcatcatctccaatatcttgtgcttgccatagccacacttctcacaatctcttcacatgcacaactcactcctgatttttacaacaatgtttgccctcaggcactgcctatcattaagtcagttgttcaacgagcaatatttcgtgaacggcgcattggagcatctttacttcgtttgcacttccatgactgttttgtcaatggctgtgatggatcaattctgctggatgacacccccaacttcactggggagaagactgcccttccaaatattaactcaataagaggtttggaggtggttgatgaaattaaagcagccgttgacagagcttgcaaacgtcccgtggtatcatgtgcagatatcttagctgtagccgctcgtgattctgtgtccatattgggaggctcactctactggtacaaagtgttactaggcagaagggattcaagaactgctagcaaagatgctgcaaactcaaatcttccacccccatttttcagcctctctcagctactttcaagttttcagtctcacggcttagacctcaaagatctcgtggctctctctggtgcacacaccattggattcgcgcaatgcgccacctttaggaacaggatctacaatgacaccaacatagaccccaactttgcatcttctcttcagggtacgtgccctagaagtggtggagacagcaatctagctccgttggatcgtttctctccctcaagagttgacacttcgtactatacctctttgctgagtaaaaagggtctccttcattctgatcaagagctcttcaaaggagatggtggtgagagtgacactttggtgaagctctacagcaggaacccttttgcttttgctagagattttaaggcttccatgatcaagatgggtaacatgaagcctcttattgggaatgctggagagatcagagtcaattgtagaagtgtcaactaaatgcttttaaagtgaaacgtggggtttccataataatcatgtgatcttctgctggttcaaaattgtattacaattcattttttttattagaatgttattaagtgaagttgctgtattggatgtcatttattgtggcacttctaaaagtaatattgaaggtgccacaatgtcaagactttcaaggttttatgatcgtaattgtatcatggttataaatgtaataattgtttctgattgtattagttgtatttgtccacaattttttagaatataaaaagttgggatgaaaccatactatcgaaattgtagtataacataattaataattagtaatatgtgtgtcaagtc

SEQ ID NO: 50596 - DNA, 2694 bp, Glycine max
  unsure (1)..(2694): unsure at all n locations
  Clone ID: PAT_MRT3847_1669C.1
ngtgtttactttgaattttcggcttcatggccacgtacgccaagttggatctcctttctaggaagtgatgataccttttgttcaagttttgctcgtatttttaaacggctagtacaagaatgtggcatgcctgtcgtattggctcttaaaggtgcagtagatgagtttataattgctaaggataggtctaaacatttgcaagaatgtgtaaattcatcacttgaaggaacttttacgcaaacttttcaggaagagggtttctgcaatgagacactgactagtctttctcatgttcatataataacgggtactgaaagagcttcaagaggaggtcagggagattcaagtttccaaagcttagcagacaaatccataactcgtttttactttgaattttcggcttcatggcctcgtacgccatgttggatctcctttttaggtagtggggacacctttttttccagtttgtcgcattgctctgagcggctaggataatgatgtggtacgtgcggcctgcaggctcgtcctggtgcagtagacaggtgtatgcatcctatggatagggcttatccgcgtgatgcatgctgcagcgttggcgggtgtgctacattctgattgagtggtctaatcaggaacatgggtgggaattgggatctgatgcctgaagaacatcattttatcagttgaagaacatcattttagcccaatcttttcaggtagtgggcatcttacataagatatgtaagagaacatgctgcagcagttttagcaggcctaatgaagggcggagatgaagatcttgctagagatttccatgatagagcttataaggaggcaaatattgtacagaagagaagaaagtcgagaaatgcaagttctggattatcaatagcatctgttcatggtgctgtactagctttggtagcttctgtattatcagccccatatgacatgcccagttggttgcctgatcatgttacactacttgctcgcttcagtggggagccatcacccgtgaaatctacagttactaaagcagttgcagagttccggcggacccatgctgatacatggaatgttcagaaagaattatttactgaagagcaacttgagattctggcggatacatcctcctcgtcatcatattttgcttgataaaaaaaattccaaagatattgttgggggagggtactgaaataattggttagggaaagtatgcttttcatttttggtgtattgacttggattcattgatgtaaaaataccttttcttcagtagctactacagtaacagccaaacgatatacttttctggctgctgcacttatagaaatatccccacagaaaatgccagtagctgaaatccagctccacaatacacttctgaaggaagttcttggtaatatgtgccactcatcagcccaagtgagggaggctctaggggttaccctttctatattgtgctctaacattaggctctatcattcaagccgtcatgataatgcacaggatgagagaaatgacgatgttgatagtttgatgaaagatgaaagctgggttccgtttcttacagagcgagcagctgaagcagttgtcaacattcagattgctacccaatcagataaagtagtgaatcctgtagatacaaattctcaaaatgggcatctagatggtgattcacaagattgcattaaatggatggaaacgctactctacttcatcatctcatcattgaagtctgggagatcctcatatctactcgacgtgcttgtgggacttctatatcctgtgatttgcttgcaggaaacatcaaataaggatttgtcaacattagccaaggtagcatttgaattgctcaagtggatgattgtttgggaacctcaccttcagaaggctgtatctgtgattctttctgctgccaatgattccaactggcgaactagatctgctacattgacatatctgcgcacattcatgtacaggcacacttttactgtctcaagttcaaagaagcaagagatttggagaactgttgagaagttactagtagacaatcaaattgaggtaagagaacatgctgcagcagttttagcaggcttaatgaagggtggagatgaagatcttgctagagatttccgtgatagagcttatagggaggcaaatattgtacagaagagaagaaagtcgagaaatgcaagttctggatcatcaatagcatctgttcatggtgctgtactagctttggtagcttctgtattatcagccccatatgacatgcccagttggttgcctgatcatgttacactacttgctcgcttcagtggggagccatcacccgtgaaatctacagttactaaagcagttgcagagttccggcggacccatgctgatacatggaatgttcagaaagaattttttactgaagagcaacttgagattctggcagatacatcctcgtcgtcgtcatattttgcttgataaaaaatttcaaagatattgttgggagagagggtactgaaataattggttagggaaagtatgtttttcatttttggtgtattgactgtattcatagttgttaaaatagcttttatttacattttgtaccattgatcatgtaagaaatttattccttaataatctagtctcagaagttgagcttcttgctatctagaaaacagaagttgagcttaa

SEQ ID NO: 50597 - DNA, 297 bp, Glycine max
  Clone ID: PAT_MRT3847_166C.1
cacactcctagaagacgacacaaagagggctgattgcgggatggaactggaagcagggcgtcaacagcgcaaaagagcgcacctgaagaaaaaggctctgaagaacaaaagttcgagcatgactttctacgaaaatggtggtactgacggggttaccaggtttgtcaaggccaagaagaatagaagaaaggactcccgggagcgccaggacgacgctctgggccgcaaaagcaccgagggacgccacaaggggaacttggtgagagaacagggctctcatggacgcgttgcgccacc

SEQ ID NO: 50598 - DNA, 1008 bp, Glycine max
  Clone ID: PAT_MRT3847_16700C.1
atggcttctcatcatctccaatatcttgtgcttgccatagccacacttctcacaatctcttcacatgcacaactcactcctgatttttacaacaatgtttgccctcaggcactgcctatcattaagtcagttgttcaacgagcaatatttcgtgaacggcgcattggagcatctttacttcgtttgcacttccatgactgttttgtcaattttaaacttcgtacgcggcaaaatgataaacgaggaaagggctgtgatggatcaattctgctggatgacacccccaacttcactggggagaagactgcccttccaaatattaactcaataagaggtttggaggtggttgatgaaattaaagcagccgttgacagagcttgcaaacgtcccgtggtatcatgtgcagatatcttagctgtagccgctcgtgattctgtgtccatattgggaggctcactctactggtacaaagtgttactaggcagaagggattcaagaactgctagcaaagatgctgcaaactcaaatcttccacccccatttttcagcctctctcagctactttcaagttttcagtctcacggcttagacctcaaagatctcgtggctctctctggtgcacacaccattggattcgcgcaatgcgccacctttaggaacaggatctacaatgacaccaacatagaccccaactttgcatcttctcttcagggtacgtgccctagaagtggtggagacagcaatctagctccgttggatcgtttctctccctcaagagttgacacttcgtactatacctctttgctgagtaaaaagggtctccttcattctgatcaagagctcttcaaaggagatggtggtgagagtgacactttggtgaagctctacagcaggaacccttttgcttttgctagagattttaaggcttccatgatcaagatgggtaacatgaagcctcttattgggaatgctggagagatcagagtcaattgtagaagtgtcaactaa

SEQ ID NO: 50599 - DNA, 403 bp, Glycine max
  Clone ID: PAT_MRT3847_16701C.1
cgagctccggtttgttcagtcttttttggttttttgttacgcgcacacatgtatagctccgtgccgggaaagacaaccatcccacgactagctggtgatagggaagaccactgatatcatggggccaacaatggtggcagaagctcgaactagtgagtctcagagccaccggcccacggggacatgcctgagtgacacctgctgtggctctgattgccgaaccgaacctcttactggacgacactggggtggcttacgaagaagatgcttctgctctcaaacattgataaattgtacaaaagtgaataaccggtgctttgattcaaagaggaaagaatctatgcatctgtctacacagggaagccaataaccgctttgtgtgtggcactaatggctacccatt

SEQ ID NO: 50600 - DNA, 454 bp, Glycine max
  Clone ID: PAT_MRT3847_16702C.1
aacgggggaacctttttttggttttttttaatatccttccaaccccatttttttacataaataaaaagctgttataaaggggacaagcccccacaagcaaaaacggaaaaaataaaagccatccgaaatatcctaaaaacaaatatgccttttttccactacctaccccttttttaaaaaacacgatgctttcacacgggtttgggcttttcctacctacggggcctgtttgcatgatgcatgaagccccccctgctttacgttcctttcttttgggcctttggggcttactttctggaaacccattttactaaaattttttttcccgctttctaggaacaggattttttttttagcccgataaaaacaaaaaaacaaaattttccaagctacagattttcatttggaatgccccagaggattatggaaaaataactaagcctgggatacattt

SEQ ID NO: 50601 - DNA, 447 bp, Glycine max
  Clone ID: PAT_MRT3847_16703C.1
ctgatgcttggggttcttgtggctcgtgaaactgggggtgaacctgaacttgaatggggagctcttaaaaaaccaattaactactctttgatatggagtgctgattcaccacatgatggatgtggttatttttggttaccaaatcctccattaggatacaaagcaatgggcatagtagttaccaacaaaccagacgaacctgaagttgaagaagtcagatgtgtacgagccgatttgacggaaacatgcgagacttgtgatctattactatccatgagctcaaaattttcaagaatttcattcaaggtttggaacacaaggccttgtaaaagagggatgtggggtagaggtgtatcagttgggacaatcttctgcagcacctattctaactctgaaaaaataaaaatattgcttgcttgaagaatttgacttcaccttacatgccat

SEQ ID NO: 50602 - DNA, 606 bp, Glycine max
  Clone ID: PAT_MRT3847_16704C.1
ggtcagcaaaattaatatatattgatatatgagggagtaccagaggtactatagatacaagagtatgtaagtaatgctggtaaagcctcatatcaggctgagtacagactgataggagcttactagcatactacagagcgtcaaaaattacaaaccacagctagtgttaccctagtttacagaaaaccagctggtagattgctagaccaatagttgaaatgcaatgtaaaattttcctccattgttctgaaccatgtccatgccaaaaacagtgcatcttccagcaacttactgccattgaatggagcattcattggagaatatcatcttatttctttgcttccaaatggtccacgtgacagctatccaccaccatttccatcttttggccctcaaaccatcaaccattgttagaacatgttgtaggaagtgcatcttagggtcttttgggaaagcagaagattggctcacccatgccgatgattcccaccatatgggggtgacttttctgcagtggaagaacaaatggcctgcatcttccacctcattcctgcataaaggacagctagtgtccgagactgctacttgtcttctatgtaaattaat

SEQ ID NO: 50603 - DNA, 279 bp, Glycine max
  Clone ID: PAT_MRT3847_16705C.1
gaaggcctgaataggctactcaccccgacacgttgaaggcggggttggctgagttcatcgccaccttgatcttcgtgttcgcctgttcatgttccggcatctcctacaacaagctcacctacaacggcgccgccactcccgccggcctcatctccgcttccatcgcccatgctttcgccctcttcgtcgccatctccgtcggcaccaacatctgcgtcggccacgtcatccccgccttcactctatgagtgcctttattgttcttcatcatctcccttt

SEQ ID NO: 50604 - DNA, 607 bp, Glycine max
  unsure (1)..(607): unsure at all n locations
  Clone ID: PAT_MRT3847_16706C.1
cnnnnatgcgtctttttttctccttaaaaggtcaaaaattacaatgttaaaagaaaggagagaaactggattttttgaaactaaaaagaggtgctaataaaaaagaactgtaattacttttacttatatttttcatatacataatataaataaaaaaaggtactaggcattacaaaactctacagcttatctgtagatttgatttaactttttgatatattgcgggaaaagtacagaagaagaagaatgagggcatctatgatatctcaggatatggcaatgcccccaaacttccgctattacccctgacattggtccatttttacatgacagagcaggcattggggttctcatcactgaagatctgaggagggtacgctggtccagagtatgcatagaactccatgccaccataccttggtggtgggttgtaataatactcactctttttcacctccaacactgtggatgcctcttctgctttggcttcaccctctcctccttcttttttctccttgttttcttctccctcgccactccctttctccattttcttctcaaccggacgcgtgggtagcatctggaattctttcttctctgcctcttg

SEQ ID NO: 50605 - DNA, 306 bp, Glycine max
  unsure (1)..(306): unsure at all n locations
  Clone ID: PAT_MRT3847_16707C.1
gntgangaagcnganganagcncngaattnggctcgangncgnnnatagngnacattcttgnacnnctggangnangantnanncnggnanggcgagagngtagcnaaanttcantannntaanaaagnttgagannntctgagnaaatngaaataaggnagnacttatnggagcggagaagacatanagattnccnaggctaaagcctcnanagnngatgatnncnanaanacanatgaagacntaantaagcaaannaagntnaagtnangaggtgtagannttnggncgagaggnntngaant

SEQ ID NO: 50606 - DNA, 205 bp, Glycine max
  Clone ID: PAT_MRT3847_16708C.1
tatttgcaatagcatccctaatgacatgctcattagagatagctatgaaaaattactgcgccacgctacatctccaactatgttgttacagtcctacaaaaattatgttcatttgtgtgtgtatggcgatgatatctcaattaatgttcatgaatacgtccagccttactttactggtcctatatttaaaagctttctagctggc

SEQ ID NO: 50607 - DNA, 121 bp, Glycine max
  Clone ID: PAT_MRT3847_16709C.1
atgaccacatagacaagcgaccttatgtcttgcaaatgtattactgtggtccctcgatcattaaaagttcacctctatgagagtagctgcatatccactcatgggtatgaaaaagagaaat

SEQ ID NO: 50608 - DNA, 538 bp, Glycine max
  Clone ID: PAT_MRT3847_1670C.1
ccttctatttttaaaatgagaattgttcactgtatatgtccacacacacatatatatggtgggacttgtgactaaacattgttcattaattgggaaggagtattggtatgatacctttataaaaaaggggtgagtgtataaaacattgttgataatgctttcattttgctccctcccgattgatttaattatcatgctaagtgtctctgggttatcctatgcccacggaggcacttaactttattgcttatggattttaaggcttggtgttgaaatttaaattgagttttttcttggctacttatttaggcttaatataattatttatcaagattgattgcttacaatccaatctctgatataaaaccacctacaatccgattagggttttatctttatattgagtcataaacttttattttcgttgtgaattacagattattttatctattctaatgtatgtatgagtgcgtgtgtgtgtatatgtatttaaatataattttttattaggcaggatcttattttgatgctgggttgt

SEQ ID NO: 50609 - DNA, 371 bp, Glycine max
  Clone ID: PAT_MRT3847_16710C.1
agtccaaatctcacccactcgagatgaataccaacataagattgggactgaggtcaccgactagaccaattgacagctttgcatgctgaaggaagactcaaattggaggcacctcagtcacctaagggaaagcaccacttacgagagatctgactctttagaacacacgggattaaagacgctcaggacggacctcaaaaacgacgaacacatccatgcacctctgatcacaaggacatggcaacatggctctcctgggggaattcccctataagttttagaagaggtagggatcgaaccacaagccattacacactatatactgtttactgccattatgccctcttggccaacatatatgccatgttggg

SEQ ID NO: 50610 - DNA, 811 bp, Glycine max
  Clone ID: PAT_MRT3847_16711C.1
aggacggcttttaaataacaaaacattaagctcatcccttgaaattaaataataaaatcagttgaatgatctgtgaacgaatattcaaaattgtggtaagtggttagtttgtgatctagagataagttagttgtttttctcagaaatgcttgcataagagaggaaggtggattggtttcagtcctaaatggtatttgcgatttttttgggaagtctattccctagctttgctatttttttctatgtagtgtttctgttaagaatgtccaggaagagtaattgttacttgttggtgctaataaattaatttgctcttataattggctggaaagtacgggtggttccagctcctcttctggatggggcttttgttttgccgaaccaggttcctggtccacccttgctgaacagctgaggcgcttctcttcctgatacttggcttacattgccaagctagaatctacatccttagaatatttgattcatcccctatgtccgctaactctgaactaatcagatgagattcatttgacatataacataaacatagttaagctgttagatctgaagttgattcctcagaaacacttgactgttgtaaatatgccttggtttggtttcatagtgaacaaaatcaaaggagtttggtgttatggaaaagattgggaagaaacaaaggagttcaataatattgcatttccctgttttggttttgtgaggcatacaatatatatgatttctatatgcatagaactatgtgaatgccttcttgtgttgtggagtcagaactttaacataggggtgaaaacta

SEQ ID NO: 50611 - DNA, 433 bp, Glycine max
  Clone ID: PAT_MRT3847_16712C.1
ggtgatgcatgaagtggaaagtctatcttgaactgccaacctttctatctgctctcatatctttcttttagaatgaggatggagggaattgtaaatgccactcttcaacccttattctgttaccttaaataaatgaataacactaaatgttagatgctagtctcagtagtataccttctatcatatttgtatttctttgtattgtggaataactctcacatgcatgtgcctaaagtaattggttatgggccttgttggatgtactactgtagaagattttataggaaaaaaacttattccatatgttttcctactatatgtgttccatatgcattactgtttagatgctagtctcactctcagtgaattgaaacattcagaataatacatatgttttcctactatatataatatatttatatggttattagct

SEQ ID NO: 50612 - DNA, 235 bp, Glycine max
  Clone ID: PAT_MRT3847_16713C.1
cagcaagcagccatgccgtcggacgacgaacgctcgaacgccagcgactcggaggaggaggtcgaggagaccaaggaggagaaggtcgtcgaggacctgagcaactcggacgtcgtcgagcgctaccgcctcgcggccgagatcgcgcagtcggcgctccagggcgtgctcgcgcactcgcggccggcaaggacgtcgtcgagctctgcaagttcggcgacctcatcatccagca

SEQ ID NO: 50613 - DNA, 436 bp, Glycine max
  Clone ID: PAT_MRT3847_16714C.1
acgaggtccaaactccaaatcaaaaccttagagtagttcatctacgtttctttgtaataggcggaagtaatttctctgtttttctcttttttggtgtttgtaagtttaagttgctaatgttgttagtattgagtgtgcatctgtgttggtcgacattttcaatgaatgagttattgaccaaaaataaaatgaaataaaaaaagcagtaaatattatttgagagcaagattgctggggtacatgcaaggtgtgagtcgtcagccaaagttatggactcaggttgacagtaccagcaggggtgtgcgtgtgcaagggatgaactgggatgatgacgagcgcatacgcctaatcaatcttcttaatgaatgtgtcaagcttactgaattaggcaacttcaatgctgcagatgttgcattctaccatctctctcaccttg

SEQ ID NO: 50614 - DNA, 142 bp, Glycine max
  Clone ID: PAT_MRT3847_16715C.1
gtttgcaataggatgggtttggggtggatttgcatgcaattcccgatgagacagaagtggtgggatttgtgagtaattaacaaacaaagctttgaaggcatgttggtttgacagaggaaagagtgagttattgtgttgattt

SEQ ID NO: 50615 - DNA, 405 bp, Glycine max
  Clone ID: PAT_MRT3847_16716C.1
ctccttcgtgttaaatttgacccttccttcgagtgactccatttcttccgatatggcccacaacacccctcgagagctcgtatctggggcacgctgggcctgacgtatatgctcttgccaccatgattgctaccggagtgatcctgggtcctgaccataccgtgatccgtcgcgcatgctggacatttctccagcaccagagtcgatgaatgggtgtaagatggaattgttaaatgctgcattccctatcctaaactgggtagtagctacaaccgatgttgctgaagcatgcactgggctcaacatggcagggatatgagggggatgccctacactacaaagcatggaacggcaagaggtcatgactaacatgctctccatatacaagtccaaggcttatgacct

SEQ ID NO: 50616 - DNA, 504 bp, Glycine max
  Clone ID: PAT_MRT3847_16717C.1
tttcgattcctctaagcataattatttaatttgttttggagggtattttatcattttcaataaatttttctactttatattttgtatcttttgtttaagtaattatattttgagttatttttctgtttttgaacttatatatatatatatattattaattatttaatatatataaaaaaacattagaatagtggtcatcccgctatccactatcctatttttggggttggccgctccgctacgccggtattgacaattatgatttaaataggtctattgagccaaaaagactttttgaatgactagaaagactaacctttttaactaaataagcttttaaaaaagtcttgatctgacctctttggcaaacaggcctgcttattgctcattttcaattttaatgaccaaaaaaaaagatgtctggtccctatctttgctggttgtaagttaaacttgcaaagtagaaaagctgggacaattatgtttgggtacccatttagtttt

SEQ ID NO: 50617 - DNA, 500 bp, Glycine max
  Clone ID: PAT_MRT3847_16718C.1
gtgaatgagtgctacttcctatagagactcaatgcatttagaatgtgatgcattgatacaatcccatactcaacactcgaaatatcagatacaaggtgaaacagtatactgtattattttagtacaataatgacagaaaaccagaaatggacgatcctccggaaaaagaggattctcccccaagccaaagcttcactcagaagcatttctctgttccaacaaatctaacagaatttcatcctactgacctactctctcctggtccaggcagattttccccctatatcccttcctgtgtcttttttttcatccataggaatgaaagataaataccagaatttacaataactcacacacctgttcaatcaaccgagcttgatcccttagttctttcctatgtgtctatttgagtattcactctccctcatcgaccatgtgctcctactcctttcctttggtttggggcaccaaacaccccttacatacactttgcctcgtgc

SEQ ID NO: 50618 - DNA, 449 bp, Glycine max
  unsure (1)..(449): unsure at all n locations
  Clone ID: PAT_MRT3847_16719C.1
caagcttagcacaagtgggtaaaatattgtaatgacgtgttgataggaatctatctgatcttctcactctcccccatttcacttctttntatatttttaagnnnnnnnnnnnnnnnnnnnnnnnnnnnnnnnnnnnnnnnnnnnnnnnnnnnnnncacctttcaaattncaaaatgctctctcttgtctaaacttgtaagtaacaataatggtatggtagaagtagtagtcgcccttgaaataacacaaacaatacgtactctccccaactcaaaacaacacacaaactccagttactgaaattacccttttccattttttccccctaaatttcaccgacgctgtcttttttctctttagccctcacccttttgagagtttcatagctgtaacttgggtgtaaccgatgctggaaatctcaacttcacaggaaaccccgctagagaacg

SEQ ID NO: 50619 - DNA, 260 bp, Glycine max
  unsure (1)..(260): unsure at all n locations
  Clone ID: PAT_MRT3847_1671C.1
ctttggccgcttcccaattttttgattctcttctctcgtanntaacccgattgcaccgtgaattatatcgtgcgggcttgcaacttccaaagtctgctggctggcaaatcacaactgagtcgataaattaatggaattcataacgagtgtgtatgcggatggaagatatgctccgacgacatcttcagacatgcctacaagagaggcacagagttttgggattcccgaagatgagattatgcatgccaactcttatcatt

SEQ ID NO: 50620 - DNA, 226 bp, Glycine max
  Clone ID: PAT_MRT3847_16720C.1
ctcagtttttgcaccgtttctccgatactctcttctctctaaaggtaaatccctcttcactcacaaaatcagatttttagtgctttagtgttagaatttttcagatatgccccaatgtctatgaacaacaacaacaacagcaacccccatggaccctcttcctccgggccagtaccctctttcccaggcccacgggctcacactcaacccgaacgccaaacgtttc

SEQ ID NO: 50621 - DNA, 419 bp, Glycine max
  Clone ID: PAT_MRT3847_16721C.1
cttacgcgtgggctgaagttgtgatgaacccctatcacaatctgtctgactttatgaccagatacataccaatactcctactgcaccctaaatcaccataacacatcacaactttaacaacaacgagtttttaatgtaccgataatctacacctatgtgagtcactacattactaacccaacttcaattcaaaatctaatatatttagttgacactccccttattagctaccagatttcacaccaattttagaactttttacgccctgcattcatctgtcaaaaccctagattgcacatgtgggggaaagtttggtaaggcagttcaaacatggtatctggaactggcatcttgcaagtgtgagttttatgtctggaattcaagttactgacgctttcacactgattctaatagacaca

SEQ ID NO: 50622 - DNA, 377 bp, Glycine max
  Clone ID: PAT_MRT3847_16722C.1
caattagtctatgcatcagtcgagcccaataactagacagtatatacttgaataggttgagtgcggagtaggagctaacacaagcgtatcatcacgcaggagaaagtacctcacagagctcatatataacggtggtgcacgagaacatgaagtagcttaactctttcaccgaagtcctatctgcagctctcagacgctgtccaaatttggaccttagccaatattcaggctgagacccagctcgagaaggcagatgttgagacgagacacatggtgagggagatagaggagctccaggcgcacatggatttgctcaacataaagatcgagttctgaaatcataaagaccccattcgaatggccgcgaggctaggcca

SEQ ID NO: 50623 - DNA, 411 bp, Glycine max
  Clone ID: PAT_MRT3847_16723C.1
gatgttaaattagggaagtgtgtgaaagatgtgctaaagagcatttatacagagaatgctacagattccctcctcatttctggcatttatgcagttgctggaagtcaccaattttacaagaatgcaagaaatgaagcaaatgaactttaaagtagcaaattatggggtacatgaaaccgagggagaaagtatggtcaaggaggttggactcagcagagttgaaattgataattaggcatgagaatactaaaggttaacgaacaagtggtgtctctattacactaagtggtggccctctatgagtctatggtgcaccaaaactccatttgacatgtctgaacacagccagttcctcatgtaggaacacatggtaatacaattttgattgaatccgaaggtggtatggagcac

SEQ ID NO: 50624 - DNA, 317 bp, Glycine max
  Clone ID: PAT_MRT3847_16724C.1
ctcaggcgtgcgctattggctggtttatcgtgaggcgtatatgcagagggatggcaccttggtcacggcacccagcgtgttatcaggtccattccttcgaacaagctaccaaaagctgcttccttcgaatgaatactcactatggtgagacagcaatactagggataatgcggacgctttttgctctatatgactgcacactacatctgatcctgtaaaaccataggtaaagagcgcgttgtaccaacacagtacttagctaataggagacaattcatatcatgcgctactacaattaagccacaagctttctttta

SEQ ID NO: 50625 - DNA, 298 bp, Glycine max
  Clone ID: PAT_MRT3847_16725C.1
ttatcgggggccgaaaccaaacccatatcgggagagcaccgaatcggaccaaatttcaccggcccaacctccctcctgggaacccggtatgttcggtggagtcatgattggcggacgccaatcaattgctaacccgagacgacgtgtaactgttcataggttaacgggtgctaatgttaatgatgagatggccttacacccagctaaactggttggaactgctacatcttgctacattgggaaaccagttgttactcatgctggcatatacgcagcggtggaaaagcagggtctagac

SEQ ID NO: 50626 - DNA, 270 bp, Glycine max
  Clone ID: PAT_MRT3847_16726C.1
gacccacctacgatattttatctccactcactcatttttttaacatttgctctctatcctactccgcccggttattattaacgcatggctctaaactcttgtccttaatgatgcacatcttctataatcatatgagtattaaaatgctattaaaactttaacacctaaattaccccaaaatctcctgaggaaaattatatcttcaacatcttcttcaaatttgaacaaacaaaaaaacttgattctacacaaccaacaaattattactta

SEQ ID NO: 50627 - DNA, 294 bp, Glycine max
  Clone ID: PAT_MRT3847_16727C.1
gggaaaaaacccaaacatttttttttataaataagaaaaaggcccattggtttactttcttactactacgggggggcccccccccggggaagggtccgcccgaatttttttttttactaatccgggggtggggaatcccttattccccatggggtacgtaagtgcccctccacattttgggaaactccccctcaacaatggggggaactcccccccttaattttctttatttacattcccgggttattcctacggttacctgtgataagggcctttttgatcatttttgggggc

SEQ ID NO: 50628 - DNA, 142 bp, Glycine max
  Clone ID: PAT_MRT3847_16728C.1
tacgctgcgagaagacgacagaaggggggatagtagttttactggtacaaatttgagtgtatgcgagacaagagaaaactcagtgcgagagacatttcttccaccgaagtcattatccttaaaatgccaacaatggatgtgt

SEQ ID NO: 50629 - DNA, 223 bp, Glycine max
  unsure (1)..(223): unsure at all n locations
  Clone ID: PAT_MRT3847_16729C.1
cctccctctctcttccacacaacatacgcagttcnnngnannacnancnncanagnnannnncancancananaagtttacncngtcttcgnngnaaccaatccctggcagctacggaattccgnncgnnggagcaataagcgacagtcacaactacttctaccaccactgctgcgtcatttcttcgcgacgaggattgaaaatcacaatccaccgtgatccg

SEQ ID NO: 50630 - DNA, 502 bp, Glycine max
  Clone ID: PAT_MRT3847_1672C.1
aaattgggtttccattaatctaagtacaaacaaagttcatgtggattcaacactcggacttccgagaactttactacttgtgacgatttggtacacttgccaacgagttaacagccactaagtgaagaaaagaaattcagaatttcagttggtgaagaatttgcccagcgagtgaaatcacatctaaagtgtcttttggaattcacaaagaaatcgcccagcgagtagaacccactctgaagtgacaaaacaaaggccttggacccagtataaaaggaacattcttttggggatcaaaggggggcattgacctagggatggtgtgcagcaactagatctcccatcttccattttcctccatttcccttcattttctcctttccatttgtaattttgtggtctctcatgacaatgagaggctagtttatcctttgttggggaattgacgtattaagtttactcttatgtagttaatcttcatatttattcagcgtttattcct

SEQ ID NO: 50631 - DNA, 151 bp, Glycine max
  Clone ID: PAT_MRT3847_16730C.1
attaagaattttagttacataaatttgggggggtttgctttaagggggaattaaccggacaccactttttgcgtttttaacatgaaaataaacaatattttctctatagagcttaaggtgtggactaaaatgccccattttccttgggaaa

SEQ ID NO: 50632 - DNA, 729 bp, Glycine max
  Clone ID: PAT_MRT3847_16731C.1
ttacaaactttaagtgctaatttcacacgtgacaagcctttgaccaaaccttggtttggaacattctaaacttaaaaccaaccatgcatgaaaaataagagaagtgatgtctcattcaacagaagggaaagtgcatgcatagtatatctatacagaaattctattttgcattcaatttgcatcacttgtagaagtaatacaagataaataaaactgttcccaccattagagaacatgtacaaccaaataaacgctactgaattttatgaatgtgtcagaaatttgggtgatagcaaagtagccaacaaaggaaactcccactgatagaatatcgataaattcagcacaagactatgagcaccttctaccacaagaaaattttattagcctttttaccttgttcaaggaaagtcagaaatttccacaagcagtggtccatcttcaagtatgtacatgttggtcagtaatatggtaaaatggcccattggagtattgctttatttgggagattcatcattctcagacttggcctttgtttttcccttgactggttgtccataaccatcatcagtagatggaacagcagcagtaagctgtcccatcttgttgcaaatcagtaagagaagatcaatggagagtggagataaggaacagacatcacggccaaatgacggcggagattccttggtcacttttcctttaggacttttctttttgtccaccagcttt

SEQ ID NO: 50633 - DNA, 125 bp, Glycine max
  unsure (1)..(125): unsure at all n locations
  Clone ID: PAT_MRT3847_16732C.1
caagttgcaaccacttttgggattttcacagctaacatgatgttcanncctcctccgaaggcgtgnnggncccanctcnganaaatcnggctattccgcnntntttgtcagagatggcacnanna

SEQ ID NO: 50634 - DNA, 217 bp, Glycine max
  Clone ID: PAT_MRT3847_16733C.1
gcgtgctgtgaagccttgtgccatccataaccctaccaaaacaaactgactcaacacatgtgctgctacctgagtctcactcatctgctgagatgcagtgctacaaagatgaatatgcaagatctcaaagactcctcactttggttatactgtcctttccatgagcaccgtctgatgcacaacatctttctcaaatttggggaagtaatatcacaaa

SEQ ID NO: 50635 - DNA, 216 bp, Glycine max
  Clone ID: PAT_MRT3847_16734C.1
ggggaaacgatttttattgggacaagagggtgtacaatggatcagggggcttgaaagggttaccttcagggcaccccttaaatggaggtccattccgtgatggagcccaccaattcttaattcgagttcccacttttgtttttatggaagaattaaggaacctatcttttaccttacctccaaaaagcaaaacccagaccttttttaccatttttt

SEQ ID NO: 50636 - DNA, 515 bp, Glycine max
  Clone ID: PAT_MRT3847_16735C.1
cctacgcgtccgcccacgcgtccgcaggaccctaattccacggtacaacgaagcttcttattgtgctttgtttggggttttatagcttttttttgtgaggttactgttttagtgttatttacatggttgagttctgcaagtttttttttttttttttaagaaaagaaaaaacaacagttggtaattgcaattgaagccaaaatgttgaaatttgtgggttatctgcactgcgattgtgctcggatttggctacaattttttgcggtattaaggattgtgaagaaatggcaattctgtctgcaaccgcagcaattttaaaaccttggagttttgtatgataattgttggtgttctgctctagcttcacagttcacacatggcactgaatgtgcaaagtagggatgtgagactggtgctaggttgggtgaagggctgatgaccacttgcagaagttccggcactcaagtcagtgtaacaatagaagtacgactagttaagagggagcagagccagtc

SEQ ID NO: 50637 - DNA, 400 bp, Glycine max
  Clone ID: PAT_MRT3847_16736C.1
acactaggcagtgggctcccggggttgctctcactagacacattttctttttataacataagccataaacaaaaaggtagagaaccggaagcatatatggaataagagattaaaggcaaataaccagaggcccgggacgaagaaccaatgaaagcccttcatagtgctggtagtaacggagagacgactcttgatgctagtgatgacgggcagagcaccaagaaataggggagggcggataccaatgctgaagcaagtttaaagcaggagtgagacggggagaatgtagactttgtggcacttgggagagcaatagctatgagaaatgagacttgacctggattctcctaacgtggccacttaccatttctgcatgtgcccatgatactacacacctgat

SEQ ID NO: 50638 - DNA, 331 bp, Glycine max
  Clone ID: PAT_MRT3847_16737C.1
ggttgtgattactacattttttttttggttttttttgaataaaaggaccccgtgtttaaaacatgaagccgaaaaaaagaggctcataagaagaaaaattcaagtctcaattacggttgcataccgggggggggggggaggatccctcccctttaactcccaggagcccttccaaggggcaaagggggggggggggtccaaccaccaaagcaggagggacttaaggggcaggataagggaaaggggggaaggcccgggcccaatgaacagaccaagcgcaaagcacttgatgtaagttcagggagcccctcaggaagaggggggacccccc

SEQ ID NO: 50639 - DNA, 268 bp, Glycine max
  unsure (1)..(268): unsure at all n locations
  Clone ID: PAT_MRT3847_16738C.1
taccnaagagaatggctcccaagggnttaatctttttggctgtnttatgcttctcagcactgtcactgagtcgttgtcttgcggaggataatggactngttatgaacttctacaaggantcatgcgtcacgctgnagacatcatcaaanancaantcangcttctctacaagcgcnacangaacactgctttctcctggctcananacatnttccatgnttnnncngttcatagntgnganncttacnngttgctggnctccacaagc

SEQ ID NO: 50640 - DNA, 458 bp, Glycine max
  Clone ID: PAT_MRT3847_16739C.1
ccacgcgtccggtttgtttgtgctgtgaagatttcttatctgggatctctctcttccaaattcttctcctttttcttcttttcattttcctctttctctctctaaacaaaaataaagaaagaaaaaaagaaattaaagtttctattgatgttcttccatttatgcgagagagagagaggaagaacaagagtgaccccagtagatcgaaatcgacgatctaagcttcttcaatgttggtgcagaaatacccacttcgctgtttcggctacaattggtggttttagcaaccttttttttttttgcttagtgagagagtgaaacactgattttttttttctttctttcttcatttctgatggtggaatggtggaaaatccatggtggattcttaagagcacgtgatgagaggatgtgggtctaaggggagggaaccaaaggtcagagggtggcaggatata

SEQ ID NO: 50641 - DNA, 409 bp, Glycine max
  Clone ID: PAT_MRT3847_1673C.1
ggagcagggcatggctcactagacctgagcagcgcagctgtggctgtgactctctttgatactcgatcatggataccagatacgtagtaggctcgcccaaagatactccgaaacagctctctccatgcaaagagggctggaagacgcgagcataggagattactactggcttatgacagacctggactggcgcatgagctatgagggcttgcatatcatgcagagacagcagaagtcatgtagtatgaagcctgctgagcatttatctagcaaggacattgattaatgcctgatataatgatgcgagagtaatccctcgaagaagacaaagttgccagagtttgctggcattgggactatgaaggctgcacgagcacagtggctagcagagatgagtgcagcatataat

SEQ ID NO: 50642 - DNA, 774 bp, Glycine max
  Clone ID: PAT_MRT3847_16740C.1
ttggggtcccccaaaaaaaaactttttaatctcacgggcagggaaattaaacttggttctcttaaaaggcccccccccacgtatgtaagaggaattaagaccatggaattctttaaggcgacccaccctctatttggttgtttatttcttttttttattttttttttttctttttttttttttcttttttttaggtaaagaatcagaaaatgacaattccgattaatttgtacatattcatgacgctgtctgcttgtactattatacattcatgaacaaagacttgtgtaaccccacaaaaaaaaaaattacatatatatctgtctcaaccttcatcaactaaacgaataatttgtcataaaaagaaatcaaatcaaaatcaaaatacatacaattatgaaatcattccaacccaagaacaaacatatatattcggtcaccatcaaagaagtctaacatgatacttgaattacttgaattattcttacgaatgaaaacaacagatcatcgaccaacactcacaagactagaagtaatgggtgtggacatcccagaatgattcttaccactgggatgatgtggcatcctaatgatctccataggaggagcacgttcatacatgtcaagtggaagaacaggcaaaggagcctcaaggttcaaaaccttaataacttgtgcagccttaggtctctctttatcattcggattggtgctcctgcgccccaccacaagcaaactcctcatttgatccacctcaaactcattgttcctcgt

SEQ ID NO: 50643 - DNA, 346 bp, Glycine max
  Clone ID: PAT_MRT3847_16741C.1
aaaatcaaaattaatgaccttttccttttttacttcctaacgttttttccggcaccaaaagggaaccattggaccgggaccaacccccttcccttccggaaattaattattttccaaattaaggtttaaggccttggttttatttccattttattccttgtggccattggcttcttaatagatttaaaccacctggggcttttttttttttgttgtggaagggataaggcaactttccttgtcaaatggattggattcaaggggacctgctttaataaactcaaaacctttcaactttttttccttcgaattctttgaaagctcttcaattatgtaacttttggct

SEQ ID NO: 50644 - DNA, 486 bp, Glycine max
  Clone ID: PAT_MRT3847_16742C.1
atagcggggcggagggatgaaacagaaaaagcggaggggaaaccggaaggcgcccacaattccacaaaagagaggagcagaaaacagagaggaaaaagggggggaggccgaaggagggagaaaactgaaatcaatggaaaagcccaaaaaagaccgcaacccaaaaaaaaaaaggggaagggcgggggggccaaagaaggggccaaccccacaaaaaagaggggggccgcaaagggcccgccagggggggaaaaacctgcccccgcgagacgaaaaaaaaatgacccccccccacggggaggggccggaaagagttggggcccccggggcactcttttttgccccaaaaggaaaaaaaaaagggggagggggctaaacggggggacaaaaaaaaagggggaaaaggggtccccgggggcctcccccaaaaaaggaaaaccaacggggggggggggctaggggggggaaaaaaaggggcccggcgcc

SEQ ID NO: 50645 - DNA, 299 bp, Glycine max
  Clone ID: PAT_MRT3847_16743C.1
ctcagaaaccttaacagtggctattggagcgaccgaggtattaacgctgacacactctggcggacaacgattggagcgaggagacaattggtgcgaacagtgacaaggaacagagtagttcctatgtatctcagtatggcgtagatttcaagatcagggtacaaagtatatgctgctgcctcgtttgctggtgtggccgatgtcgccactgggctcccctttgacaccgacagtgtgatgctgctatagctcactgcgtgagcacatacgatttatgttaagcatgggtggcattgcac

SEQ ID NO: 50646 - DNA, 1124 bp, Glycine max
  Clone ID: PAT_MRT3847_16744C.1
ggctgcgagaagacgacagaagggaggagggagcggagccacatgattgggagatcccttgatccgtatttcttatttgtttccattttttcctgttacatatcatcttatttttgtttgactaagggactaacgtttgtttcgttttgattgacttttgttttgtacatacatatcgtttgagttgttacgtcagtacttgtttcgttgttttcaatagtgtttgttgaaattccggaatcgcgtagaatttttttttttcatttaggaacgtcgtcctaaaaataaaatgaaccaaaaatcctaataaaaagagagaagtgttgtgaataaaatttttgcgtatataaagaaaaaggaaaatgtgcatagaagggtttttataaaaaatacgtgtagagaaattcttgtgtgtgtgaacaatgagtgtatataaagaaacttttgtatgaaccataggtgtgcattggagaaaaacaaaaaagatctttgaatgtaaatagggtttgaccgtgtgacgtaaagagagagagttccaatgcgtatatagaaaaagtttgtcatgaataagagtgaagatatacaaaagaaaatttcttcatagaggaccataggtgtataattttgtgaatatataaaaatgaaacaaaaaggaaaaagaaagaaagaccgcgaaggtcgacatgttatagttaagaagtataaatcattcgtaaagagcaaacatatcttctggaaacaagggactgatgctaagagtttattttccagaataaccgagataagaatggatgaattcattgaactgataaaagaacataatttgggaacgttgggtctgtttgtgcaaattcccaaccgtagtatcagaatgtcataaacaggatgcttgagtgcccaccttggctgtagccatgactaattttgcacgttgtttccaaatcatcattgttacgcgcgcctcgtggaaataatatgggagtttaaccaaaaaccgacaccctgacacatgaatttgttttgccccaaatatcaaaatcgggcacacacggtgagaagaccatgttgagacacaaccttaagctaccttgaaccttggcccatgaagagaatccttatcttac

SEQ ID NO: 50647 - DNA, 247 bp, Glycine max
  unsure (1)..(247): unsure at all n locations
  Clone ID: PAT_MRT3847_16745C.1
gtgcttcaatggggtttggttatatgaaataagttatttaaagggatggaaaatgtggtaaaatgaggcacaaacatcacaagatgagcttatctcatcctgtgtttcacanccgatgtnacaagatgcgataancncatcttntgatgtccgcgcttcaatggggtttggttatatgaaatnagttatttaaaggggtggaaaatgtggtaaaatgaggcatttttagtgtattcaaactttttcc

SEQ ID NO: 50648 - DNA, 355 bp, Glycine max
  Clone ID: PAT_MRT3847_16746C.1
cttcttcttccttttttgtccctttgaaaagctaaggaattgctgaattggggtattacatgaaaccttctgcgagtggttcataagtttcctgtgtctctgttcttcttagaacaagtattctctgatgacccttttcattatccaacacgctactgtgttctgaccccatattccaaaggggtttttgttttctgatcaaaagctcttttctttgttaaaatattggctagttgttattattgtgttatacccttttacttcctttttttctgttttattttctgttgttgcgtttagtttaatttggtgagtgcgtgtttttggggttttaattttattttagctttttatg

SEQ ID NO: 50649 - DNA, 398 bp, Glycine max
  Clone ID: PAT_MRT3847_16747C.1
acggcacgtgcagcgcgatactcagccttcggaacacgctactgctgtatcacagttaccgattgaattacccacacgctactatgtcgacattgggcttcttctttcctggacattgactttgaccttgcttcgtcctacgatggccactgttctgcacccattatgattcagatgactagctgaagctaactagatcctcctccatctacagatccactatcaaatgcttgactcaatatcctctttattcactagttgacaactcccataactatctcgagagcttacacgaaggggaacgtcattcctctcttatgctgcatagtctacgatcacctcactcagatgcttgcgtaccgctccctgattaaggaggacgagagagatgctcccag

SEQ ID NO: 50650 - DNA, 239 bp, Glycine max
  unsure (1)..(239): unsure at all n locations
  Clone ID: PAT_MRT3847_16748C.1
gcgcccaggcctccgcccacccgtncgcccacgctttcgtccacgcgtccgtgtacctntgtcggttcggtagctatgtgcattctacacaccctcactgtctaacataacactcgccattggctctgccaagacataaacaaatcgcacacactgaagatctccaacctcttgcataagacaatgcaacaggactggataaagctgtacaccgctggatacgacaccccacacgctga

SEQ ID NO: 50651 - DNA, 439 bp, Glycine max
  Clone ID: PAT_MRT3847_16749C.1
cccacgcttccgatttccacaaacgatgtcttagtttcgtgaatttcttcctccctcattgccgtatttctctctgttgaattgaatctcttattgcgtttgtctttacctgatcgatcaacaacaaacgttcagagtttttttttttttaatttattatttatgtttttccgatcgtggcaaacggtattaatgtaatttcattcattactgtcctcgttttgtctacattacgatcttaattgtcaattttgcgtgaaaacgctggattaattggagaacatggaaagcggtgttgagattgtgatttatttggttatcaattaatgcctgttttttttccatttccaataattaacgcgtttttgttttgtttccttatttaggattggatttaattgcacggaatggaggcttaaagcttcacagcacgtgtttt

SEQ ID NO: 50652 - DNA, 801 bp, Glycine max
  Clone ID: PAT_MRT3847_1674C.1
aaaatctcttgttcaactcttaaggccatgtaaattattcttgaaaaattcaatgctcttatatgtttatcaaaattgttagaaaaagataaatttaattcaagcctatttttttcttcatagtaaatcttctgattttgtttttttgacttctattacatcaggaaatgaggagtcaatgaatcaataaagatcaacttcaactactgcaagatgttagtggtgcttttagaccaggaattttgacaacacttgtggatgtatttgctggaagaaaaataggtggatacattgaaggaagtattaccatctgaggttacccaaagaaccaaacaacatttgctaatagaatattttgaagtgagtgttgaagtttttatatggctatatcgtctttagaacttagtttcatacattgtgtaccatggtatgcttagcgtgtgcgtgttaattttgaaatttgaaattacataaagttagggaaataaactaggatccatcgtaatgtatatgatatgtactcataaaacaaatagcatatatggatttgtttattagcatctcaggttacccaaagaaccaagcaacattttctcgtatcagcggttattgtgaacaaaatgacatccattctccacatgttactgtatatgaatcactattattttcagcatggcttcgccttccttcagatgtaaatgcacaaaagcgaaagatgtttgttgaagaagttatggagttggttgagcttaaccaaatcagagatgcactagtgggtcttccaggagtggatggtctatc

SEQ ID NO: 50653 - DNA, 647 bp, Glycine max
  Clone ID: PAT_MRT3847_16750C.1
atgggaaccatcattttatatatggtttttttggagctaaccgtcaccttttatcttcaatgtatagcaactatttatgtatgtacaacaccatatgttttaaatatttcagtataatagtttgtcgggttttcttttactttactgatactctgggaattttgttgtggtagttcttgtgaaacctccacccattgttgatttctatacgtgccatttatacacaattggcagcgttagcaagcataaaaaaccaacatgtagccaattgacaatgctgaagtacctttctatcactgacagtatatagagggaaccaatgatcagaagaaagtttcgcaaacttaattcacctgaagaaatcctttttaatatatttgcaaacgtggagtatatgaatagtacaagcatcatggtgatgaaaatgtgaaaaatgagagtcctgaaattagtcctgaaattgtactcaacgatctcaatcagaaaccatatcactgtcatcccaatcaaaagcgaagctaatacatttatgttcctccataataacgtagctgcatcgtttcctcttctaagaacttcttgcatcggtttctcccatttagagagctttgctcgtgtttctgatgctgaagatgatgcatcacgcg

SEQ ID NO: 50654 - DNA, 810 bp, Glycine max
  unsure (1)..(810): unsure at all n locations
  Clone ID: PAT_MRT3847_16751C.1
ataaaactcaaccgagttcacaagccttacggctgtagaagccgatccagtgtgttggcagcgaaagggtgagacaagaggcttcacctgcttccatgttacccaatttggaaacttggcataagcttgacaaaatattggatgctaccctaactaatgaagtgggtcgaaaggcatcaatctcgcaaggatctgcattaatgagggtggcttcagctgtgttttccgaggttccctccctcaaaaccatgagagatgcttctctgggtttagagactgtatcttttcatcatgctcctgtatttggacttatatgtggagcactaggatttgatagaactagttctcagagagcttacatgttcatcacaatgagagatgtgatttctgctgctacaaggctaaatttgataggaccccttggtgcagcattgctgcagcatcaggttgctcctattgctgaagttatattagaaaaatggatgaaatcgagttgttgaggaagcttgccaaactatgcctttgctagatactgtgcagggctgccatggttacttgttttcaagattgttttcatcctagaaggcaaaatgtggatattgcacttaatattttgatgcatgtaaaaagtttgtttgtaatagtgatgtgcttaagtttttgagttttctaacttcaatgatgccctctcttcattttgctgcagattatgtgatatgttttagaccgaactaattggtacattcattttgtgtactatttgtttatagngtttgcattgntggcttgttctttntgcctcactacttt

SEQ ID NO: 50655 - DNA, 357 bp, Glycine max
  Clone ID: PAT_MRT3847_16752C.1
gtgagcagcatacacagctgctgcggcagtcattgaagggaggaacaaatttgcggttccgtagtgcacacggccaagttctgctaagaaaaatgccatgtttttcatctgcacaatatgaattaaatgacaagcgaagcatgtaagctgtatttgatagttttttgtattcgagttcaagtatattactattacctgctgatctggtgatagagcaaaagttctggtgaatctaactaagaagacatagggggttgggacagtcaatttccattctagcctctccagaattgctttctccatggaaaggatctggattctggagtaggcatcattttgtatgcttatgaattcttt

SEQ ID NO: 50656 - DNA, 1143 bp, Glycine max
  Clone ID: PAT_MRT3847_16753C.1
tacggctgcgagaagacgacagaagggggaagatggacaaaaatcggcgacgatccaaatccagttctttcatttacggtcctaagtgacacactcgattctggctccgcctcagacgaagaagctcgctctggattctcactcacctgaacggatccttcttcttccttatcgcgaaatccatacttcaaaccctaatcgcgactgcggtttatgatttgtgacacaacacaaagttgacgaaggtggtttttcagcatttgtattctagtattcttctacataagttgaagcgaaaatgaggattatgataaagggcggtgtttggaaaaacaccgaagatgaaatcctaaaagcagctgttatgaaatatggcaagaaccagtgggctcgaatctcttctctccttgttcgcaaatctgccaagcaatgcaaagctcgctggtatgagtggctcgatccctccataaaaaagactgagtggacgagagaagaggatgagaagctacttcatcttgctaagcttatgcccacacagtggagaacaattgctccaattgttggccgtactccttcccagtgtcttgagcggtacgagaagctccttgatgtagcctgtgtgaaggatgagaactatgagcccggtgatgatcctcggaaactgcgtcctggggagattgatccaaaccctgagtcaaaacctgcacgccccgatcctgttgatatggatgaagatgaaaaggagatgctttctgaagcacgagcccggttagccaacacaaagggcaagaaagcaaaaaggaaagctagggagaaacagcttgaggaagccaggaggcttgcttctttacaaaagaagagagaattgaaggctgctggaattgatattaggcagcggaagagtgggagtgttcctgttatttagtaaccttggtggaatttttttgggtaggtgaagggtacaggtacccaatacatgacgttaggatttagctccttttttgaagctgataaagtaaattattcaaattgggtatcctgtcatctgctttgtacatgaaaacttctattatatgttggatccagtgggcgcgattctctgcgctccttgttcgcaaatctgccaagcaatgcaaagctcgc

SEQ ID NO: 50657 - DNA, 1185 bp, Glycine max
  Clone ID: PAT_MRT3847_16754C.1
cgtacgcacgaccgagttcatcagccttacaatcgagattcatatgcatataaaactcaaccgagtccacaagccttacaactgtagaagccgatccagtgtgttggcagcgaaagggtgagacaagaggcttcacctgtaatcagacaattgtggtcaatgcgagagtcataccattacaatgcaagtaaatgaaggacacaacagaccttgctcagacccatttttacagtggagtaaatggcagttgcttgattctcttttacctactggtggatttgctcattcttttggcctcgaagcaacagttcagtcccacttagtgtctaattccaatgaccttaagacatttgttatccatatattggagaatacaggaagcttactccttccttttgtgtactcagcttccatgttacccaatttggaaacttggcataagcttgacaaaatattggatgctaccctaactaatgaagtgggtcgaaaggcatcaatctcgcaaggatctgcattaatgagggtggcttcagctgtgttttccgaggttccctccctcaaaaccatgagagatgcttctctgggtttagagactgtatcttttcatcatgctcctgtatttggacttatatgtggagcactaggatttgatagaactagttctcagagagcttacatgttcatcacaatgagagatgtgatttctgctgctacaaggctaaatttgataggaccccttggtgcagcattgctgcagcatcaggttgctcctattgctgaagttatattagaaaaatggatgaatcgagttgttgaggaagcttgccaaactatgcctttgctagatactgtgcagggctgccatggttacttgttttcaagattgttttcatcctagaaggcaaaatgtggatattgcacttaatattttgatgtgtaaaaagtttgtttgtaatagtgatgtgcttaagtttttgagttttctaacttcaatgatgccctctcttcattttgctgcagattatgtgatatgttttagaccgaactaattggtacattcattttgtgtactatttgttatagtgtttgcattgttggctaaaactttttgctttacaactttagccttcaacaagaattaatgtgacgatgttttgaaattttatgagactaatttttgttccc

SEQ ID NO: 50658 - DNA, 337 bp, Glycine max
  Clone ID: PAT_MRT3847_16755C.1
acaattctatgcattgctcgagcagacacaggtagtccactgcctagatactttattttgtaaactgcaaataaaccattctatcatcttctgcaatgcatggagtggggttgcactacttgccaacataatcaccgatcttgggtattcatgtttctacattcatgcactgatgttgcggcaccatcgtaacatagtgttttatgacttccgccctgctgcatgtctaaatttcgtttgaactgatctttcatctcgacgacttaacattctaccgcataatgtagaccttactctctattatccaatagattgcaaagacatatatgtgcagtgg

SEQ ID NO: 50659 - DNA, 440 bp, Glycine max
  Clone ID: PAT_MRT3847_16756C.1
gtataaaatgataattatcttttctttatggaacagttcgggatcttataccatgcaaccacagtatggctggcacatgatgacacacgttagaagggtcacaggatgggaacactcctcattaataaacccctgagaagttcctcctgcccattcctgtctttgattattatattctaacgatctagacgattacagtgtgagaaaaatgtgcgttaactggcctttagaaacacgggattttaacttgtccccttttattcgactactatgagaggttggtacacgagtatccactgttgggattatgactggctccaaattgaaaccctcttggtgacagtgaagaggatgcattgctactgataacgtgcctatcctccttgtgatcacgggatgactgatcacaatgggaattggagctctaatggctattatga

SEQ ID NO: 50660 - DNA, 468 bp, Glycine max
  Clone ID: PAT_MRT3847_16757C.1
gaagacgacagaaggggaaccaagttaaaaaaaaaaaaaaaaactttaggaaatcaaatgaagagagagaagatggcttgtgtttacccaggacagcttctcttgttgtgtctgatactgagcgtggttccaatagcagtttccgcaggcaatgacgcagcacccctgaccaaccatgggggacgcttgctgactggaaagttgaacgttggcatcttatggtacggcccaattccaaaggcccaaaagaaagcgattttgtccttcttcaggtccctgaacatgaacacccctgcccctgatgctgctaagcaaccccaagtctcatcatggtggaacattgtggagagctatggagctgcatctggcaataataataatatcccggtgaaggtggtaaaccaagttttcgatccaaactactcttatgggaaagtcttgatcaaagatttcattaagcccctcctt

SEQ ID NO: 50661 - DNA, 342 bp, Glycine max
  Clone ID: PAT_MRT3847_16758C.1
ctatgggaaagcactcgcttcacccctcccggggccgtattggctgacttaaccgtacttccactaatgacccagacccttgcttaaagactgatcgcgcctggagctctacctatgcagacgccctcatgaacgtcggaatgcctgtgcttctgccttcttctataactgcatcctcttggggtggctatatgcgctagcgccctctagtggaactaagaatgctccccataaaaaactatagctttctggcgggctggtttttggacaccagccttgactgtgttccacgcttgcgacattatgaacaaaaggatctgcccgactttttaaggaccacag

SEQ ID NO: 50662 - DNA, 246 bp, Glycine max
  Clone ID: PAT_MRT3847_16759C.1
tactgctgcgagaagacgacagaaggggaaacagagagatcgaggacaccatggccaacaacaacgaagaggaagaggaagcagtggcgccaatggtgaagttgggttcttacggtggtgaggttcggttggtggttggtggggaggaatcctctgtctgagatactttgctgcttcggtggttttcagtagttctcacttttcattctcatagcctttttttttcaagctttctttgtacttctt

SEQ ID NO: 50663 - DNA, 487 bp, Glycine max
  Clone ID: PAT_MRT3847_1675C.1
ttttcctccctttccctctttcttttgctcacatacataaaataacttcaaatggataacaatagttcacaactagagtgaatatcgaataaatgcgaaccattgctaaaaaaatacttgattacctaattgaaaacaaaaataccaaaaccatagtttattataacaacagggcgcatattatagcaaacaaaacactacatatgatgattaaacttcaccatatttttctatcaaaagcaacttatacagctgctgccttagcatcactggaaagtttggatctccttttgaccaaactttcactgcggcggactttctgctccttgaacctggaggcaaggagtttctggaactctgctgccttaaattttgccttgccaatgctcttcttcttatcacgatttcttggccgctttttttggagcggaaaaggaggaaccagtctttgtatcttggaaactttgctcacctttttcccagcttt

SEQ ID NO: 50664 - DNA, 2017 bp, Glycine max
  unsure (1)..(2017): unsure at all n locations
  Clone ID: PAT_MRT3847_16760C.1
tgctcctaatcagcaggtacagtaacacaaatgttcatcaatttaatttttcacgatttaattggaaaatttatgcaagtatatattgatgatgtggttgtgaaatccgagttaaaaaataatcaccttaagcatttgaaagtatcatttgaaagaatgagaaaaccatgtattaaaatgaatcccttaaaaatgtgcttttggtgtatctacagggtattttgtgatccatcaaaaaggaatcaaaatgaataaaaataaggcaaaagccattctggagacttcctctccaaagaataaaaagcaacttcaatcattgttgggtatggtgaattttcttagaatgttcatttctaatttatcaggaaaaactaagttgttttctccattatttagactaaagaatgaatttgatttttgatgggaacatgaacaccaagatgctttcgatggcatcaataaataattccaccagttttagtgcttcctgtggaaggaagagatcttaagttgtatattttagcatcatattcgatcattgtaagtatgccggtgcaagaagatgaaaatgacatagaatgtgcaatttattatcttagtcgaattctgaatgataatgaaactaaatatagtcctattaaaaagttatgtctttgtttgtatctctctagataatatacccttgggaattttattcaaaattagacctacatgttcaaataatgaaacaaaatatgaagtgttgatagctgatttagagactctaatagatttaggttcaaaacatgttttaataagaggagattcataattagtgattaaaaaattaaataaaaaatataaatgtatcaaaaataatttgttaaggtacttttctcaagcaactaggtagttaagtaaattcgatgatctagaatttaaacatgtgtatcaagaagaaaataaagaatcaaatgcctcagtacaaattgcttttggttataaattaagtgagcaaaatttcaaacttaagataaatgcattaataactcttgattggcaaaaacctttggttgattatcttcaaaatctttgtttacaagtagatcaaaagacaaaatataaatatgtgaattatgtgattttggcaaatgggttatgtaaaagaggtgttgatggggtttggttaaaatatttgggagaatctgaagcctatatagcattggtagaaacccatgaagggatttgtggttcttaccaagctagtgaaaagatgaaatgaatgttatttcgacaagggtactattgacccactattcttgaagattgtataaattatgctaagtcttgtgaagattgtcaaaaacatggtctaattcaacaagtatcaacaagtgaattacattctatgacaaaacctgngccttttcaaggatggactntagtttgataggtcaaatacacccaacttcatttagaggaaaaatatattttagttgtagtggattatttcatgaaaatgggtgaaagccattcctcttaaggagttgatcaaggtgatataataaattctattggaacaaaatatcatatttattggacaaaaaatggttcaatatgctaattctcgaaatataaaactattaacttctactcttttctatgcataggttaatggtccagtggaagctattaacaaaattcttattagcttgattaaaaaacatattggttagaaacaaataagttggcatgaaactctgaatcaaatactttgggcttatcaaaattcacccaaagggacaataggggttactccttttaaattagtgtatggacatgaagtagtattgcccatcgagattaatttgtactcaattcaattacaaagacaaaatgaaattcccatccaagattatttgaatatgatgtatggtgagttgaatttattagatgaagagagattaaattatcttgaaaacattattcattaaaaataaaaagttgctaggcattttaacttgccagtcgtaatccg

SEQ ID NO: 50665 - DNA, 468 bp, Glycine max
  Clone ID: PAT_MRT3847_16761C.1
cggctcgagcggctcgagcggctcgagcggctcgagacggctgcgagaagacgacagaagggatgggtattatgctattactgatttttttatcatggaattatgtattagggttgggggataatttataaagtaatcttatgaataaataatgtatattttattattactcaataaaaagttattatatatatatatatatgatcaacttattaacttttatcaataaataaaattatataaaaaaattcctaattaattaataatataatactttttacactgacattgcataaaaatcgaattctagaattatttatatgataatctctcatcaccttattttttataattatataactctctcattgttataaagtaccataacattttgttaaaattacattcctctaatttatatgtcactttttctttttactcatgttcttattcaaaattgttgcataa

SEQ ID NO: 50666 - DNA, 243 bp, Glycine max
  Clone ID: PAT_MRT3847_16762C.1
ctatccctttagcttagacttttggctgcgtgatgaggatccttagcgatcatactattcagaggcataacgaccaccaccaacgccacaacaacattgattgtctggaggacgactccagaaaggcgtttggccatcacggtagggccaggacaggagcatcatatgttggagatccctgtgatgaacatgaatcacccatcgttcatgcagatgctgagctaggctgatgaggaatacggg

SEQ ID NO: 50667 - DNA, 274 bp, Glycine max
  Clone ID: PAT_MRT3847_16763C.1
ctcctacaggacaagggcattagtcagatgagggatcggtccttatgctctctgctactgatttaacgtgggaaccgtctcatggtcgaaaacccctgtccatttgcctgtgcatcgcaagcctggtttattttgatacccggaatatcccactgatatcagacgctgcaaccctcctcatgtgaatgtccctcacaagccccaatggaaaatccaaggggcatgtgtgggctgcctctttaagaagcgcgcaaaagctaaaatcctcacggaa

SEQ ID NO: 50668 - DNA, 298 bp, Glycine max
  Clone ID: PAT_MRT3847_16764C.1
ataaatgttaaccaagggaagtatggatccgggtgatgaaaggctcagaaaagattaataatccaactcagttatatgcgcatatgtgattctatttaaaactacacatatggtttaagaccacaaagtttatcgaatagggtttgcaaacaatctaacaatatcggcgggaacacgagcaacctcatgcatagcattgttctgattaaagagtggggaattccctgctggagataaatcacgctcacaataagtaacctaattagcatgatccttagccccttggccagcaaacttg

SEQ ID NO: 50669 - DNA, 421 bp, Glycine max
  Clone ID: PAT_MRT3847_16765C.1
gaatgacagaagctaatttgatcctactatttttgcaacatttattctataaacacgcaatcgggttggactggccccaacaaacttttatttatgttgttccgccgttgcctgcgattactccatactgcccctcttttatccactttcctcaaggggaggtgctactttaatgaaaacatgctgtaactgtttggaagagggctcgattgcatggtaaccaactcagttctctcagtttaagccaggccaccatgatatacttggaatagggttctttgccaacaaccttctatatgataactaggtttgcatatgatgaacttagttcgaatgccattgtgcattttttactcagtatagataggacctttggctttgatgtaccggacgatagaacatccggttccaggctaagaaa

SEQ ID NO: 50670 - DNA, 282 bp, Glycine max
  Clone ID: PAT_MRT3847_16766C.1
gagggaactaacaagtcattatttataaaataaccatgaaaggaggagcattttacacctgtatggcttgacaagaccacacagcgcactatatgcttcataccaaatacaccagttttcatttctataacgaatattcaagaattttgcgtttgcatatgaacatatatagatggaaagaatctagctatccagccgccgaactcttccattgtaagcagattgtcgctcaagctcataagaaattgctcttccaacataagatagatacctatccataaa

SEQ ID NO: 50671 - DNA, 355 bp, Glycine max
  Clone ID: PAT_MRT3847_16767C.1
cccacgcgtccgctaggtttttctctcaaaatttcgaatccccgattttctctcaattcgggtctgccattcatcgtaacctatattattacatagttatattatctctctgcgtatctttcagcaattttctattttctcctctcatggcttcagattccaaaaaagatttccctgcttatgacatacctggaacagaatagagtcaaacatccactgatgagacttcatctaaagattctacagcagaacatagagcgacatcttctttcggacctagacctggacctgctgggcatgcaagcaacccttttgatctctcagcaatgtctgagctgctcaatgatccaagtat

SEQ ID NO: 50672 - DNA, 264 bp, Glycine max
  Clone ID: PAT_MRT3847_16768C.1
gcttagaaagacccctttggtgcttgtgcccggggtgggtttactgggcttactgcggttgaacacttacttgatcctgaatgtgaagatgtgctttcttttcgtaaacaacattttccggtttacccaagccaactgatacgtgtacgatttgcatggtcctgttcatttggctgatgcttctaacccaacttcttagtgcgtctggagaccacaactaagcgataccatctatcttgaagggagaagacaccgatgcgcaag

SEQ ID NO: 50673 - DNA, 367 bp, Glycine max
  Clone ID: PAT_MRT3847_16769C.1
ggattcttcttgctccattttgaaaacatgctgattaaaatgttgctgaagcttttcattggtcaaattaatacaaaattgctcaaaactgttagtcttgaaactctcaaaaccataaatatccagcacgccaattaaggattttgactcggggtcttgaccaatagaattattaattttatcaaccaaccagtcaaacaatcttgtgtacacaatcttagccaaggcatctcggctgagtgcagcagcttccggatccagccattttgtaattgtttcatcacgagtaacaattacacgtttgcaaagagaatcttcaagtgcctttgcatcacacatgaaaagctcagcagcagtctgtagatgg

SEQ ID NO: 50674 - DNA, 582 bp, Glycine max
  Clone ID: PAT_MRT3847_1676C.1
gtctagaatttatcggttttttaggaagtggcaactctgttatagagctattgagatatgaaataacttgtgccattttaggtctgtcatccggcttctcttgtacacataataaaccaatttggatgcatttaacaacttcactgtgatcacaaaactccgccttaatactttggtcaaatatgtttaatggtgcttcatccatccattgttcccaagcataactcaagaggtcatcatgatcgggaaaagcagaacgcgaattcctttttgcactaattatctccaaaactataactccaaaactaaaaacatctgacttttctgaaaattgtccatgcattgcatattccggagacatataaccgtatgttcccacgatcctatttgttcttccttgatattgatcaatagcaacaattcttgccattccaaaatctgaaattttggattcatattgctatctaacaatacattactaggttttaaatcccgatgtataacttttaaccgtgaatgttcatgtaaatatgaaattccttgtgtaattccttcaataattttgtaacgttccgaccagct

SEQ ID NO: 50675 - DNA, 367 bp, Glycine max
  Clone ID: PAT_MRT3847_16770C.1
ggaggtagtgttcaatttctctttcatagctataatagatcgtcgaattacagatctttgaagattcgatttagtgtctaataatcacggaatcaaatcaaattctcgattggaattttaggaatcgaggaaggaagggttaggattagggtaaggattgggaagccataggagaagagaacaagaggaagaagaggtcaattcaaaatgccggaagaggatttggtggacatcaaatttaggttgtacgatggttccgatatcggacccttcaggtactcctccgccgccaccgtcgatatgcttaagcaaaggattgtctccgattggcccaaaggtaaaactgtcgtgccaaagtcagctaatg

SEQ ID NO: 50676 - DNA, 579 bp, Glycine max
  Clone ID: PAT_MRT3847_16771C.1
ggagatatgattcccgattgtggcttcaccgtgtaacgcgttttgatcaacggttgaagcctgaatgctacgggcatggtgtacatgacgttgcgtagggttatttggccatgacatttttggcctggctccatccttattgtgaccgtgtttgttggatcaacttttatcagcctgtccatctgattgttgagagtcaaggtattaaatatccgtcgtgttgctgttttgtcaggttttttttgttgatatgatgacaaattacagacaaatgcgattaatacaatcctaattgtggtcgcaaacagttaaacaaactttgatattaggacccaaatgacgatcgtggacaaatgttgcggttcagatcatggtcgcggaggattgtttttgaaaaaccttgagttgagttactggtacgtactctttgttgttgttgttgttgtttctcagttctctcagtttagggttttgaagaagaagggaattatgtggatgaatggccgtgtgcctttaaattttaagggaaggggtaatgggagaaactatatgtgtgaggggccggcttggtttactaag

SEQ ID NO: 50677 - DNA, 382 bp, Glycine max
  Clone ID: PAT_MRT3847_16772C.1
gtatagcatgatccaatgtatataaactgtaaagagtctttattttttctctggctgtgctacaatattgtcacgtactgaccattgtgatgaacatttaagtttaaaacttacactaattagggttgggatattctttgtagtgctatgttagtcaattggtttttatatatttagattaaccactgttaagcgatatacttgctcaatcataattaatcctacatactactactagctaggttgtattaaccaaggtaatttgcatatgcaacttgatctggttttctttctttgttgacccagtaattaaatgttcttatatatggtaggttgaatatggtattgccactgatatatataaatggtatgagtcttggca

SEQ ID NO: 50678 - DNA, 869 bp, Glycine max
  Clone ID: PAT_MRT3847_16773C.1
ctttcttctcgagaaaaagttataaagttattatctttgtctgtttcagaacaacccagttaataatataaataatccttgtttttgcaatatttttctgagaacccatttttcattttctctctcatcttgtggtgctagttgttcttttgagaatagtgggtgtttttgtgcttaaaactataatgtctgtcttaaagtacagaaatctttttctttgtctggtttcatggttgtgctgttgttgtgtggctgtggcttcgagtgagagtagtattggttccaaagaccttgatcagacaccaacatgggctgtggctggtgtctgcactgttttcatcttgatatccataactctggagaaaagccttcacaaagtgggaacgtggctaagggaaaaacacaagaaagctttgcttgaggctttggaaaaggtcaaagctgagttgatggttcttggtttcctttcactgcttctgactttcgggcagagttacattgttagaatatgcattcctatggatgtggcagacaaattgttgccatgtccttatgttggtaacgacaagggatcaagtagtgaagaggaacaccgtaggaaacttctttcttatgaacgcagatatttgtcagatgatgctaccccttaccaatgtaaggagagacatcagccacttatatctggcaatggattgcaccagttacacatcctcgtatttttcttagcagtcctacatgtgttttacagtgccattacaatgcttctttggagattaaagattcgtggatggaaggcatgggaggcggagacttcatctcatgggtacgagttcgccaatgatccttcagaattccgggtgacacatgaa

SEQ ID NO: 50679 - DNA, 450 bp, Glycine max
  Clone ID: PAT_MRT3847_16774C.1
ggtactcaactggagactacggaaaattggaaccagttacccagcgcacttgagacggaccgcggtttccatgccacaacgcgagcacagtaccctacattaatctaggaagtcgcagatagctcctagacacgtccgaacggaattaggagcgaaagatgactatcacttttgctgctcaaagattttaaacattagctgtagccacaaacaaaaacaacgacccctcttgcaaaggatattcacgtacacgaaactacattcaaaatctatggtaaaatcaatgcaacccacattgtcattaaaaaccatgaccattcaattttttagacaaatattatggggaccatgcctcttgaacagtaccctaaacgttgcttaggcatcagcaaacccttgttgggaaagctattggtgagcctcaccgaacttatcaaagaaggaatcatc

SEQ ID NO: 50680 - DNA, 331 bp, Glycine max
  Clone ID: PAT_MRT3847_16775C.1
gggccattggcaacatgcttgtgaaggtagctactctgctcacttacaggctgcacaagaacattcgaccactggcgatattcttgatgaccaatgctggagccagtgtgaaagataccggccgggttgttactcttggaccacgggcagagccatgccatatcccacataagccggctcgcaatgtattatattttttgcctctggggatacatcttcgaggatcggacgggacgatcgctgatacaacaatgctgctcaaatgcagaacagaactccttctgccccaatatatttatcggcgaaaaacaatggtgcgccctcagcaaga

SEQ ID NO: 50681 - DNA, 425 bp, Glycine max
  Clone ID: PAT_MRT3847_16776C.1
aaacacaacataaaaatatatatttcttaaagtggaaatattcatttatatgcatcagcatcacatggagctctttaacatataattcaacacacttcagttgacatcaccgacacgcatatccaaatttatttcatacaatcgaaggacttagcaagcatatccttctcgattataaagataataaggcaaagtccattatttctttttaattatattgtttatttggaggtatgccttgagaacatgagcatcaattgtggacgtattcaatgaacttgctcaccaatcctcttatattcaattgtccatttgataatagcactgtcattttccttatcaatcgcttgaaagatgagcttaaagaccttaaactgattatcaatgtctccatcgaagagcttgtagttgattgttttgttctc

SEQ ID NO: 50682 - DNA, 907 bp, Glycine max
  Clone ID: PAT_MRT3847_16777C.1
cggccgctcgagccgggcggccagcttcaaccttgttctttccattgatttcttgcttctatatattacttgcttcttttcttgatcatgtcccttgctggtaaaatcagctctgaaattggtgttcaggcaaccgctgcaaagtggttcaacctcttcacaacacaacttcatcacgttcaaaatcttactgatagaattcatggaaccgagctgcatcatggtgaagactggcatcacaatgagtcggtcaagcactggacttataccatagatggcaaggttacaacttgcaaggagagtattgaatccgttgatgaagagaacaaaacaatcaactacaagctcttcgatggagacattgataatcagtttaaggtctttaagctcatctttcaagcgattgataaggaaaatgacagtgctattatcaaatggacaattgaatatgagaggattggtgaggaagttgatcctccatatggctacattgaatacgtccacaaatgcactaaagatattgatgctcatcttctcaaggcataactccaaataaacaatataattaaaaagaaataatggactttgccttattatctttataatcgagaaggatatgcttgctaagtccttcgattgtatgaaataaatttggatatgcgtgtcggtgatgtcaactgaagtgtgttgaattatatgttaaagagctccatgtgatgctgatgcatataaatgaatatttccactttaagaaatatatatttttatgttgtgttttaaaaaaaaaaaaaaaaaaaaaaaaaaaaaaaaaaaaaaaaaaaaaaaacagcaagtggaaacgcattaacgacacgttcaggaatttattgtatgttaaaggggtccatgtgatgcatataaatgaata

SEQ ID NO: 50683 - DNA, 1572 bp, Glycine max
  Clone ID: PAT_MRT3847_16778C.1
acgacgtgaagagcggctgcgagaagacgacagaagggggactacatgcttggccaaagctcctgtgctctgtatctcagtcttcggtatcatcttctgcatccagactacttgttttatagaataaggaagttgcagaagaatttcaagcttcgtgtggttttatgccatgttggaagatgtaataaagcctcttcttgaagttacaaaaacagctttgcttcatgactgtacactcctatatggatggagcctggaggaatgtggccgttacttggaaaccataaaagtctaagaaaacaagcctgcagacattattcaaggccaaatggatacagattatctatcaaggctaacacatgcccttacaacagtccggcatgttaacaagactgatgtagtcaccctcggtaccacatttgggtctctttgtaacattatgggtgcatctatggaagatctagctcgttgccctggcataggagagcgcaaggtcaagcgcttgtttgacacttttcatgaacccttcaagcatgtggaatccagccggcaagccattccagagacttctgtccagaacaagccagctagtccgtccagtctcatcgatcaggaacaatgctgaatcttcctccttgattgaagacaagcatgaggatgcagaagatgtgagctaacgtaggaagaaagaacttgaagttactgtcaaatctgccctttctgcagcttttgccaaatattctggtagagttggaaagaggaaaagcacttcacaggtggaggaaaaaggagaatcaattatttccaaagaatcagaagctgaaacataaaattaccatgaagtttttcactggttcaataatttacccataaacaagataatctcatgagattaagaggcttcatttttaatctctatgcatgtaaagccatggaactctattgggagtgtaaaggggaacatctctaacaaatgaagaggtagttagttgtaatatgatagctgaactgttaggtagttatgaggctttaatcaaatgggaaggaagagaaaggagagaggtggggtcatatggttataacaacaaatcgagggaagaatggattttcggttgttgagaattgagataagttgggagggagagttagtacctttgaaattcttgatttgagtgatattcttatctttgtaagggaatcaattatttccaaagaatcagaagctgaaacataaagttaccatgaagtttttcactggttcaataatttacccttaaacaatataacctcatgagattatttaatctctatgcttgtaaagccatggaactctattgggagtgtaaacgggaaacatctgtaacaaatgaagaggtagttaggaggctttaatcaaatgggaaaggaagagaaaggagaggggtggggtcatctgggtaattgggtataacaacaaattgatggaagattagattttcggttgttgagaattgagataagttgggagggagagttaggacctttgcaattcttgatttgagtgatattctcatctttgtacattctgtcaaa

SEQ ID NO: 50684 - DNA, 400 bp, Glycine max
  Clone ID: PAT_MRT3847_16779C.1
aaaaaaaaaaaaaaaaaaaaaaaattttaataaaaaaaaaaaaaaaaaaaaaaatagaaaaaaaataaaaaaaataaatataaaaataaaaaaataaaaaaaacaaaaaaaaataaaaaaaaaaaaaaagaataaaaataaaaaaaaaaggggggggcccttttaaaggttcaaagttttacccccggtcattgcaaggtaaaagtttttttttggggtcccctaaattaaattaatgggccggggttttaaaacgtggggcttggaaaacccttggctttcccaaatttaatggttttgtgaaaaatccctttttgacattgtgggttattaacaaagaggccctccccaatctcctttccaaaattttgccaaccttaaatggcaattggcacccccc

SEQ ID NO: 50685 - DNA, 814 bp, Glycine max
  Clone ID: PAT_MRT3847_1677C.1
gcgttcgtccagcgtccgcccagcgtccggttgttctctcacctctattcatttcctttatcttattcttcttctgttgtttgttgagatgttacagatgctttcatctaagaaggatttgaattttgttggatacacttacaagaactttgaaattgtaaatgattatcaagttcccgggatgggtacatctcttttttctcttttcacggctacaagttgttttatgtttatattttgccaggaggttctatttttgctatgttcatggctattatgcttgtttgtaatatatattttattataagagggtcagagggatattcagatattcataatcattttttagagaattatggttaagaaactctttgtgaagatattttcaactttgatacattaaccaaaagtatgaattgtttaagtctactggctattacattaaaaattaataacattgttgaacattattcttttggttaatgcccctcgacggaatttattttaccaagagttcttgaatgaataaagtatgtatgagccttttttttctccatatattgagacaaggataatttaaaagaacatattctatgacaaccttaactatagttctatctgtttcaactttcttatattttttttcttccagaattagcatgtaaaaaaagattatagcccatgatctgtctctttcatagaaactatgtttttgctgtggatggctggatgaacatacattaaagagaacagaagataccaagcagtagggtcaatgaaagttatatttgtactgaaaccaaaatacatgcac

SEQ ID NO: 50686 - DNA, 248 bp, Glycine max
  Clone ID: PAT_MRT3847_16780C.1
gtgaacgcccttactagtatgtattatgagttgtgcagaatactccatccaaatattcagagtattgagcaccaaaagcctaataactgcttggcaagggttttggggacgaataatcttggtatagggatgaagtattgggaacggccttactattatggtgtctgagtcgtgcacaataatcggaatattggggtgacgtattgtgaacgccatacctcgtatggtttgagagaagcgcaaaataa

SEQ ID NO: 50687 - DNA, 345 bp, Glycine max
  unsure (1)..(345): unsure at all n locations
  Clone ID: PAT_MRT3847_16781C.1
aaaaagngnncngnatcncctaacngactnaaaaaaagntaggaatttggctnngnnttctctctctttcaatcatangcnttgaccacttcacgcaaaccgtcgattnacccnannttncaaactnngncancgngcggtgaacgtggtacangaaaagncaaacgtttcgtgaaaaaggcatnttaccggnnnncnttgagaanaantacgaaccgaccattggagtggaggttcacccattggnnttcttccacnaactgtggaangattccgcntctgantgttngganattgccggacaagagaagtttngtggcttcagggatgganattatatccann

SEQ ID NO: 50688 - DNA, 285 bp, Glycine max
  unsure (1)..(285): unsure at all n locations
  Clone ID: PAT_MRT3847_16782C.1
gggggaaaaattttgagattttattaaacaaaaaaangcccgggggaaaggggaaacatcaaagccgcaaacgcccaaacaccaaaagacaacaccacccccaaacagggggaccagatggcaggaaccttccccatgaggacaaccttagggaggacgagacaaagatgcatcaccctacaacacccatcaatagcaaacaagaccaaacccccccgacagacacacccgacacacccaatccgacccaccaagagaagggcaaccacccggggccgctgcaaa

SEQ ID NO: 50689 - DNA, 419 bp, Glycine max
  Clone ID: PAT_MRT3847_16783C.1
caaccagataaaccccaattcaaaacttgatggcggaagcagcctcaggcgcagatcatggcctctcgacgtttcgtcacagcgagtacacacgagacggtattgaatcgtcgctactcactgattccaatggacagcgtgagagttttgtacacggtaagggacttggcggtcagcgtctgacggagatgaagcttcttgcagtggaaccagaccttggagcggctccagagcgtgcacaggactacaaaggccggattcggacgtggccgggcgttctcttgctatttctcattgtagcaggagctgccgctctcattgtattcaatgccatgaattttaatgaccgagcagctattaatgctgaacgatatgagaatgcagcacaattgaaacgaaagattcaagatggattaaat

SEQ ID NO: 50690 - DNA, 266 bp, Glycine max
  Clone ID: PAT_MRT3847_16784C.1
gaaagtgaaagggtttttggtttgttttcttgggtgctgcatgcactttcactcgtagaaccttgaaacgagtttgtgccacagtctccagcgacaacaactctatcaaatatggctagctttcttgctatcttgatggaggattttctgttcaagagaagattgccacttgaattgtggatctttcgtcagacacagtttcagatccaactgacacagtgagagcttctctggcgcgtgcttgaggtcatgacgatgttctatgc

SEQ ID NO: 50691 - DNA, 418 bp, Glycine max
  Clone ID: PAT_MRT3847_16785C.1
aaaaggaaccaaggccaggtttaaaaggaaaccttttcccattttttggtttttaggaggggccgaaaaccattttttttttcattcccaaccccaaattaaaggaggggagcccttaggggcccccttggggccaaatgggttcggaggggtttttttaaacggcggaaccccccacccaagggaaaggggcccccccggcttccccccccggttccggggcccggggggccccccgggaatttccggccgggccccggggggggccccgtttttccctatggggggggaattaagggctgggcgaaacaagggccatggctgttcccgggggaaaattgttaccccctcacatttccccccaaaatagggcccgaaagcttaaggggaaaagccggggggccctaagggggggccc

SEQ ID NO: 50692 - DNA, 1061 bp, Glycine max
  Clone ID: PAT_MRT3847_16786C.1
ataaaaatctactctttactttcattcgagtaatgttgtacattccagtcaacctagctagctagacgcttaggagccacgctattacgacataaccaacgtgtacactatatttgatcaaatctagtctatttatcctttcatttgttatttctggcttctagtttggtccaaattatttatatatcaatcgatcacaacccaacgaattagttgaaataaaattggagatagaaagcaaacaacatcatgccatcaacaaggtcatgggaaatggagcacgatgagtgcatcagttgtggcggttttattgggttcaagagaaaccaagtgatagattgcagcagcgagataggagattctgatacagaggagttgtttgagataaatctgaaggagaaggagcctttggctttggatgcaataagagaagactgcgagatcagcactgtgttctcgcttgatattgatattcacgacggcggtagcggcaacgatgatgatgttgtttatgtggcagtaggcaaggatggagattcgagcatggaagctctttcatgggcattgaagcacgccgtgacaccctctgccaccgtttgtatcgtacacgttttccctcaagtcaagctcattccaagtccattggggaaaattccaaggagccacgtaaatctagagtatgttaacatgcatttgacacaggagaaaggcaagagaaaattgctccttcaaaagttcactgacctctgcgttgattcgaagggtaaggtggagatgaagcttatcgagggtgacaatgttgctaaaaccatcgtggaccttgtcggaaatcttaatataaggaaattggtgattggaattaccaaatctaatttaagaaaatctgggtctagagtcatattccatagcggcccaggtattgaaaatgccgtaattattaagtcttgattaattttctactcattttgtctttctccccggcttaattatttccatggtagatgctcatagtcaaataagtccctttccccgtataaaatgggttactacttaccaacggg

SEQ ID NO: 50693 - DNA, 156 bp, Glycine max
  Clone ID: PAT_MRT3847_16787C.1
cgtatgctcgcgttcgctaacgttgagcatatacggatggagattccgttccttccgtaggaccctagatccggatatttataaccccaataagaagaagaggccgtagccggcgcacaaatagtgcttgaggagaacaacctaggtgctcttgct

SEQ ID NO: 50694 - DNA, 521 bp, Glycine max
  Clone ID: PAT_MRT3847_16788C.1
tacggctgcgagaagacgacagaagggatgcgtgaattgcttacaacatgctagaatagggttttcaagtttaggctaagagtagggtttccttaggcttatattcacagagggtcctagtgttggatgccttagtctctttttccgggtgggaattgtagaatgcttgtgattgcttgtaaggattcttaatgcatagtgaaaatctaattcaggttgtggactagacaattggagtagcttttctagaaatagagagtgaaccagtataaaagattatatctttgtctcttggttcatatctttcactcattgaagttttattcaatgtttgaaaagattcaagttttatgattttgaaagaaaggaagttaatgaaggatgatgtgtaaggaaggttagattaagtattaatttcatttgactcatatttttttgtgatacgatctttttccaattttttttttgcactctatttttaaaggacgggattggttgaaaacattaccccccctccctct

SEQ ID NO: 50695 - DNA, 784 bp, Glycine max
  Clone ID: PAT_MRT3847_16789C.1
cggcagaaaccctagtggtcgggaatagagttttggaagagagggaaagatgcagatattcgtgaaaaccctaaccgggaagaccatcacccttgaggtggagtcaagcgacaccattgacaatgtcaaagccaagattcaggacaaagaagggattcctccggatcagcagaggttgatcttcgccggtaaacagctggaagatggccgtaccctcgctgattataacatccaaaaagagtcaacattgcatcttgttttaaggcttcgtggtggtattattgagccatctttgatggcactggcgaggaaatataaccaggataagatgatctgccgcaagtgttatgcccgtttacatccccgtgctgtgaactgcaggaaaaagaagtgtggtcacagcaaccagttgaggccaaagaagaagatcaagtaaactcttctgattgcaagatggaattttgtgttgtcatggattattggatgtcttgtaatcctgataactccattagcttcttagtactctagtaaatctttcggaaatttgacagtcagttactcttatgatttttgttttcagtttgagacggattgatattgattatgctacagttgcatgtgatgatacagttttatttttgataatactgcatgtgatgtctttatttcctgtcaaaaaaaatttaaaataaaaaaaaaaaaaaaaaaaaaaaaaaaaaaaaaaaaaaaaaaaaaaaaaaaaaaaaaaaaaaaaaaaaaaaaaaaaaaaaaaaaaaaaaaaaaa

SEQ ID NO: 50696 - DNA, 339 bp, Glycine max
  Clone ID: PAT_MRT3847_1678C.1
ggaaagaaaaaattttttttaacccccttgttttactccgggggcaaaaaatttttgtaaaaaataaaaaaaattttccaacctccccccaaaagttccatttttataaaaaaccaattcattttttgacataaattttaaaaaagttttactaaaatttttcacaaattttttttttgtgaaaacaacaaatttttcaaacggggattaaaacactcaagctggtggattaatcaaaaggccccttttaaacaaaaatgtctttttaggtggcggggtttttattccaaggagttttctttttgaaaaatttttttcaaaaccctttaaaaacctttt

SEQ ID NO: 50697 - DNA, 269 bp, Glycine max
  Clone ID: PAT_MRT3847_16790C.1
aaagaagactaagcaagcaacttaaagatgaagagcagctaaaattggttgtaccctaatttgctatgattgagtgctgcaatagctgtaatatctcaaaaggtgacatgtttatgtagcttaggtttcagtgatcatgttttggtccaggaagattagattacaagagtgaagggaaatagggacaaagcaaaaacatagttttacgtatctctagatggcattttataactcttgtgcataatgttttattactctgctttggttta

SEQ ID NO: 50698 - DNA, 533 bp, Glycine max
  Clone ID: PAT_MRT3847_16791C.1
aactcctagagtataaatatttgttgtaggctcgtagcataaataatgtttctcccatataggaaaaatgttatacactacttcaaagttcaaacacattacacttaaaggagaaaagatgtgtgtttgtgtgtaaggagattcattaaaatagatagaagatgattagatttagttaggagggattctttttaacatataaagaaaacaaacagcaaagaatgatgaaaaacaacactgaatgaatgtatatgcatgagtatatcaacatatattggcaacattttgggttctggcatgaacataaaatgtcatatcgtaaatgagtagataaaggatcaagattccattttatgttgcaattccccagtgctagtcaaattacatggcattatccgtgagtaataaaattgttgaaattaagggagtagggttgaggtagattagaaaattaggaaaagaaagataaagcgtgcagctcaatagatgaacgcttggcgtgtagcaatgtggcagctccagtggtgggaaac

SEQ ID NO: 50699 - DNA, 206 bp, Glycine max
  Clone ID: PAT_MRT3847_16792C.1
gagagcaagctcatcctagaggtttaaaaatggcaggagcctcctgcatgggtctctcttccccatccttggctggcaaggccgggaagctgggcccattaacccccggaagtctggaggggcaccatgaggtaaacccggcccaatcaggcctcctccgggaggccatgggccgggccagaccgtgggaagtacttgggcccatt

SEQ ID NO: 50700 - DNA, 667 bp, Glycine max
  Clone ID: PAT_MRT3847_16793C.1
cgctgggagttcggatcgagggcagtatgagtttaagatcacatcttgcttccatgaaaacttgcccctaatactgacaagggttgtccttgggatagccttacaagtcgtatgcagttacatcacattccctctctattccctagtaacacagatgggatctcacatgaagaaaacaatctttgaggagcaaactgcaaaggcacttaagaaatggcaaaaggctgcaaaggacaagagaaagttaaggaaagcaggaatagatattccttcagggactatgagtggggaaacaacaccaagccaaggcacatcacccttgcatttgcttcacaagtacaagccaagccacacagacacagatagtgttctttattctccacgatcataccaatctgacactgacttgtccgagacagagggatcttcacaccaattgaatgaaataacacaaacgcgtcaagcttcaagaaatggagaaactcataatatcgatttttcctttgtgaagccttaacgatgactaattctgaaggacgtgtgcctgtgtcaacaaaattaatggttaatatatatcaaccaagatttctgttcaaattaccacataaacatgattaatatagcaatacaatagtataactgcccataagagtcatgggttgcccaa

SEQ ID NO: 50701 - DNA, 277 bp, Glycine max
  Clone ID: PAT_MRT3847_16794C.1
agatatcgagccgattcggatcgagcaaacatgttggtttatcaggacctacttagaggtgatgagcatctctcggactccttccgttacaatgacattgagaaaaggatgtgtgggaagttaggggaagtgggatgttaagggagcagttgatgttgaaattggtgaaaacccttctgatgagggtggagaagatgagggagtcgatgacgcagctgttaaggttgttgacattgttgatacattaagacttcaggagcaacccgattttgataag

SEQ ID NO: 50702 - DNA, 264 bp, Glycine max
  unsure (1)..(264): unsure at all n locations
  Clone ID: PAT_MRT3847_16795C.1
gggccgaccgacgcgntacaacacctccaaaagacaactttacgggaccactatattctaagacacttatgggaaaaccgtgcgaataaatatgatttcatattatcatctcactttttatcacgggacctaaccgccgtagaatatcctgtagacttgacttgacacatcataattgtaatatttaaatctcaatctaattctccatttacacagatattttgctactttatcctttttgctcattaaatttatcctaaacac

SEQ ID NO: 50703 - DNA, 327 bp, Glycine max
  unsure (1)..(327): unsure at all n locations
  Clone ID: PAT_MRT3847_16796C.1
nnnnnnnnnnnnnnagcnaacaanacaagngggggggnggggccaanagcancccngcannnaaaaacacaaaaacnccancnggccaangnaaagaaccagnaacananaacacaaaanacagaaaancnaanncaaagaggcncngaagcnnaanacaacccccgngagcnncagccacaggcacaccnngncnnganngnncnaaaccncncacgcancagcgcgacgaccacgcnccgcgcgcggcaacccaaaagggaaaaagaaacncgcccngcgggcgaaaacgccgnncaccaacncagaagganagnnaaaggcaag

SEQ ID NO: 50704 - DNA, 573 bp, Glycine max
  Clone ID: PAT_MRT3847_16797C.1
ggctggatgaaaactggatttttttcttttaatataaaactattggcactgccacaaaataaaacaagtttctgattattttacaacagtgggcaggcggtcgagggggaggagcaggaggcgggggaagggattgtgctggaggaagtgtccaaaccagggcctcctgtccctgccctcgctgctcctcagggcggatctgccgttttcccatgaaatgttgagtacaaatatatgtgcaaatgccccctaaaacttgagaaaagaaaaaaagtcttaaaaaacagtcaaaaggttttcttcatttcatgcaaagattgtagttgagggtttctggtataaaaaacacccaggcttggttcgggtacatttttgcattgcaggagtcttgggtgggcgtccaggccaatggcctagggaacggagttggagcgcagcacagggccctgatggggcttgagagagagtttctcagccaagaccccatcctgcagcaggctggcatcgcctttgggctgtttggtcgcaaactcagtgatgctgaagaaaactgcaggcagcccagcttgatgt

SEQ ID NO: 50705 - DNA, 305 bp, Glycine max
  Clone ID: PAT_MRT3847_16798C.1
ggctcttatttcaagagttttgttattggttcattgtgttgtgcaatggaacttcaggatgtagttgcttgctgctgcactttatttgacatggttttcagtgatggaatgttgatgcttcatgctgccatggatgatacatggagcatgcaggatttagtttgaactttgaagtcaggtttcaaggtagcttctttcttggcctgacttcaaggcttgcttgttggaagaggtagcaatgtacagtcagtatactgtttgttaacattgtgcttcatgatgagttgatgactgatgaggcattt

SEQ ID NO: 50706 - DNA, 385 bp, Glycine max
  Clone ID: PAT_MRT3847_16799C.1
gaaatcacagacagatcgcgggctcacatggcattcatagcaacggaagactgctatacgcttcagtaagacgatatgtgagtgacagtatctacagaacataaacctattaaattttactgtgactgaaccgctcaaaacgttgatacttgaatagggtgcatcccaatgttcccaataaaaaactagctacattgaaaccaaggcaccaaaaacgactttcgtatgcaccattagatcattatgactataacgtccaatcaatcacataagttgggtactgaaatacccaccacaaccatatcctgatggtacttaacatgcttgccaagccactctacctctagatgaaacatatatgatcgaaagcataacccatggcact

SEQ ID NO: 50707 - DNA, 324 bp, Glycine max
  unsure (1)..(324): unsure at all n locations
  Clone ID: PAT_MRT3847_1679C.1
agttactgcacgngtacgtaagctcggaattcggctcgaggttggctgggcatcagcagctctggcccattgtctctgatgccaccctcccatctgcctcaccttaacagtacctgctgcagggagcaaagtcactcacatggcagtccacctaagccctcaagtctgctgggacagttctctccagcccaggtctttggaaagcaggtctggcctgaagcttctcttgtactgaaggctcttcagtcagctctgtctgacacctccagtggcctctgctctgtagactcgggtctagtagcaggacagatgattctgtagcag

SEQ ID NO: 50708 - DNA, 267 bp, Glycine max
  Clone ID: PAT_MRT3847_167C.1
ctttccaccacaaaatattcagctattaagatggtcacttttattttagctggctttggaacaatttttgcttagtatataattcaactgcgcggggaaacacttaacttcaacctctatctctcactaccaatcaatgcacttatgcagattcctcctatgctgattcgtacctttctattgttatttactaatacacaccaaatgctatctctgtcctctcatatatctccactttcctctatattatccacatattcttcacac

SEQ ID NO: 50709 - DNA, 300 bp, Glycine max
  Clone ID: PAT_MRT3847_16800C.1
tgccttagagcattttttttttcctttcactagagaacacactggattacagctagaatccataagagatggcccctcaggagcctctggcatataagaacatgcctcgcttgaaactgagatcgctgagcatacatacttctgcctgtgtgaacgacatttatcttggaaaaggggaatcatctggaggatctgccgggtgcagaaaaaactctttattaacggaaggttcttcaggctcaagaggaaaccctttttgaatgcattgtttggccggctcgaagaaacatacgctgtaac

SEQ ID NO: 50710 - DNA, 294 bp, Glycine max
  Clone ID: PAT_MRT3847_16801C.1
tggaaaaggttggcttgctatcatacaaataaaaaaaccttgggcctgctggccacgaacgcctgctttaatatacttcgaaaacgtaaaggaaagaagtttcaaagtaataaaaggacggaaatccgcttgccaatgattggttcaaagagccgtggaacacttggtttgttttaataatgaagaaaaaccatggcttatgagactgggttttggccccctccaccatgggggagaaactttttttccaaccaagcttacctggaagccctctggattaacaagggggggggg

SEQ ID NO: 50711 - DNA, 3583 bp, Glycine max
  Clone ID: PAT_MRT3847_16802C.1
ggctcgagtttcatttggcatttacatttgcatttgatttccgcgttcgcaagttgtaatcaaaatcaagccatagcgaccgaggaaggcggtgatcggcaatgagcagcggcggcggaggcgaaggagaaggagaaggcgcgtgtgagtcgaacgtcgctgattctgtggcacgcgcaccaaaacgacgccgcggcggtgcggaagcttctggaggaggatccgtccctggtgaaggcgagggattacgatagccgcacgccgctgcacgtgaagtcactccacggatgggtcgaagtgtcgaagtgcttgatcgaattcgatgctgacgtcaacgctcaggatcgttggaaaaacactcctctggctgatgcagaaagagctaaaagaactgccatgattgagcttttgaagtcacatggtggcttgtcgtatctggtcaggacttcaggcatgaggttaatttactagtgaagctttcgacaccctaatgtcgttcaatttcttggagctgttactgacaagaagccccttatgttaattactgagtatctgagaggaggtgatctttataagtacctcaaggacaaaggtgcacttagtccttcaacagccatcaactttggcttggatattgctagagggatggcctatcttcacaatgaaccaaatgttatcattcattgagacctaaagccaaggaatgttcttttagtcctctggtgctgaccatttaaaagttggtgaatttggacttagtaagctcattaaggtccaaagtgctcatgacgggtgaaactggaagctactgccacatggctcctgaagttttgaaataccggagatatgataagaaggttgatgtgttctcctttgcaatgagtgagatgcttgaaggtgaacccccgttttcaatttaagaaccttatgatggagccaaatatgtggcagaaggacaaaggccttcttttagggcaaagggttatatcctgaactgcaagactgttgttgttgttggcggctggggttagtctctgtggaggtttgggtgttttttgaggcagagcttattctcattttgctccaatggagatgcaggaccaaatagaaagcacaagatcaaccatatttggctcagctagtaacatccattccaatgctgaaaagcaggccgaaaatgttgctcccaaggtgaggaaaccatataccattactaaacaaagggagaagtggacagaggaagagcatcaaaagttccttgaagctttgaaattgtatggtcgtggctggcgccaaattgaagagcatataggtaccaaaactgctgttcagattcgaagccatgctcaaaagtttttctctaaggttgtgagggaatctgaggtcagtgatgagggttctatacaaccaattaacatacctcctcctcggcctaagaggaaacccctgcatccatatccccgtaaatcagttaattctttccgtccgcccacgcgtccaatgaaacagaaatatctccatctacaaacctgttagttgcagagaaagacaccccatctccaacctcggtgctatctacggttggttcggaagcatttgggtctcaattttcagagcagactaacagatgcctttcaccaaactcttgcaccactgatattcactcagtcagcttatcacctgctgaaaaggaaaatgattgcatgacatccaaagcatccgaggaggaagagaaagcatcaccagcttcacttcctttatccactgtttctaacccaaacatgtgcatgaagcctgagtttagttccaaggacactttcatagaagatgctgccaatatgccacaaaccactagtattaagctttttggaagaacggtctctatggtaggtaatcagaagtcactgaacatagatgatgatgatggtaagccaataactgtgaagtctgatgaagtagatgatgttgagaatgagaagcttggccaatcaggagaatccaagcaagtagatacacaattatcactcggcgtggttagtggtaactggcctataacacccgatgctgatggagctaatgtgaccagcatagagcccccaaaggagaaccaatgcttcagtgaatctgcacctgatgcattttttccgcagtggagtttgtcccaaggccttccacctttctacctgaggccatgcaatcaggtcctaaatcccttgcctcttaggccctcctctttgaaagtaagaacaagagaggaggaaagttgttgcactggttccaacactgaatcagtctgtgacatggaaaaccaaggcaagaactcagatgctgttgattctaagtttcaaaaatatcacgaggaaggagctgcaccccagaagaagcctgcaaggggatttgtaccatataaaagatgtttagctgaaagagatggacattcttttattgttgccatggaagagagggaggggcaacgagcacgtgtgtgctcatagccttacattctatttttacatgattcataatcatggtgttaatcagagaaaaaactgagaaataaggacctgatttaggtagttgtgatctaattgtctaattgacaagcatctgatttccaattcttttttcccatattttctttctttctcctgaaaacacttcatgtccaataattcaagcgggggcttgtggcattgtttgttctggctcgtatcatgttacagttactttaaccaaatagagacatatagcagcaagtctgtcattactgttttatttctactcttggcttctgtgtgtctttttagttgtatgattgcatcagtgatgggggtgttctagggaagcgaggacaagcacagcatgtcactagacatcatatatgtcataacaattggctctggaaaacaaatgatgtcaatgaattaaagcttaaagagtgccatgtggtgatgactaccttaccaatttgtatatctggattttctttctgtatcatatttttaataatagattttaaacattgtttcttcaaaaaggttatatccctgaactgcgagagttaactgagcagtgttgggatgctgacatgaagcaaagaccttcattcatagagatcattaaacaccttgaaaagatcaaggaaaatttgccttcagatcatcactggcacttgttcacttcatgatttttaggagcattggtgccgtgaaattcagatgattatctgctattaccattccagcgggttgccttatctactgtcgcgggtttttgaacagagccgacttggaaaacctagctaaggtcatgagcattgctttgaactgttagattcaaatgagcataacaggtttatgctgattgcctttatctggtgtttacattcaattactgttttttgtctcattaaaattcttggcgaattctattcagctatttaagtgagcagatactagttgttgcttgagtgtaatatgtagggtacaaaacccattgaggaaaaatataacacatcatgcaatctagtgtttaatattttatcttatgattaaaaattaatagcggttttcatttcttccaa

SEQ ID NO: 50712 - DNA, 236 bp, Glycine max
  Clone ID: PAT_MRT3847_16803C.1
aaccaaagacattctggttgaggcatttctgcttgggaagtgtttttctgcaattttggaattgtttcctgcacttcccatattgctctcgaaatggtcattccagaagtaatatggggagtgcgggaagcattgccttctgcttaagtctgatgagggctgtccattggggatcatttgggctaccatgtgtatcatgttaaggtggtgccactaaggagataaatgtgaactag

SEQ ID NO: 50713 - DNA, 1759 bp, Glycine max
  Clone ID: PAT_MRT3847_16804C.1
ccgaggagggcggcgatcggcgatgagcagcggcggcggatcgtcagaggcggcggcggcggcgaaggagaaggagaaggagaaggcgcgtgtgagtcgaacgtcgctgattctgtggcacgcgcaccaagacgacgccgcagcggtgaggaagcttctggaggaggatccatcgctggtgaaggcgagggattacgacagccggacgccgctacatgtggcgtcgctccatggatgggttgaggttgcgaattgcttgatcgaattcggtgctgacgtcaacgctcaggatcgttggaaaaacactcctctggctgatgcagaaggagctaaaagaactgccatgattgagcttttgaagtcacatggtggcttgtcgtatggccagaatggaagccattttgaaccgagtcctgttcttcccccattgcctaacaaatgtgattgggaagttgacccttctgagctggacttctccaattcagtttgcattggaaagggatcttttggtgagattttgaaagcccattggcgtggaacacctgttgctgccaaacgtattcttccatctctgtcagatgatagattggtcattcaggacttcaggcaggaggttaatttacttgtgaagcttcgacaccctaatgttgttcaatttcttggagctgttactgacagaaagcctcttatgttaattactgagtatctgagaggaggtgatcttcataagtacctcaaggacaaaggtgcacttagtccttcaacagccatcaattttggcttggatattgctagagggatggcttatcttcacaatgaaccaaatgttatcattcatcgagacctaaagccaaggaatgttcttttagtcaactccagtgctgaccatttaaaagttggtgattttggacttagtaagctcattaaggtccaaagtgctcatgacgtatacaagatgacgggtgaaactggaagctaccgctacatggctcctgaagttctcaaacaccggagatatgataagaaggttgatgtgttctcctttgcaatgattctgtatgagatgcttgaaggtgaaccccctttttcaaattacgaaccttatgatggagccaaatatgtggcagaaggacacagaccttcttttaggggaaagggttatatccctgaactgcgagagttaactgagcagtgttgggatgctgacatgaagcaaagaccttcattcatagagatcattaaacaccttgaaaagatcaaggaaaatttgccttcagatcatcactggcacttgttcacttcatgatttttaggagcattggtgccgtgaaattcagatgattatctgctattaccattccagcgggttgccttatctactgtcgcgggtttttgaacagagccgacttggaaaacctagctaaggtcatgagcattgctttgaactgttagattcaaatgagcataacaggtttatgctgattgcctttatctggtgtttacattcaattactgttttttgtctcattaaaattcttggcgaattctattcagctatttaagtgagcagatactagttgttgcttgagtgtaatatgtagggtacaaaacccattgaggaaaaatataacacatcatgcaatctagtgtttaatattttatcttatgattaaaaattaatagcggttttcatttcttggatattgtttgaccaattcttctgttcaatgctaccaactactatgagattctctttctc

SEQ ID NO: 50714 - DNA, 904 bp, Glycine max
  unsure (1)..(904): unsure at all n locations
  Clone ID: PAT_MRT3847_16805C.1
accttcttccgttgttctcttccaattgccttgattttctcggaaaattcttattttccgagaaagttcgtgtttttactgttgaatcgagaattcccaaatcggggtgtctgaaattcaaagctgttgttgttgttggcggctggggttagtctctgtggaggtttgggtgttttttgaggcagagcttattctcattttgctccaatggagatgcaggtctcaatcgtcttacgtccactcttctggagactttttctcctcttttaataggaaaaaagagaatttcaatatgaattcatccagtgactttatttcttaaaaggaactgaaatatatgtaggaccaaatagaaagcacaagatcaaccatatttggctcagctagtaacatccattccaggctcgaaaagcaatccgaaaatgttgctcatataccttctgttggaaacaaccaaactcccaaggtgaggaaaccatataccattactaaacaaagggagaagtggactgaggaagagcatcaaaagttccttgaagctttgaaattgtatggtcgtggctggcgccaaattgaagagcatataggtaccaaaaatgctgttcagattcgaagccatgctcaaaagtttttctctaaggttgtgagggaatctgagggcagcgctgagagttctatacaaccaattaacatacctcctcctcggcctaagaggaaacccctgcatccatatccccgtaaatcagttaactctttcaaaggacactgcataccaaatgaaacagaaatatctncatctacaaacctgttagttgcagagaacgacaccccatctncaaacctcgtgctatctacggntggttcggaagcatttgggtctcaatttcagagcagactaacagat

SEQ ID NO: 50715 - DNA, 1667 bp, Glycine max
  Clone ID: PAT_MRT3847_16806C.1
tattcggctggagcacaccttcttccgttgttctcttccaattgccttcattttctcggaaaattcttcttttccgagaaagttcgtgtttttactgttgaatcgagaattcccaaatcgggggtgtctgaaattcaaagctgttgttgttgttggcggctggggttagtctctgtggaggtttgggtgttttttgaggcagagcttattctcattttgctccaatggagatgcaggaccaaatagaaagcacaagatcaaccatatttggctcagctagtaacatccattccaatgctgaaaagcaggccgaaaatgttgctcccaaggtgaggaaaccatataccattactaaacaaagggagaagtggacagaggaagagcatcaaaagttccttgaagctttgaaattgtatggtcgtggctggcgccaaattgaagagcatataggtaccaaaactgctgttcagattcgaagccatgctcaaaagttttctctaaggttgtgagggaatctgaggtcagtgatgagggttctatacaaccaattaacatacctcctcctcggcctaagaggaaacccctgcatccatatccccgtaaatcagttaattctttcagaggacccaccataccaaatgaacagaaatatctccatctacaaacttgttggttgcagagaagacaccccatctccaacctcggtgctatctacagttggttcggaagcatttgggtctcaattttcagagcagactaacagatgcctttcaccaaactcttgcaccactgatattcactcagtcagcttatcacctgttgaaaaggaaaatgattgcatgacatccaaagaatctgaggaggaagagaaagcatcaccagcttcacgtcctttatccactgtttctaacccaaaaatgtgcatgaaacctgagtttagttccaaggagatagaagatgctactgatatgccacaaaccactagtattaagctttttggaagaacagtctctatggtaggtaatcagaagtcactgaagatagatgatgatggtaagccgataactgtgaagtccgatgaagtagatgatgttgagaatgagaagcttggccaatcaggagaatccaagcaagtagatacacaattatcactcggcgtggttagtggtaactggcctataacacccgatgctgatggagctaatgtgaccagcatagagcccccaaaggagaaccaatgcttcagtgaatctgcacctgatgcattttttccgcagtggagtttgtcccaaggccttccacctttctacctgaggccatgcaatcaggtcctaatcccttgcctcttaggccctcctctttgaaagtaagaacaagagaggaggaaagttgttgcactggttccaacactgaatcagtctgtgacatggaaaaccaaggcaagaactcagatgctgttgattctaagtttcaaaaatatcacgaggaaggagctgcaccccagaagaagcctgcaaggggatttgtaccatataaaagatgtttagctgaaagagatggacattcttttattgttgccatggaagagagggaggggcaacgagcacgtgtgtgctcatagccttacattctatttttacatgattcataatcatggtgttaatcag

SEQ ID NO: 50716 - DNA, 476 bp, Glycine max
  Clone ID: PAT_MRT3847_16807C.1
aaagtcacctgatgagtgtaaggctttttatgcacatcctgttcattgtagtgcctttggttgtgcatcgccgccgccaccacccccttcacctgcacctccccctccgcctccgcctccaccaccgccaccgccaccaccagcatcttaccaccactatccctgaggagccatgagaaacataagtttgtaatatttaatttagtttttgctgatgagtttgtttctttattttttggggatgtgaagattagcttggtgattatgattacaattagttttcatttttggtcataagtttaccttgtaaaaataataaaaaaaaaagtgtggaaatgagctatttccactattcatttgaaaatattctctagttactaacgaaaatattttttaaaagaggtttggtttggtttgagaacatttgggatgttatgggtcgtgacatatatattctctagttattaacgaaaata

SEQ ID NO: 50717 - DNA, 199 bp, Glycine max
  unsure (1)..(199): unsure at all n locations
  Clone ID: PAT_MRT3847_16808C.1
cttttctcgtgtagcagttattgttagtcttttctggntcagattctaaatatccattgttaactaaacgctgaactgggatagatactgcaccaagacaagactgagattaactcgcttaccngaattgcgcggtcgaaatcgaggataagagcctaggtatgcgttgttgcagtggcggtgctcttggggtgggggg

SEQ ID NO: 50718 - DNA, 534 bp, Glycine max
  Clone ID: PAT_MRT3847_16809C.1
cttccgtcgggtggcaaaagaccaccgaagggggatcttttcttccactactacaaaacatagtttttacgatggtgattcgactatggttttatcaaaaccgttgtcattttgaaggtagtgacatttttgtaattagtgtgactttttcaatgatggtttttgaaaaattgtctttgaaattggtaatcgatggcagttttggtatgacccatcattataagtttgaggttatatggttgttttgggatgttgtattttggtccctatatatggttgtcctggaatggaattaagtttttagaatgataggtgtgacttcgttatggtgatggatttgaggttagctcatggtgcttctagaagattcaagctttttattaagcaaggtcaaaattgaaaaccctaaaaatgaaaatttccaaatctgaatggaataatgtgccctaacccacatcgcacttatcgttgttttttcatcgtccttcttcgtcggcagctaaggcatcacatccatctattaatatcgaaccc

SEQ ID NO: 50719 - DNA, 452 bp, Glycine max
  Clone ID: PAT_MRT3847_1680C.1
tttgtcgtagcgtgaacggcatggcggagaaagcggcggcgccaccaccgtcgaagcctcttacaactcaggagtgggaaaccctaatcgaaggcttccagaacggcgtgcactgcaaatggagctctctggatcctctcttcgatccccttctctcctctctgcaccggaaggacttccctctctccctcaagctccaactcctcgtcttcctcgacgaattctctctatccttcttcacctcacataaccacctccaccgtctcgtcgacgcgctcaaaaccgtcgttcacgcgcccctcgaagccgccgccccttcagcttccaccttcaaggaccaattcatggtctccaccaccttaattctcatctgcgcatctgaaaacgtcgttgtcgaggcttaaacggagaataacttggtcgagttcttgttaacggtcataaaccggccg

SEQ ID NO: 50720 - DNA, 132 bp, Glycine max
  Clone ID: PAT_MRT3847_16810C.1
gcaaacctagggcacccgaagaattggtatctcaattacactggtattttgcggaccctggggcagagctgccagaaaatgtttcctgtcatcccatacttgcagattttgctaactgtatgaagaagaaag

SEQ ID NO: 50721 - DNA, 140 bp, Glycine max
  Clone ID: PAT_MRT3847_16811C.1
atgtctactgtgagtcagttggacatgtccataattttaaaggaatggttaagacttgccaaaattgtgctcaagggttacaaaggaaatttatctggtcattgtgatgtgttgctgaaagataatggtgttctatgcaa

SEQ ID NO: 50722 - DNA, 453 bp, Glycine max
  Clone ID: PAT_MRT3847_16812C.1
aattcggctcgagaaggatcagtggcagttagcatgtcaattgaaggaacaagtttttgttttgtagcagcacacctagcatctggggagaagaagggtgatgaagggagaaggaaccatcaggtagcagaaatttttaggagaacctctttttctaggaccacaaaagaccatcatcattttcctctaaccatcttaggccacgaccgtatattctggttcggggatctgaactataggctatacttggaggacaattttgcgaggcatttgataagaaaacaagattggaaggctttgcaagagtttgaccagctccagaaagaactaaaagaatgtggagtgttcgagggttggaaagaaggtgacataaaattcggcccaacatataagtactcatgctccactaccaatggatactgaggtgacctgcctagtgaatccgggggaaaa

SEQ ID NO: 50723 - DNA, 244 bp, Glycine max
  Clone ID: PAT_MRT3847_16813C.1
attggcctcgaaaactaccgggaatgattaggcgggagtagagaaaaggacggcaataactaccaagccaccagataccaccgtaaataagagacccctggcaccaagtttacagaagcaacgcgacgtgccaaaacaaatactagcgccacagagtaagcaaaaataaggcaaaactatagagcgggcgaagcacacacaactagagaaaccatgggattcacagcctggaggcagcccgcgg

SEQ ID NO: 50724 - DNA, 1011 bp, Glycine max
  unsure (1)..(1011): unsure at all n locations
  Clone ID: PAT_MRT3847_16814C.1
ggcatataacttgatcttgacagaaaatcataaaactgttaaacttgcttatttcngtctanccagagaagatgccttaacatagatgatggcttgtganacananacatatcnatggatggctccagaagtacttcttaattattgaaaactaaacaatttattaattttcctgttgggtggtccatattagtaatttatgatttcatttcttgtttggtggcagctttacagcactgttactctgagacaaggggagaagaagcattacaaccataaggtggatgcctatagctttgctatagtgttgtgggaactcgtccataataagttaccttttgaaggcatgtctaatttacaggctgcatatgcagcggcatttaagaatacaaggccaagtgctgatgagcttcctgaagatttagctctgattgtgacctcttgttggaaagaggatccaaatgatcgacccaattttagtcaaataatagagatgctgcttcgatatctaaccaccatttcaccgtccaagccagttgttccaatgcgaatcacttctaagaatgctgtattgccaccagaatctccaggtacaagtgctttaatggctgggagagatgattctggagaaaccccaaaaggcaatattgaaggcaggtctaaagggtttttcttctgctgttactgatgacacaatgcactcacaattctttcaatggggccgtcccaaatcacagtgtggcaatctgaataaaccccagcaaatgttacatctagaatcttaacaagaaaaacaagtcagttttgttcaccttgattccatgttctcagcaagagtagcaagccatactcttttaactttggattgacttacttctaacttattagggttgaggttgctgagatgtattgttgtataatatggttcatccaaaggccttcacctcctgcttaatgtatggaaatgacttggataatgaataaaaacggggaagatttttatctttgcca

SEQ ID NO: 50725 - DNA, 723 bp, Glycine max
  unsure (1)..(723): unsure at all n locations
  Clone ID: PAT_MRT3847_16815C.1
atcaaataaatgtaaatttgtatacaaatattttcataggtgaagaacactttcacttaacatcaatttcccaattagcagcagcataagctgtatttgggctgatgagataatgtatgcaatatacctatttacaggagacagaaagagggggagagagagtgggaatataaatataaccagagaaagatacaaatggagaaccagaagcagagccatcagatcttattctgctgcaccactgatcagccaactacaatttctaaggtccttgtattagcgatgacattccacaatactcttggaaattaatcggtgaaaaacaggtcctggtgatattgcaaactgctaaccttgctgttcctctgcttgtagcataaatgcaagttcttcagctgattgctttgatgctgtattatgcgaatcatccaggccataagatagcaaggaaggataacagcagccgcacggagaaagaaaaaataaaaatatgttaaagctttctccacatcagcattgaagaggggagcagcatgcctcagaagtaaaagagccattaagattagaccaacagagtgccacaatgaagttccaccagtgccagcattgacataatcttcatgctcagtctccggaacttggtgctccaatgccgcantagccaaaagtcgagcattgtgcanatctaaaggactactagagattgcccagccatcactgata

SEQ ID NO: 50726 - DNA, 453 bp, Glycine max
  Clone ID: PAT_MRT3847_16816C.1
tccgatctcatccccgagctcatcgaaatcctgaggtctctgcgcctgaaaacgctcaaggccgaaatggccacgctcggaggaagaacccgcaacgttctcgtggtggccacggataaagaccatagcggtgaatcgatccagtttctgcagaactcgctgaagtctctggtggaacgctccagtaattccaacgacagatccaaacggcgccgtgtcctagaccgaaagttcattgcttaattattatctagcagatgcggtcaaagttttaaatttgcagttgcgggaatgttatgaagatgcattacatcttttagaggataaaagttaagaacaagacatagatatagtttttgtagatgctttggtgttgatctctaattaaaattagagtttcgtttagataatttacgttgacctttaattcaaatctttgttatgggcacagct

SEQ ID NO: 50727 - DNA, 1388 bp, Glycine max
  unsure (1)..(1388): unsure at all n locations
  Clone ID: PAT_MRT3847_16817C.1
aatataatttattttcttattttcaaaatatatgaaggatatcaaataaatgtaaatttgtatacaaatattttcataggtgaagaacactttcacttaacatcaatttcccaattagcagcagcataagctgtatttgggctgatgagataatgtatgcaatatacctatttacaggagacagaaagagggggagagagagtgggaatataaatataaccagagaaagatacaaatggagaaccagaagcagagccatcagatcttattctgctgcaccactgatcagccaactacaatttctaaggtccttgtattagcgatgacattccacaatactcttggaaattaatcggtgaaaaacaggtcctggtgatattgcaaactgctaaccttgctgttcctctgcttgtagcataaatgcaagttcttcagctgattgctgatccaaaataaatatatgatcctgttagttcataagagaaaaatataaaccagaaagtaaagatgtactaaaataagcacatcttgagaagagaacccagacaaaagcatttcccatctctaaaacttagtccacaaacactatcaactttcaaggtttctagtagagaccacgccatgtgcaccatatgttgttggcattcctattggtaccttcacttaaatcttatcatcttaagtggcctaccaaacggcatcatatgattaatcaaaatatgaaaaaggaaaaaatgaaatgaaaacaatacaaatacttcaatattagaataagcacagggtagtaacttgtctttgcctttgatgctgtattatgcgaatcatccaggccataagatagcaaggaaggataacagcagccgcacggagaaagaaacaataanaatatgttacagctttctccacatcagcattgaagaggggagcagcatgcctcagaagtaaaagagccattaactgcaaattttgggacagacccaaacacgaaaaccaaggaaatgtaccatgaaaatgatttaatacatgtgattttactaatactgggacttctttccaaagaagaattaacagcaaacataagagcgctgcatcagatactacatcccagaaaagcaatcacaagaaaataaatattgcaaccatacacccaacaaaaatacatgggtaggtaccacatatacataaatatatctgaaggacaacaatcagaaaaggtggagtggttccgtggataataggaaagaaaaaatagaagaattttgaatttccatgcctaataaaacatctaaaaaccatactatagaacttcaataacaaattaaaaaggcttacgattagaccaacagagtgccacaatgaagttccaccagtgccagcattgacctcgt

SEQ ID NO: 50728 - DNA, 1232 bp, Glycine max
  Clone ID: PAT_MRT3847_16818C.1
ctgattgatagtaatgaggatacttggtggaaggccgatgttagagagacaaaggaagaacttgcagccagagggcggaagttcatgaactggttggggacaagaaaagagaaggagatagcaattgtgacgcatagagcattgttgttgcatactcttagtgcctttggaaattacagccatcccttggagaagaaagaattatcaaagccctttgccaactgcgagcttcgctccatggtcatcgttgattgtgtgacggataggaggcgttaaccataaaaaattagacaagatgccttcatgaaggacctctcctctagtgatgttgcgcatgaaaacgccgaggaaaaataaaaggaaatattttatatggaatacttgtccaacaaagtattctctactaaggatacacgaatctcagttattacaacatacattgacatggtcatatggtattcgttcgtgtttattaataattataaagactgatagtaggttatacttaacgaacagcagaatgtggtaaatatggaatataattcaatagataacaaaaaaaatattctctttaccaatgctgaacattctgtttcagtagcaaatattcttatttttgaagttattaagaagctccttctattgacaatgggcacgttaccttcgcccatgattttctaaatagtgtttcattttgtctttaaattattactattcttatctgtgaaatcataaatcctttgaagaaccaaggatgaaagcacacagcatttgctaaatggatagcgatttccaaatgataaaacagcaaaggctcgggccacttataaaccgtaaccagcaagaatatcttagcttcatttagccttcagaacatcatagtatgacacgggttttttcttcgactcaccacagagtttctccacttcagcggctacacgcagaatagtagcttccgcccatggtcgacccattatttgcaagcctattggaagtccttctttatcgtaaccaaccgggacagaaatggaagggaatcccaaaagatttgcaggaacaacgaactgcataaggttagctgtagtctgcatatctgtttcaccacttttaagagcactgggaggtattataggtgctgtcatgccagtggtcggcgttactatgacatccactttcttgaaaatctccaagtggtaatacatattccttcgtctgatacattgggctgcaac

SEQ ID NO: 50729 - DNA, 2678 bp, Glycine max
  Clone ID: PAT_MRT3847_16819C.1
gtctatctacgtttcactcattacaacaaatcccacattttcaccattaatcaataaatactaattatatttcttcctcatcaactccgttctctcgttctcactctctctctttccctcgccatcgcttttcttactccaccacttcgccactacacttttctcaccactacccattaattttcaggaacaatgggggagcacgtggttttatctgttcttgactctcttatagcacctggaactttgcaaccacaacatgatggtgatggtgatgctttaggttcactcattgagggtgctactcatgttaatgatgttggggaatgcgatacacttgaagaagaagaagaagaagaagaagataaagaagaagaagaccttatcaaaatggtggaatgtcgcatttgccaggaggatgatacccttcaaaatttggacataccttgtgcttgcagtggaaccttgaagtttgctcatacgaaatgtattcaaatatggtgctacgagaagggtgatacaatttgtgaaatctgcaataagccattcaaacctggttatactgcaaattcacctgtctgccagcctggagatacttcaattggtatcagtgatgactgggcaatctctagtagtcctttagatttgcacaatgctcgactgttggctattgcggcattggagcaccaagttccggagactgagcatgaagattatgtcaatgctggcactggtggaacttcattgtggcactctgttggtctaatcttaatggctcttttacttctgaggcatgctgctcccctcttcaatgctgatgtggagaaagctatagcatatttttattttttctttcttggcgcggctgctgttatccttccatgctatcttgtggcctggataattcgcataatacagcatcaaaggcaaagacaacaatcagctgaagaacttgcatttatgctacaggcagaggaccaataaggttagcacgttcgcagtatcaccaggacctgtttttcactgattaattcccaaaagtattgtgcaatgccatccctaacacaagggccttagaaattgtagttgtctgatcagtggtgcagcagaataagatctgatggatctgcttctggttctccatttgtatctttctctggttacatttatattcccactctctctccctctttctctcttctgtaaataggtatattacatactttatctcatcagcccaaatacagcttttgctgttgctaattgtgaaattgatgttaagtgaaggtgttcttcacctatgaaaatatttgcataaaaattacattttaaaaaaaaaaaaaaaaaaaaaaaaaactcgagactagcttcaacggtggaggatgtcttgctagtgtattctgcaatgttgggtgcatcacctgcaaatagaatcagtttgaaaccgtcaccaccttgtttgccaagtctgtcatccaacgataattcaaatgccttgggatctttaagaattggaaagtacaccccgtggtttaatgatgtgcattcaactgaaatctctgataaatgtgatgaagcacttaatctgctgtcaaaggcgcatggttgtgaaatgatagaaattgttataccagagcttcttgagatgcgaactgcccatgttgtttccattggctctgaatgcttatgttcactgaatcctgattgtgaagacgggaaaggtgtaaatttgacatatgatactcgtacaagtttggcactttttcggtcatttacagcagccgattatgttgcagctcaatgtattagacgaaggagtatgtattaccacctggagattttcaagaaagtggatgtcatagtaacaccgaccactggcatgacagcacccataatacctcccagtgctcttaaaagtggtgaaacagatatgcagactacagctaaccttatgcagttcgttgttcctgcaaatcttttgggattccctgccatttctgtcccggttggttacgataaagtaggacttccaataggtttgcaaataatgggtcgaccatgggcggaagctactgtactgcgtgtagccgctgaagtggagaaactctgtggtgagtggaagaaaaaacccgcgtcgtactatgatgttctgaaggctaaatgaagctaagatattcttgctggttacggtttataagtagcctttgctgttttatcatttggaaatcgctatccatttagcaaatgctgtgtgtgctttcatcctcggtgcatctcatttctccaaaggatttatgatttgagaagttcttaggaaataaatctgcatagtaataattaaagacaaaatcaaaaattatttagaaaatcacgggcgaaggtaacttgctcgtcgtcaatatgtagaaggagcttctttcttaagaacttcaaatataagattatgtgctattgaaacagaatgttcagcattgctcttaaagataataattttttgttatctattgaattatattttccatatttatcacatctgctgctcgttaagtaatatactgagtaatatacatcaataccatatgaccatatcattgtatgttgtaatgactgagattcttgtatccttagtagaatactttgttggacaagtatcccatataaaatatttcctgttgcag

SEQ ID NO: 50730 - DNA, 429 bp, Glycine max
  Clone ID: PAT_MRT3847_1681C.1
ggggaatattacctatttttagcaaaaaatttgggaaaacattttttttggggtcaaaaaaaaaaaaaaatatggtcgggaagaacccctcccagtcccaaaaaaaaggggggggcggtcgggaatttaaaaattgcctcgggccgaatttcggggttacgtacccggggatgggaaggtaaaattttttttttgggggacctaaattaaatttacggggcggggttttacaacgggggggcggggaaaacccggggggtacccaacttaatgggcttggagaaaaacccccttttcccaggtggggtaataacaaaaagggccccaccggtcgccctttccaaaaattgcccccccttaatggggaaagggaccccccctttagcgggccattaaacgcggggggggggggggttacccccaggggga

SEQ ID NO: 50731 - DNA, 561 bp, Glycine max
  Clone ID: PAT_MRT3847_16820C.1
ggctcgagcttcgctgtagtctctatgctcactccaccgtcgtatcgacacttccatcctacgtgattgtatggctgtgaaaccgtcgatcttatgctcatccaacacgcgcgggggctgtatctgcaccggcgtaatgtgccagtccatgtgtgcccacatgatgcgtgccggatacaacgtcactggcttcaacgcgtaccctctccaaggcccaatccatagtcgacatcggatggccacttctgcccatgcgctcacgccgtgagatccaactctgacgttgtcttcacgatcggcggctacccttccgacgtgcgcattgtactcctacagccttcctgcggagcggtctctgccctgcgacccggcggcgtgctcgtcgacatgacgacctccgagccctcgatcgtgaccatgatcgacatctgcgccatcggaacaggctgacactcaatctacgcaccatgatccggatgagaccgaagggctaagaacggaaccctagctatcttcgccgtaggggaagaagcgactgagaagcgtctggaaccgttgctg

SEQ ID NO: 50732 - DNA, 681 bp, Glycine max
  unsure (1)..(681): unsure at all n locations
  Clone ID: PAT_MRT3847_16821C.1
cccgcgtccgcttcatttttgtgttctgtgcctgtctcggagtagacaacaatgagagttccattagtttcatggttttctttcattctctgctacctgctgtatctcactatctacatctctgttgtctctggccaatgtcgtgaggatcaacagtcattgctgctgcaattgcagaacaaccttacgttcatgccagagagttccaccaaactcaagtcttggaatcaaaacattgcctgttgtcagtggtggggtgtaacctgtgatgaggagagccatgttattggtcttgacctgagtagagagtcaatctctggtggatttgacaattcaagtagcctttttggcctccaacatctccagaatttgaatttgtctttcaataacttcaattcagtgattccgtcctcaatcaataagttagagaatctaacttatctgaatttggcatatgctggcttttgggggaagattccaatggaaatttctcaactgtcgaggttggttaccctcgatctctcaaatctttttcgaccagaactggaaatccaaaatctangaatgtttgtccgaaactttaccaaaataagacaactttttctagatggtgtgactatatcagctcatggactagcatggcaagctgctttgttgcaaattccaactctgcaagaactg

SEQ ID NO: 50733 - DNA, 258 bp, Glycine max
  unsure (1)..(258): unsure at all n locations
  Clone ID: PAT_MRT3847_16822C.1
ganaagtcaaaagaaaaaacagggatancaaagagacagtatgacaatgataaagtgaaggagaaacctgagacagtgtcaagttatgttgctgttcatgccccagtttcagtagatatggaaacctnngagagcaaatcacatgtgcaacccttatcatccanggttaaaacaaatgntacagggaaagngccttnanaagnntntnnnccgnanntgngggggaaaannttntccgnnngnntncntttttttttt

SEQ ID NO: 50734 - DNA, 768 bp, Glycine max
  unsure (1)..(768): unsure at all n locations
  Clone ID: PAT_MRT3847_16823C.1
ttgattaaatgaggtagcaaacnnnaaaattttcatagaacggaatgacagactactgagcagactataattcgcattctatgttcatgggcgccaattcaagaacctaacttgaacatttatgacttgtttagtgcctagtggagttttaaatactagacattgcatacgctaaagccattctcaaaagggagtacattaatacaaatatgcaatgatcaattatctcccctaatcttatgacagctgcagttgacatcaggagagaaagacacaagatctaagacccattttactcatccatatcctttgtctttcttctcactgaatgatactacaaatccactcaatcaacaaccacgttacaaagccgtctcttctttctccttcccttcttctcatcctcaggcgactcagtattaactaaatgaggtacccgaacccttttggagccatcaggtaaacgcttacaaggtgaagggttttccatatcagtaaaagcattgcaaacctgactttggatagccccaattaacatgtcctgacaaccagatgcatacacattttctagactggggcactgaagcaacagtctctctggatgcaaatttctacaagaatttagattaagatcattgagttgtgggcagtnnnnntacaaggcatccaagcctgagcatcnnnacaaactaagtttcttnnnnnaactatgtttgattattagcnnntggtttgtaagnnntngattagtagcnnntgtnnnctgta

SEQ ID NO: 50735 - DNA, 263 bp, Glycine max
  Clone ID: PAT_MRT3847_16824C.1
ttagaaaacatgcaataatttattggggtggcatgaatacaattgggtttttcatgtttagcctaaaactaagtgcacgagatagatttacatattcgactttacctatgcggagagatcattgctgcaattaaaatctctgcctaccaaatcactaggcaacattgttgtaccaagacctcttaatatatatatgaatctcgaacaaaggaagaagggacagtacttatgttgtacaagatttaattaaacggggtcccaaa

SEQ ID NO: 50736 - DNA, 1733 bp, Glycine max
  Clone ID: PAT_MRT3847_16825C.1
gcatcgtgtgattagagatgggtacaaggctgggaatttgaaatccgccatgaattgtagctacgttaaagactacgagtttgttgcaatttttgatgcagattttcagcctaccccggattttctcaagaaaaccgttcctcattttaaggataatgatgatttggggcttgttcaagcgagatggtcatttgtgaacagggatgagaacctgctaacgaggctgcagaacattaacctgtcttttcattttgaggtggagcagcaagtcaatgggattttcattaacttttttgggttcaatggaaccgcgggagtgtggaggatcaagactttggaggatgccggtggttggttggagaggacaactgttgaggacatggacattgccgtccgagctcatcttcacggttggaagttcattttcctcaacgatgtggagtgccaatgcgagctaccagaatcttacgaagcttacaggaaacagcagcatagatggcattctgggccaatgcaactgttccgcttgtgtttgcctgatatcatcagggccaagataagtgtgtggaagaaattcaacatgatattcctcttcttccttcttagaaagctgatattgccattctattcattcaccttgttttgtataatcctgcctatgacaatgtttgtgccagaggccgagcttcctgcgtgggttgtgtgttacatccctgctgccatgtcttttctcaacattcttccagctccaaaggccttcccttttattgtcccttatctcctatttgagaacaccatgtcagttaccaaattcaacgccatgatctcgggcttattccagcttggtagtgcatacgagtgggtggtcaccaagaaatctggtcgttcctcggagggcgatttggtttcattgattgagaaaggaccaaagcatcaaagagggtcctcagcacctgatctagaggaaatgaaagaggaacttcgaaagcaggagcagcaaaaggcctctaagaagaagaaaaaacataacagaatatatatgaaggagcttgctttggcttttcttcttctaacagcctcagcaaggagtcttctctctgctcaagggattcacttctactttttgttattccagggaatatcattcttgttggttggtctagacttgattggtgaacaggtggactgaaagaaaaataaaatgaaaagaattgacaggacagtgtacttttacatgcacggaaaaagcaaaaaggggggaaagtcatgccttatgaaattactgaagacacttatttgggggcaatggagagtgtagaggacccatagtgctgctttttcttgctcatgctcctccctccaggctcgtaaatcaaatcccacccaatacgatactttattgtgttataatggaccgaaaaggacttaattgggaaatgggtgcaattgaggccaaattcaatgtgtaagtttagccttgtttttttgttagtttgattcatttttgtaattttatgtggaatcttttctcgccggatcaattcttttgtaagaaaatttgtggttcagactttaaacaccccacacccattgggatttttttttactatttattttatagcgatagccagtagcaacattattctccttgtcatggttccagctacttcctccaccgcttggtattcggtagtgcaaattcaataattaaaaaattcatattttgtcaaaaa

SEQ ID NO: 50737 - DNA, 1428 bp, Glycine max
  Clone ID: PAT_MRT3847_16826C.1
taggctggtgcatgtttatttgaagagcttgggttattctacattggcccagtagatggccatgacatagaagaccttgtgcacatcctgaaaagtgtcaagggtatgccgacacttggacctgttctcattcatgtaatcactgagaaaggaaaaggttatcatccagctgaagttgctcctgacaagatgcacggtgttgtgaaatttgatcctaagtcagggaagcaattgaaatccaaagctagtacgcggtcttacacgcagtattttgcagaatctttgacagcagaagcagaagttgatgagaaaattgttgccatccatgctgcaatgggagggggcacggggcttaacttgtttcaaaagcgcttccccgaacgatgttttgatgttgggatagcagaacaacatgctgtaacttttgctgcaggcctagctgctgagggcctcaaacccttttgcgcaatttactcttcctttctacaaagaggttatgatcaggtagcacatgatgtggatcttcaaaagcttccagttagatttgcgttagacagagctggcttagttggtgctgatggtccaactcactgtggagcatttgacacaacattcatggcttgtttgccaaacatggtggtcatggctccatcagatgagactgaattgatgcacatgatagccacagctgcagccatagatgataggcctagttgctttaggtacccaagagggaatggcataggtaccattcttccacccaacaataagggcacgccattggaggtcggtaaaggaagggtattaaaggagggaagtagggttgctcttgttggttatggaacaatggtccaaagttgtatggaagcagctaaggttcttgaagctcatggcatctcaacaactgtggttgatgcaagattttgtaagcctctagatggagatttgatgaggagactcgctagagagcatgagattcttatcacagttgaagagggatccattggaggatttggttctcatgtttctcattttctaggcttgaatggtcttctagatggtaatctcaagtggcgagccttgacattgcctgacagatatataaaccatgggtctcagacagatcaaattcaaatggcaggactgagttcaaaccatattgcagttactgctttgtcattgaccaatgtgcattgggatagtcgtttgcttctcagcctacagatatgaatcttaacagaaattgtgagcttgtgattcaatttttaggtgtccccttaatacatgtacataagtagtagttaaatcacaaaaattatggcattaattcaattaaaatgctgtggtgtaattgtaaaagtagttctacatcctttatcactgtgagtttttgataactaaacaggtacttaaggagggaagcaaaaa

SEQ ID NO: 50738 - DNA, 1486 bp, Glycine max
  Clone ID: PAT_MRT3847_16827C.1
aagctccaatgcgtgaagtcagaagaagggtaccaagacaataacgaggtttgtatagagttacttaaaacaaaagacggaatcgattctttagctctatacagctcatctgtcggaaggtttcccaatgctcctggggctttgctttatcctatttatggtgagggagaactaccacaagccttttgtcgccgtgctgctgtcaaaggttgcatttatgttctaagaatgtcggttgtttctctgcttatggataaggttacggggtcttataaaggtgttagattagcttcaggtcaggatttatatagccaccaactaatcctggacccatccttcatgattccatcaccattgtcttcgtctccaagagattttcccagtgaaaagctccaaatgttgggtcagagagatattaaaggaatggtggctaggggaatatgcatcacaaggagctcaataaagccagatgtatcaaattgctcggtggtgtatcctcctagatctttgtatcctgaacagttgacatcaatcaaagctcttcagataggatcaaatcttgctgtttgtcctgcaggaacctttattttatacttttccactatgtgcaatgatgccgatgaaggaaagaagctactaaaagcagccatgaatgctcttcttacactgcctgtatctggaaactctgaaagtattccaagtgttcaaagtgatagtgaagatataaaacccattgtgctctggagtgcattttatattcagaaattaattatgtgtaaacttgaatttatcagctccactcctacaccggtgggaaatctgaactacaatgcccttttagatgcgaccgagaagctatttaatcagatgtaccccaatgaagaattctttccaaaggcaacatcacctgaatattggacagatgaggatgagcaagggttaactttggatagctaaacaaggtgaaactggctgagcattaaaggaagttgtgaaagatatgtttgcgcccctaagagtcgaagatgtgggttaaaattgttaattatggaggtaaaaggttacagttcctaatttataggtgaacagaagcgaaaaaaggtcctcaaggcagggaagtagttgttactgattctgattttttttgtcaagcatacacatacggatttggtgctgtgtatccacttatgagcgtttgttggacaaagttgcaacttgtttcaagattgtggaacagcagtggaagtttcacggggccgaacagcgcttacactcctgtatcttcatctgcaatttgtattttgagaacgatttgatcgaataatattgtatgaatttaggacgtattcggatttattgcaacattaaccaacacataaacattgtaggttgttcgagcgcatttaattttggaaaaaacttgacttcgtcttagaaaaaaaaaaaaaaaaagatagggggcaagtagttctaccatcagaaaaaa

SEQ ID NO: 50739 - DNA, 322 bp, Glycine max
  Clone ID: PAT_MRT3847_16828C.1
ccacgcgtccgtctagatcggagcggcgccctttttttttttttttaatacattaatagaaagaccataaagaggtaaaaaaaataaaggagcaaataatacaagtatttgaacattaaaatgaaaggaagaagcactgaaatcttcaaacacagcatgcgtggcgcttcaaattttggaagccaaagtggcaatctgatcacaaggaagaatgagattttcagtttcagaataaaacacattgtgcagtacaacataacaagatgaaaatctgaaatctctatacaatgcaatattgttaaaatctgtgtcccttcttact

SEQ ID NO: 50740 - DNA, 223 bp, Glycine max
  unsure (1)..(223): unsure at all n locations
  Clone ID: PAT_MRT3847_16829C.1
ataaaatcacaggcttccaggctcaaatttaatagaggcaaaccgatgggaatgtaacatggtagaagtgggcaactaggaattgatctagagggtgaaaaattcagagattcatacgtgatagtatgtctcccacaacatgcncaagatgttaacacgtgaaacagctattttactgggaaggggaagagaatctttcttcattgggggaggggaacgggga

SEQ ID NO: 50741 - DNA, 628 bp, Glycine max
  Clone ID: PAT_MRT3847_1682C.1
tagtgaatctctcttgcaccataattcaacagaaaagagtgttgaagaataaagtattcattgcatgtgctacatttctctgacttaaatgtggaagttcaatggtgctctcggatgaaagatttgaataggaaaatcaatttggctaaaccaacatttgatggaagatgcctttcatgtaaaagtacacttaggcaatgtaagatgtaacacactgttcaattcgctgattttttgtgtttcccagtgcaaattttctgtgatttgcacaattttgtgcaacattatgtaatatgttctagtggaactattttccgaacctcaattcaacagaaaagagtgttgaagaataaaatattcattgcatgagctacatttctctgtcttaaatgtggaagttcaatggtgctcttggatgaaaggtttggttaaggtttgaacaggaatcaatttggctaaaccaacatttgatggaagattccttccttgtaaaagtacacttaggcaatgtaatatgtaacacactgttcaattcgttgattttttgtgtttcttagtgcaaattttctgtgtgatttgcacaattttgtgcaacattatgttctagtggaactaatttccgatcctc

SEQ ID NO: 50742 - DNA, 266 bp, Glycine max
  Clone ID: PAT_MRT3847_16830C.1
caccttcaaactctcagtcgagccgcagcccttgaccaaggacgtgatgatcatctcctataaatacacccggtgggattttgggggcactctcctaaaagcttagccaactgagtggattacgcgctgctcagtcggggctggtactgagctaagaagaaaggaaatatgaccaatccatggtcagaaattctagtttctccatggaccgtgaatcctctccaaatcacttggaggaacttgccaaagccgtcgatgagaagagg

SEQ ID NO: 50743 - DNA, 500 bp, Glycine max
  Clone ID: PAT_MRT3847_16831C.1
acagcaacaataacaacggctttctcactacaagctgaagctacctacatgctacctaccaaggtgggcatggccactcgtaacctcgaatctacacaatgcatttctaaggcttctggcttggaacccgcattagcttaactcattcgatcccttctgcccgaacttaaagatcacgcttaaaaatgtgttcaactccacctaaatggcacgattaccccttgacacctaaacttgtgacgtaattggagcgagtgcataatgtgttgcaaagaggctaaccttcgacgaaatccagagcatgacatacttggaagtgataggtactggaactgcttatcagtgcccaaccattgaaggtggagtggactcattagccttcaaggcatggaaatacaatgccagaagcttggcctggaacacacttccttcacggtgaatgcagaaggtgttgtcaagaatgccccgatcgaatttcagaacaccagctcatgacttgt

SEQ ID NO: 50744 - DNA, 478 bp, Glycine max
  Clone ID: PAT_MRT3847_16832C.1
gggtaatttttttaataatactgaaaaacctcaatttatattacaactcactgatctgaactaagcaaacattagaatcagaaacaaaaggaaagtattaacaaataaagagacactataaaatatgcagcccttctctcaggcatttcctctttaaaggggcttcccccaaaattctcccctttagaatcagaggaatacagattcgtatacactgtattggtgtcagagtacgaatttgagttatcattctcagtggaatgcgaagaagtcgtttaagtaagattcactattcatgtgaaggaattactcgaagatttgagtctggtgtatttttcgaagtcatagttcctgcacaagaatgtaaccttccgctttttcaatggtgatgtgtggtagacgactctcaattagagcaatcgttgagtcaaaattcctaggtagaccttcaagaattgcatccatgtgttcacgatag

SEQ ID NO: 50745 - DNA, 496 bp, Glycine max
  unsure (1)..(496): unsure at all n locations
  Clone ID: PAT_MRT3847_16833C.1
cattaaagtgcaaaataaaaaaggaaaagcaaaagcaaaaggataattcaaggtacccttagcaacctgcagtaagtggcaatcccaagatcatgactcatgagctatacaaataatcatagatgacgtcagactgacagtcacgtggcatgtaagtatactaatttcttaaagaaaacaagcccacattgtagggtaaagcaagggacagtttctccatcattgtcagctcgatatatacccttcattccattgggatttcaatttgttgttttttcaatctttatatttgtttggtacaatatgctttgaagcctagggccatgtccccccaagcctcaattccaacaaataaagtcttacccaccaaacaaaagaccaatgcacaattgttcaaattttgtttggtgtatcnnngaaaacagtgaacaaatacactttttattttaaaattttctctcttaatttgtactaggacaagttttaacatatatag

SEQ ID NO: 50746 - DNA, 554 bp, Glycine max
  unsure (1)..(554): unsure at all n locations
  Clone ID: PAT_MRT3847_16834C.1
tacggctggaaaagaccaccgaagggggagagaagctcttagggtttacgagagctgcggtccaatacactcctatctgcaaattacgcctacaactcccttcaccatggctgaacaaaccgacaaagtttttctgaagcaaccataattgtgctctcagcacaaagaacacatgggaaggcaaagaaacctaaaccaggtgccaaccactacagacaatccattactcttggattaaagactaccagggaagccatctaaagagcctatattgacaagaaatgccccttcactgtcaatgtaatacatccgtggccgtatcttgactggaacatgtcacagtgctaacatgaacaagactattattgtgagaaggaattatctacattctatcacttattaccaacaggtacgagaacaggcactcaacatatacctgctcatatatcacctgccttccaagtgaaggagagaaatcacgtcatacttggtcaatgcatgcctttctctaggacatgagagntcaatgtcttgaaagtgatcccagctggatc

SEQ ID NO: 50747 - DNA, 1609 bp, Glycine max
  Clone ID: PAT_MRT3847_16835C.1
gcaacaccaataatatactgaaactgtatatatacataagtccgttagtacagtgaaaagccaggggcatcaacagtttctttaatcgattccgtcacagataaagtgaaacaagagaaaaaactctatagacagacaagttgtaagagctaggaagtttgaggttcacatggagcttcggttgcatagggtgtaaccagagatgagtgagctgatagcaaaggcaacgaaagcgaggaaggccattccaatagaagcagtggccatttctgtgaactcatctttcccccaattcgatatccaatcgtcaacccgtgttgctgcagatgatgatgccgatatcagaagatatgccagaacctgatccatgaagaaattcctttttctttaatgatgtaaagtttatttgtttctttttccggtaataatgagcaaacaggtaaacaatccccaaagaaataaaataggggaaactggaatgtagtattgtcactattttaaagccttcgtttctgggtttaaagtcctatctactagttaggacataaccagtggcatgtaacgtcacagtacaagggaaacaagagagaactctatagatagacaagttgtaagaactggggaattaggaagtgtgaggttcacatggagcttcggttgcatagagtgtaaccagagatgagtgagctgatagcaaaggcaacgaaagcgaggaaggccattccaattgaagcagtggccatttctgtgaactcgtctttcccccagttcaatatccaatcctcaacccgtgtggctgcagacgatgatgacgatatcagaagatatgccagaacctgaaccatgaagtattcaaagtatttgcgacggtggtgactgattaagcgtttccccgtggcaagttggcatgacaaaacaaatgcttgtaatgccgagctatgcaaatgccaataatattcacagatcaccactacctatatttcttatagcgatccaatgaatcagcacctccaaccttgcgtcttatctgcggccataacagaaaacgaaatcagacacaccaccacctcgctcagccggaaccccagcgccgccttgctcacggtctcgtgcgtcttccacccccccgccgccgccgccggccgttgatctccggtctcctccgccgaccgccggaaccgccttttccgccgtcctctgatcctcctccgccgcctggtcgttgaacatcaccaccgccgccgacggcggattttccggcggttcccggtgctccgcgcgcttctccggtgtgaactgcttgagcttgccaacggtcacgatggccacggagttgtcgcgcttctccggcgatttttccggcgactcggtgccgtcccagtgcggcgagtcgaactgagtcgacgactcggagttcttcgactgcgatttgttcatggcggaggtgtgactctcgtgagttgcgattctgcgttttccgtttgcattggtttgtgtcgcgaggaatttaaaaggaacaagagtgaaagaaaaaaaaacaataaaggcgaagagaaaacagatggaaaaggaaaaggtttgtttgggcggtggggctagagaagaaaac

SEQ ID NO: 50748 - DNA, 565 bp, Glycine max
  Clone ID: PAT_MRT3847_16836C.1
cccattcgttcgcccacgcgtccgcccacgcgtccgcttttttttttccaccgattccctcaaaagtctccatttttatcccttttatccatttggggttttcccaatttcccaatggtgcaggtgcaggtccagatcatgccggaacacaattccgatcccgccgcccctccgcctcctcctccgccgccgcacaaccgccggccgagggtccgagaggtcagctcccggttcatgtccccatccgtgccgcgccgcccgcggacgacggagccggaccccgatgagaattccgaaaccccgttcccacttgggtgttctatttctcagagaaaacaaacacaaacaccacaacaacaacgttcgatgaagcttttcaaagagaacaacaacaacgagcatgttccaccgaaccctcacccttcaaagtcatgttctggaagaaatggtacgccttgtgtctctaggcctggcactcccactcctctcggttacgtgtcttctaggtatagacaaacacagcaacaccatcatcatcataataataatcaccatcatcatagat

SEQ ID NO: 50749 - DNA, 329 bp, Glycine max
  unsure (1)..(329): unsure at all n locations
  Clone ID: PAT_MRT3847_16837C.1
aagctcggtatgaaatattaaggtcctgcttacaggaaatgatgcgtacagggatattgactagtttacaggattgtaagaacgccatgcttcctcattacgctagtgcgaaagataggttgaacactctagattttcatgaggacgcgacattcatgcaactgtgcaaacaactacttgagactgcagaggcatgtganggaatgggtggaaggtcgttgagagagcttccagttttgggagatgctgcgcttgcaaatccgtttgaatgcaagcctattaagttcttaggttcaagggtagaaacagcaaacgaggagcgttctgag

SEQ ID NO: 50750 - DNA, 1118 bp, Glycine max
  unsure (1)..(1118): unsure at all n locations
  Clone ID: PAT_MRT3847_16838C.1
ttggccaagaggtacacgttcttgttggcttgtngtttgtttntgagcattgnggncgtgaatcacgtngcanaatttgagaanccttttcacctgttggcgtctggnatcatancagtcccgattgatcttcccggaacgccgttcaacaaagcaattaaagcagcaaacgcaatcaggaaattcggcttgaagatcattagacagaggaaggtggatttagctgaagggaaagcatcgccaacacaagacattttgtctcatatgttgttaacatgcgatgagaagggacagttcatgaatgaattggatattgccgacaagattcttggccttttgattggaggccatgacactgctagtgctgcaatcactttcattgtcaaatatcttgctgaactccctcacatttatgatagagtctatcaagagcaaatggaaattgcaaaactgaaatcgccaggagagttattgaattgggatgatgtcaacaggatgcagtattcttggaatgtagcttgtgaagtaatgagaatcgctcctccacttcaaggaggttttagggaagctatcaatgactttattttcgatggcttttcaataccaaagggatggaagttgtattggagtgcaaattcaacacataaaagtccagaatattttccagagccagagaaattcgatccaactagattcgaaggacaagggccagctccttatacttttgtaccatttggtggaggaccaaggatgtgccccggaaaagagtatgctcgattggaaatattggttttcatgcacaacctagtgaagaggtttaagtggcaaaaattgattccagatgagaaaattatcgttgatcccttgcccatacctgcaaagaaccttccaattcgttttcatcctcacaaaccctgaaaagatatttgatttgaatcaacccaattgtgcaagtcatgtgtgtcatgttcaatctattatatatatattgtgtgtcccaaatgtattctctcgcttatatttattcatttccagtttattttgtatcgatcgatccttttttgtattcatgggccttatcataattaataaataaatagccccccaactttttttcc

SEQ ID NO: 50751 - DNA, 277 bp, Glycine max
  unsure (1)..(277): unsure at all n locations
  Clone ID: PAT_MRT3847_16839C.1
tcncctttttctcaatagactaaatcattccatcattcggtgcaagacggactgacaatagangcacgcggcaccagattatttccaaattgaagcgtccaagantccaaattcctcattctctatgagcngaaggnagtttgcagcaaaanagattgangcaagcactgcgagacgcagataaagtgagggtgaagagaagagaggaatggnaganaaagatttcattgaagagggtaagantatgantcgaaaggngaagaggaaggcaatgaag

SEQ ID NO: 50752 - DNA, 354 bp, Glycine max
  Clone ID: PAT_MRT3847_1683C.1
ccattcagggtattgtaatcaactcatggctgagggaaggctgtgctccctgggagtgcagacaaacactatcctatgctggcacgaatgcatgagacactggagatgattacacgcttgctgaagatctaggctcgctcaaaggatccacgtgaacattcatagtggggaatcacgtcaccatattcttcaaagatatgcaagagctcttgaatgaccaagagtatgatatgaatgttctagggcacatatcatacaatattgacattggagctgactgatactgtagaccaaaggcgggatacactaatgaccatatgaataatgctcactcgttatacggaggcattacaa

SEQ ID NO: 50753 - DNA, 1404 bp, Glycine max
  Clone ID: PAT_MRT3847_16840C.1
gtcccatgataagaagttggatcaggtggatgagattcaggaggttcagcctgcagctactagttctggttcgacagagaaatctgtcaaggcgtggaagtcacaggtggaatctgataatactttgcccaaattgacatccaagggaagaagtcctctttcaaaggctcccattccgagaaagaagggcaagcctttgaggaaaccgattggtggggttactggtgtgaagaatacgaagaattctcctataggtaagtcagtgtcacaaaaccgagttgagagtatggctgagtcagcattagaaaaacctgagcgggcacctgtattgctaaagcaggcaagagatctgatttcatcaggggataatccgcagaaggctcttgacttatctcttcaagcaatggaactgtttgagaagtttggtaatgggaaaccaagtttggagctggttatgtgtttacatgttacagcagcaatatattgcagcttgggtcaatatgctgaggcaattccgattcttgagcgctcaattgagattcctgttattggggaaagccaacaacatgcccttgctaaatttgctggtcacatgcaactgggagacacctatgctatgctgggccaacttgagaattcaataatgtgctacaccactgggttagaagtccagaagcagattttgggagagacagacccagggttggtgaaacttgtcggtacgtggctgaagctaatgttcaagctttgcaatttgatgaagcagagaggctgtgtcaaatggctcttgacattcatatagcaaataattcagctccatctcttgaagaggcagctgataggaggctcatgggccttatatgtgagacaaagggaaatcatgaaacagctcttgagcatcttgttttagcaagcatggcaatggtaagtaacgaccaagaagcagaagtggcatctgttgactgcagcattggagacacatacttatccttgtctcgatatgatgaggctgtctttgcatatcagaaagcgctaacagttttcaagaccagcaaaggagagaatcacccagcagtgggattagtctttgtacgtttggcggacctgtataacaggacagggaagataagggaatcgaaatcatattgcgagagtgcacttaaaatatatgagaatccaatgcctggaattcctccggaggagattgccagtggtcttacgaatatctcaactatctacgagtcaatgaatgagctggaacatgcactcaagttactgcagaaagcactagagatatataatgatacccctggtcagcaaagcacaatagctggaattgaagctcagatgggagtcatgtactacatgttggggaactattccaaatcctacaacactttgaag

SEQ ID NO: 50754 - DNA, 434 bp, Glycine max
  Clone ID: PAT_MRT3847_16841C.1
ctcggaatgcggctggggcttcccccccccttaacttttcgaggagctgaacagattctgggggttcctttcttcttcttcttcttcttcttcttcttattattattattattattattattattcatttttcattctctcctagttttttttcttcttcttggtgttatggttttgtcacagtctttctacgatatgttggagaaccctgcaatattgggtctgtgcacagttattggaatgttttttagtcctctgctggtgacatttttatttggtgtcatcgttggatggttgtggaaaccgaaatgggcgacgctgggggaaaataaattggcgacttccctccccaaatacttagattttgcctcaccctcctcggcttcttcgccttctaagtttccagtgtctcctatgaagagttggtctttctc

SEQ ID NO: 50755 - DNA, 993 bp, Glycine max
  Clone ID: PAT_MRT3847_16842C.1
ccacgccgtaatttaagtcattcccatgactttcatgtggacctgacttgagtaaacttgttcattataacaaccacaatgcacagcagagtcattcaccactcttctctctctctcttcattgacaagtttctatctctataaaaccacacatacccacttcactacctcatcataaggtgcctctaccaccgtactagctagagagaattgaattgaagtagtaacaactactaccaacaatggtgtctgagtcagagaataacaagtgtagtgatgatcatgtgctgacaaagctctctttcttaatctcacgcccgaccatgccgccggaaactctcatgtcgccgccgcagaacacgatctcggttcccttcaagtgggaggaagcaccggggaagcctaggcattgccacaccgaatcggatcccgaggacagtactactgccgttaaaaaaaccttggagctgcctcccaggttgttgtttctgttggacagtaccaacaaggtttccgacgtggacgggccttctcctacgaccgtgcttgatgggccttacgtgggccgggccatgtccttcaccacctcctataggactcccagggctaactggaattctaattttggctagttttctactcatctgtgacaagatgtttaacaccaataatcctgagggcagttttgacttttcaccccactcctgctcttctatgcctaacgtgaagatcacaagggttccaagacgaggaagcttctgttctgtctaagcaaaggtcacatatgtgggcaagcatttatgaaagccttaagcaagtggtcccatggagacgcaagcaacagacgcagaaaaaatttgcttccaaatttgacactgtttagatttttactcttgtcaaatggagttatttaaaaaattatatcctgtagcaagaaaatagcatttagtatagaaataaaaagttattttacaaaaaaaaaaaaaagaaaag

SEQ ID NO: 50756 - DNA, 557 bp, Glycine max
  Clone ID: PAT_MRT3847_16843C.1
agggacatgaagaatgttaggttaaaaaaagggggatgcctttaataccctttacaaaaagaattcaaaccaagataaggggacaaagcataaaacttttatggggggggtttatttggcaaacgtttcaaaaccattttaacttgggggattggccactggatgttctccaatttttgcacaaaggcatgggactgccttgcaatggtggcaaagggaggaacaacaccctgggactcacccaagggggtaaccgctttgttttttgcaaaaaaaactttttttgttgcctcaaaaaaatattttctttttttatgaaggggagggataaaggccttaagggaagtttttaacaaaaaaacgggttttaaaacacttaatttcgcactcatgggctcacaccttttacaaaaccaagttttttggggctcaaaatatttatggggaggccccaacttcaaatttttgacaaggttaataaacactgcagggatttggtccaaaacattgtaatatttagcaaactttttttttggaaaaaaaagggcatcccccag

SEQ ID NO: 50757 - DNA, 2423 bp, Glycine max
  unsure (1)..(2423): unsure at all n locations
  Clone ID: PAT_MRT3847_16844C.1
tacacatataccaattttgataccacactaattaagcacatggatggagtaagagatggtcacatcgacttggtggatgcatgcggttgatatttacatatggttgagttggttgatcnaaaggaaaagagaaccgtgttctacacgaacccctctgactcagaactctttattcatgattgaagcaaaaaccaaatcaacgcacaggttggatttntgttctgtgaagagaaaagactcactcacgtacacagcaattatgatcaggcgcggcacatatatggagcacaccttgcccacctcaacaacttccagcaatgccccttcttgttgttattgttgttgttgcctttcctagagctagaagaatgaccaaactctgattcgtttctgttcagtatctcccacatcactcgaatgtcctcatattcacatgccctcacatagtgccattactgtaaccaaccatggtttccgtcttcaacgagatcctattcccgccgaaccaaacccttcttcgcccctccctccattccccaacctctttcttcacctctcccactcgaaaattccctcgctctcgccctaaccctattctacgctgctccattgcggaggaatccaccgcgtctccgcccaaaaccagagactccgcccccgtggactgcgtcgtcgtttgtggaggcgtcagcggcctctgcatcgcccaggccctcgccaccaaacacgccaatgccaacgtcgtcgtcacggaggcccgagaccgcgttggcggcaacatcaccacgatggagagggacggatacctctgggaagaaggccccaacagcttccagccttctgatccaatgctcaccatggtggtggacagtggtttaaaggatgagcttgttttgggggatcctgatgcacctcggtttgtgttgtggaacaggaagttgaggccggtgcccgggaagctgactgatttgcctttctttgacttgatgagcattggtggcaaaatcagggctggctttggtgcgcttggaattcggcctcctcctccagtgacagggtcatgaggaatcggttgaagagtttgttcgtcggaaccttggtgatgaggtttttgaacggttgatagagcctttttgttcaggggtctatgcaggcgatccttcaaaattaagtatgaaagcagcattcgggaaagtttggaagctggaaaaaaatggtggtagcattattggtggaactttcaaagcaatacaagagagaaatggagcttcaaaaccacctcgagatcggcgtctgccaaaaccaaaaggtcagactgttggatctttccggaagggacttaccatgttgcctgatgcaatttctgccagactaggcaacaaagtaaagttatcttggaagctttcaagtattagtaaactggatagtggagagtacagtttgacatatgaaacaccagaaggagtggtttctttgcagtgcaaaactgttgtcctgaccattccttcctatgttgctagtacattgctgcgtcctctgtctgctgctgctgcagatgcactttcaaagttttattaccctccagttgctgcagtttccatatcctatccaaaagaagctattagatcagaatgcttgatagatggtgagttgaaggggtttggtcaattgcatccacgtagccaaggagtggaaacattaggaactatatacagctcatcactattccccaaccgagcaccacctggaagggttctactcttgaattacattggaggagcaactaatactggaattttatcgaagacggacagtgaacttgtggaaacagttgatcgagatttgaggaaaatccttataaacccaaatgcccaggatccatttgtagtgggggtgagactgtggcctcaagctattccacagttcttagttggccatcttgatcttctagatgttgctaaagcttctatcagaaatactgggtttgaagggctcttccttgggggtaattatgtgtctggtgttgccttgggacgatgcgttgagggagcctatgaggtagcagctgaagtaaacgattttctcacaaatagagtgtacaaatagtagcagtttttgtttttgtggtggaatgggtgatgggactctcgtgttccattgaattataataatgtgaaagtttctcaaattcgttcgataggtttttggcggcttctattgctgataatgtaaaatcctctttaagtttgattcattatctacttcatccgtatttagcaaggtagctatcagtctgcctctccattattcccctctattcttggagagttggtagattttaacttgttactatatatgtaagtccaggcaatgctctgtaacaatgcatgagttacatgattataatatgtgctttttatttg

SEQ ID NO: 50758 - DNA, 113 bp, Glycine max
  Clone ID: PAT_MRT3847_16845C.1
tcatgaaaacgatttaatgcactaagcagaagatgaacttcttactatacaaatactaccagcataggagtgcattcttgctccaactactgatatctgtgactggaaacatg

SEQ ID NO: 50759 - DNA, 569 bp, Glycine max
  Clone ID: PAT_MRT3847_16846C.1
cccacgcgtccgcccacgcgtccgctttgagtcttgatctaaaaaaaaaaaaaaaaaaaaaaaaaaaaaaaaaaaaaaaaaaaaaaaaaaaaaaaaaaaaaaaaaaaaaaaaaaaaaaaaaaaaaaaaaaaaaaaaaaaaaaaaaaaaaaaaaaaaaaaaaaaaaaaaaggggggggccgttttaaaggaccaaagttaacgtccccgggcatgcaacgtaaaaacttttttaaagggccaccaaaataaaattaacgggccggggtttaaaaacgtgggaacgggaaaaacccgggggtaaccaaactaaatcgcctggaaaaaaatccccttttcgcaagggggggaaaaagcaaaaaggcccgaaccaatcgcctttccaaaaagtggcccaccctaaagggaaaatggaaccccccctgaaccgggcaataaagcgcggggggggggggggtaacccccagggggaccgttaaatttgcaaaggcccaagggcccgcccctttggtttttttcccttcctttttgacaacgttcgcgggttttccccgtaaagcttaaaatgggg

SEQ ID NO: 50760 - DNA, 147 bp, Glycine max
  Clone ID: PAT_MRT3847_16847C.1
gacacacccctcagcacatacctccgtcgcgccttcaaaactctatcgatcgggattctctacctgtcctgccacgtatggatcgcgatccatggctcgtatcaaccattttgtgtccaaatcgacacgtcgactccgctcctcaga

SEQ ID NO: 50761 - DNA, 425 bp, Glycine max
  Clone ID: PAT_MRT3847_16848C.1
cctaggtatgaggcttagcatggagaatcactcgccaatagatgacagagttacacgagtaagagcctctggacaccttgaatcggctatcaccgttcttgtgctctggccactccgacaaacagttcgctatggatatgatcatatgctccatgttagcggagagggacactacctccgcggcgctaacgtggatactgtggctgattctcaagcccccgaaagtggaggtggaggtagataaagaagttctggataaagacgcggcatacacacacgtgtattatgaggtgaaggacatggtatacacgcacgcggacgctgcgctacagcatgacgctgtacccggcggatccgcaggatacacaaggaggcaagggaagactactctttgcctgatggtacataagtgaagagagggtgga

SEQ ID NO: 50762 - DNA, 312 bp, Glycine max
  Clone ID: PAT_MRT3847_16849C.1
aaaaaaaaaaagggggcgggcataattttcactccatctaaaattgggataaacattgggggcctaaaaggccacgaaactaacatttctgggcaaggaaaaaatccctcagctccccatacaaagcagattaatgaaaaggggctttcaaatccttttttcacccaacatgggacatgcattgacagctaggggatccccataatcaaaacactagggtgtccttattctacagttataaagaggagcttttcactaatctaatcaccaaagactaataatttttacccctcctcttaataaaaggctttt

SEQ ID NO: 50763 - DNA, 442 bp, Glycine max
  Clone ID: PAT_MRT3847_1684C.1
aattcggctcgagctcgagccgtgcaaagtcttgcaatgtaataagctgtttgtcagaaacttctgacacccctttctctctctacgcgttctctctctcccactctggcggcttacaatagaagtaaatggaggcaactgcagaagcacttccgtgccgagcttacccttttcaaataccctttaacattatttttaatattcacactgaaaaaaggtaataaaaaaagaagctttttttccttgagcatcacaatcggacacagaccctcttaagaaaaaggaaaaaaaagccttatgtgaatgtgacaatggaagctaagcctcttcgaactgttccctcttcacacaacacttctggaggtggaccccagaagaagaatggcatggaacacaagatggaaagtcgtgttgttgatgagaggaaagagggtgttatggt

SEQ ID NO: 50764 - DNA, 338 bp, Glycine max
  Clone ID: PAT_MRT3847_16850C.1
aaaggaaaaaatgctcccttttattaatataaggaacattctcaggttaattaaatatacctattcttacaaaaggggaaaaaaagaaaaccattttaagtttttaacccaaaaattagttaatttttttttaaaaaaaaaaaaaattgacccccccaaaagccttggaacggttttttcttggttttactacccccctttgacttttccatgcccaagggttttatttacatttttaccacccacaaaaacgggttttacccttcaccccccctggttgaaaaaaatactattctccccccccttttacagtagcaggtagccactttttgggaccc

SEQ ID NO: 50765 - DNA, 614 bp, Glycine max
  unsure (1)..(614): unsure at all n locations
  Clone ID: PAT_MRT3847_16851C.1
caggaggcagtaaaatgtcattcacgttaaatctgacaatcagaaaaaaacaaatctaaagaaagattacaaaatcgggttgtacaaagatgaaatcgaaataannctgcccaacaactatacctaaaccagagactaaaaagaacgagatccaagtcctcccagctaaaaaactcacnngtatagaccatactcaagnnnaaagacctcttttgttannnnnaacacttcctgccacctagatgacctttgcctacaattctctcctattcatcgctagcatgtccatccctgaacttttgcctctgcaaactctcttctttgtgggtctgattgcattcattaacccacttgtcccactctttcttcaacagcctgcgcttctaacgcttctnntgactgaccaccaaggaaacatcctgagcttctgcctcaaatttctggctggatttcttcaagatctttgcaatctctgactgcttctccggaggcaacaaagatggtggacttggtcnnnatatgaactgaaacaaaggatccttcnnnntcctagatacanngcttgccattgaaagaccatatantgaaaccattctacattccatgaactgaac

SEQ ID NO: 50766 - DNA, 167 bp, Glycine max
  Clone ID: PAT_MRT3847_16852C.1
atactaacttgcttgagaatttacctccctgaaaagtttgatctgggttgggaacaagaacaaacttttcagggaggtaaatactaagttgcttgagaattctttttgcaccttgtacattggattccccattcatgtcacaactttgaatctatcttttatttgca

SEQ ID NO: 50767 - DNA, 600 bp, Glycine max
  unsure (1)..(600): unsure at all n locations
  Clone ID: PAT_MRT3847_16853C.1
ccccncnncccaantgncaaacatatttgacaaaccatatattacaaataatcacttttaacattttcatgttaatagtactagtagttagtacaacacaggaaaaaaaagcaacaagcaaacttacattgaacaccagctgtactactcatctgggatgcatgatgccatcaaagttgaatcccaattcacattatcttttaatgctagagggttgaagcaacgaaaatcaccctccagtctccaccactttgttaatgtggtagcaatgaatcaaatgatgccaattctttttgcgtcacacaaatggtctttgagactcccaagtcatctaatatatgtttttctttataagaaggtgggtttataaggatcaatgaatcgaatatcttccacgctactttttggtttgattacatggagtccagtccgcacaacaagcggctctgttgggttccatttgaaatcaacatcaacagagacccctacatgattccaatcattttctgaaactacttcatccacattatcttcaaatttaaatctcctttcaccaaatataagtatatgatcagttaatactgggaactcgaaataaaa

SEQ ID NO: 50768 - DNA, 428 bp, Glycine max
  Clone ID: PAT_MRT3847_16854C.1
ggttttaacaatattttgattttcttaaagatcaattcttatgaaaaagttcaaagacccgcatactctaaaagaaatcttaaatatgcctttagtctagataaattggatttgaatatttgcattttttttattgattttagtttttttagaagataatttaaagttttttgtttttactctgtaatgaggttacatatatttaaatatatgccatgctagctttattttaaagaggcttataatgtaatcattgtaatgtctttaaatacattcctacatgattaataagtcatgatggtgacaatttttaaaattttcaaattttatgacaattaaattaacattttttacttcctaaagaaattaacattttttaaataactaaaataaaatttaatcttatttaaagaaattaaaagcatttt

SEQ ID NO: 50769 - DNA, 900 bp, Glycine max
  unsure (1)..(900): unsure at all n locations
  Clone ID: PAT_MRT3847_16855C.1
ttnnacctctgaaattttcatttgcttgtaaagtctcttggcacaaggaagtatcatgtgaatttgtggccgagtcatgttgcttctgagttcttttgcgatattttctcttggaaccctttgctgcttcaatggaattggagaggatgttaggcaccaactgaagggtattctgacaaattggttccccggtcttctgagagttttcaaaacatgtttctgattgatagaggatgttgtcaatttcctttgtttgaatatattgatgcctacttccattatttccttcctggcacaaatcagaattttccagagctggaccttcctcagtggcaggaaattttgctatctgtggctcttctgtagtttctgacaaggctgtgattaattttctttctgactggaaattattagcttgcttttcatgcagtagaagtgtattatcatctgtgttttttggttctttggccttgtggtctgaagtggtattgaaagctttctcatttctatggtcaatctcctgctggcaacttattgtgctttggcttgcatatttattatgttccaagtcaaaatttagagctcttctgcaggatttttttgttgcaacaatagaatcaacactttcttctgtaacattggtctgtggtgttgctgcagtttttcggacatacttcctctttttgtgcggattctccttcatctgtgtcttttgagttgcaggctttcgagtgcttttcggcttggcctctttaattacttttggtctatgctttcttcgttggggtgctttctgctcaggtgtcttgttcaggtcaaaacccaggtcacttcccctcgtgccgtgacaatggaacattggaacagtggctgcatggtgatgtaggacctgctactcgt

SEQ ID NO: 50770 - DNA, 569 bp, Glycine max
  Clone ID: PAT_MRT3847_16856C.1
cttatttccttttttttttttttttttttttttttttttttttttttttttttttttttttttttttttttttttatcccaaaccagaccgcctttttgtataggaaaaaaaaataggggaacgggacaagtttttttgggccccagggtcaaggcaaacaaccaccgggtctacggttttgggcccccgcaaatacaacaattggggggacccctggccgggaaaaaaattccccccccccctttcttgaaccgccctacgggacccaaaaaaccccgcccttaaaaacccggtcaggggcaaaaaatcctatcgggaacagggggggccccccatattgggggggggaccccttaaaaacccaacattcccgggttcccgggggaaaaaaattaaccccccccccttgagaaaaagcccgggggaccaataacttaaaccgggctctaaaaaaaaaccgggaattgggccaaaggcccgggcttgggcttaaaggaacccccagggccttgaagcaactttttgacctcagcgggggcctcaaaaaaaaattgggcctgggtagggt

SEQ ID NO: 50771 - DNA, 630 bp, Glycine max
  Clone ID: PAT_MRT3847_16857C.1
aaacatttttggagatgggggattatctggtcctaatgcacagtctgtactgaaggagagtaacagcaatactgcctactcaagattgccacctcctttaatcgatggtccattggtgtcccgaggtccacagctttctgctgcaaattatttggttacatcaaatgcagcatctccattgccgatgcctgcttcagccatggctcgaagtttctctacatcttatcgtggtgctaaagttgcagcaatacatgactcaagaccactagaagaccctaataaatcaacaatttctgaggatattgattctcctcctctgatgcaaattgctttatctactagtcagccatcatcagatggctctgacactgttgctcaggctgtctagtcaggaggtaatatttatgaaaaagtcttcttctcattacctggtttcaagtgagaaaaattgggcatggggttaaaacttaatcctataatattaagttcttggaaagccctgttgggatggaggataacattttattgattaagttctatcattagaaacctctatacaaataaattctagaaatgtgtattgacattgaatctttttgaagcaataaattctacaaatgtgcattggcc

SEQ ID NO: 50772 - DNA, 1643 bp, Glycine max
  unsure (1)..(1643): unsure at all n locations
  Clone ID: PAT_MRT3847_16858C.1
ggacattttgggagatgggggcttatctggtcctaaggcacagtctgtactgaaggagagtaccagcaatactgcctactccaaggttgccacctcctttcatcgatggaccattggttcctccaaggttacgtcagctagccaatctgccccactttttgttgataataagcgcgattctagcgaaaagctgagacagatgcgcccaactttatcttggaagttcaattcatatttgcggcgcacccctacatgacccaagaccttagatctcctggtcaagcaccatgccctgggtgtgatatcctctctgatgctcttgcttgctgcggccaactttatctcggaagttcaattcatatgtgctgcctacaccagttgatgcgaagagttcaatatctatgaggtcaagtaatcaagtacctttgaaaataaagacaaatttaaatgagcctatgaagaatttatggcattcatccccactagaacaaaagaaatatgaaaacatttttggagatgggggattatctggtcctaatgcacagtctgtactgaaggagagtaacagcaatactgcctactcaagattgccacctcctttaatcgatggtaatttatcctctagtcatgattatattaccgcttactctaaaaagatcaaaagacatgccttttctggtccattggtaagtaatgcatggccaaccaagccacctgtctcggttaaaagtgtccaattgttttctggacctcttttacggacctcaattcctcagcctccatcatcatctccaaaagtatctcctagtgcttctccccctctttcatcttcacctaaaataaatgagcttcatgaacttccaaggcctccaaccatttccccatccaattctaagtttttaggtttggtgggtcattcaggtccattggtgtcccgaggtcaacagctttctgccccaaattattttgctacatcaaatgcagcatctccattgccgatgcctccttcagccatggctcgaagtttttcaatacctaatattggggataaagttacagaattacatgagtcaagaccagaagaagcccctaataaatcaacaatatctgaggatattgattctcctcctctgatgcaaattgctttatctactagtcacccatcatcagatggctcggacactgttgctcaggctgtctagtcaggaggtaatatttaaaataggatactttagtttaattatttcctttttttcatggtttaattaggtatttccgtatttgttataaattattaaatataattgaagtttcatttataaatggaaaagccttcttctcattacttggtttcaagtgagaaaaaatggacgagggttaacactcaatcctataatattaagttcttggaaagccctgttgggatggaggataacattttattgatcaagttctatcattagacacctctatacaaataaactctagatatgtgtattttttttttttttggtctaatctagaatgtattgacattgaatctttttgaaatacaataaattctacgcatgtgcaatggcattgaatctaacnaaataaaatgctactgggatacttctatagaaaatataaataaaaagggg

SEQ ID NO: 50773 - DNA, 360 bp, Glycine max
  Clone ID: PAT_MRT3847_16859C.1
gttgcaggcgcagagtagagcagcacagaagagggaaaacggttccgtcgccgtagaagaaaacatccatggtgcacgtcttcatttacaggaactatgtgaagacatttaagaagccgcgtcgaccttacgagaaggagcgtctcgacgcggtagttgaacttggttgaatgagtacggtcttttggtgcaagatagagctgtggagggtgcaatactctctcagtcgcttccgcaacaactcgcggaacctccttacctttgacgaggaagaacccgttccgtatcttttagggagaggcgcttgttcaaaagatgtttcgttacggtttcctttatgagacacaatacaagcttgat

SEQ ID NO: 50774 - DNA, 220 bp, Glycine max
  Clone ID: PAT_MRT3847_1685C.1
cattcctttactgaagtcttacttgaaggatgggtgagaccttgttttcctcgtcactagaattttcgtagcatggaaaggccatgcgtacgatatgtgccctctccggatgaacactggctatggtgccagtactcctgaggtgaaatgcgcaggttggtagcgtgctgtggatgcacacaagatctttggctttcagatcaatcctgaccattgcgtt

SEQ ID NO: 50775 - DNA, 632 bp, Glycine max
  unsure (1)..(632): unsure at all n locations
  Clone ID: PAT_MRT3847_16860C.1
ctcgggttgggaacttgggacagagtcgtttctggcaattaatttagactgagggtacttaagttctcgaaatcagggattttacctgccgtgagttgtaacctcatgttcaaattttcttacaaggtcaactatcagtcaatattgcaaggttcagtgtaacaatcaatgatatgcaagtccttaattgttgttggactaagagaagcatggctacagagattaattttccttatcttttaacatataaggtctgaggggatttgtgagacttcaaatcttggcttcttaacttaattaaaatagaaacatatataaccaaatagcgaagaatataccaaaccccccacttattgtctcagatagaatgatgacaatttctgtatttgatgaaagtattgaggacttttaaagtgcatagcccagttgtccatattttttggcacgttatgccaatctatcgtgcgctttgaatgttacgtagtcatgagccttttgattagattagctaactttntgtgcacaaataaacagcaaaagcacacgactcgttntgcaattggaggagtactaaagtgatactagtatttttttttatcacatggtgcatgatttaacagggagtttcaccc

SEQ ID NO: 50776 - DNA, 457 bp, Glycine max
  Clone ID: PAT_MRT3847_16861C.1
agaaggggcaagttgtatgcatcattgaggcaatgaaattgatgaatgaaatagaagctgatcagtcaggaactatagttgaaattgttgcggaagatgccaaatctgtaagcgttgacactcccctatttgtgattcaaccatagagctcaaagtattcgaatggatggatgaagatctaagtcggtagttgaagtgtgaggctcatcaaccccccccccccccccaccttcaaggtagagaggaagtgtaggaagattttgttctaaattgggatgacacggttgagaagaattattgcttacaatggatttattccttatttttcgcttttatatgattgcactatgttctagtgaaccttttttttgtttaggcaagttaaattgtatgatatttaatctcatgtagtttgtttttactttttgttttgaaagggtgggggagcatttgaacc

SEQ ID NO: 50777 - DNA, 354 bp, Glycine max
  Clone ID: PAT_MRT3847_16862C.1
ctgcacctaaaatgaaaattttttggggggatttttttaagtgcttagctaacaccaacctttactataaaaacccgaaaattgtggtttaggcccccccgcaacaaaaaccatatggttttttcaacacggggccccccctttgtatagctcgttaaaaaaatcaaaaaccaatgggttccctttttaattataaaacaccccgaatggttttaagcccaacctaaaaatggacaagcctttagcccaatttccaacaaataatacaccatggcttagccatttcttgtttcttataaaaggccatgaaactccacaaaaaaatgtttacatcaaaagtgcagtcacctcgat

SEQ ID NO: 50778 - DNA, 698 bp, Glycine max
  unsure (1)..(698): unsure at all n locations
  Clone ID: PAT_MRT3847_16863C.1
ccacgcgtccggaagttaatactcccaagtatagtccaagtaaggttttaaaatgcgaatgtagaaatagatattatgtgtccgtactcaaatcctaaccattaatccattaccatcctagttaaatttactaagttagtgcatgtttgttaacatttggagcaaaatgaagtttacaaaaacatccataccctttcttttgtaaaattgagtttatggaccattaaatttacttcaaaattcgtgcatcatattttgagctgaaatctaagcatgcacttaaacattgcgtgttgagtgctgctaggtgcacccagcagttttgctggtacacccagcaattagtgtgaaaaggcaaaaatgcccttccttaatttaaaaaaaaaacgtaacctctctctctccctccctgcgtttgcgcttctcttcttcttctttcggatcagntctctccttcttcttcctacttcttcatcttcctcatcttcctgcttcatcacatttcttcttcttgctgcttcttcttcctgcgccttcttcttcctgcgtcttctttgtggctcttcttcttcttcgttgaggaggtgcagtgggtggtgcgaaggaagctttccgcgaaaaagcaacaggtcggtttgcaccgtccaccgttcgaaggtcagggcccgtggaacttggacaatttttttgctccaatg

SEQ ID NO: 50779 - DNA, 161 bp, Glycine max
  Clone ID: PAT_MRT3847_16864C.1
tataacacaggatacgctcgctggttcattttgccactctgatataaagctggatcagactctgtagaacagattgttcgtacaaacctgggacaatggcggcacatactaaaacgactattgactagtcaaagcacgggtacagaggaagctgctagtgc

SEQ ID NO: 50780 - DNA, 1864 bp, Glycine max
  Clone ID: PAT_MRT3847_16865C.1
tgtgagttcatcaactggtggtcgccttcagttccccatctatgacaagtacctcactggcctggaaagggctgtaagaaaaatgaagagcaattcagagtcgtctctcctggtggctgtaagatcctctaaaggtgagaagattctcgaggttgatggaacagtgacaacacagccagtccttgagcatgtaggaatatccacatggcctgaaaggctaatcttgacagatcatgcacttcattttgaagcacttcgcgttgtatcatatgacaaaccaaaaagatatgagttatcagaagatcttaaacaagttgttaaacctgagttgactggaccatggggtactcgactttttgacaaggcagtcttctatagctcatcatccttatcagaaccagttgtactagagtttccagaactgaaaggtcatgctcgtcgtgattattggctagctatcatccaagagattctatatgttcacaaattcataagcaagtataaacttaaaggggttgcacgggatgaagcgctttggaaggctgttttaggaattttgcgtttacaagccattcaagatattagttccacgattcctatacagaatgatgcttttctcatgtttaatttatgcgatcagcttccgggtggagacttgatattagaaacccttgcaaatatgccaaacttaagagagtcacatcatgaaaatgatttcaagggtggaagtggaatgtattctatatcagccttggacatggtttctaacttgggatttgtatttggagcaagttcaaacaactcaaatgagagtaggattgctgtgggtgaaatatctgttggagaaatgactgaattggaaagagcggttaaagaatctaagaacaatcataaaaaggtcatatctgcacaagccacagttgatggtgttaaagttgatggtattgacactaatttggctgtcatgaaggagttactttttcctctaaatgaacttgcgaagtctcttcagtccttggcatattgggatgatccacggaagtctttagtgttttgtttgtttttcagttacatcatctacaggggttggcttggctatgcagcagcgctggtgcttgtgttacttgcagttttcatgataattactcgatgttttagccaaggtaggtcagttcctgaagttaaagtacttgcccctccaccaatgaatacaatggaacaacttttggctgttcagaatgctgtcactcaagctgaacagctcatccaagatggtaacgtaattctgctcaagttccgtggcttgttgctgtccattttccctcaggccacggagaagttagcctttggtcttctatcaacagccttgattttggctttcttgcctactaaatgcatagttctgctactcttcttggagatatttacaagatattcacctccaagaaaagctagcactgagagattgacgaggagattaaaggaatggtggttcagcataccagcagctcctgttacacttgaaagagataaagaggaaaagaagagaaaatagatattgatgcacggtgtaatctgttttgtatatgtttttgtttaatgctgctttttgtcttgtacatagagatgttaaaggtgtaaaactcattaggggaagcaaaataaataattagaaaatgaaattacactcacgaaaatctctggtcttgtacatagagattttaaaggtgtaaaactcatccggggaaacgaatctctagtctgttgcaatcgtgtgttgggacaaacaaaaaaaacacatgctagcatctcgcagcgtacgattaaaattagataaaatctataaagaaaaattaactattgt

SEQ ID NO: 50781 - DNA, 431 bp, Glycine max
  Clone ID: PAT_MRT3847_16866C.1
cggctgcgagaagacgacagaagggtgggcatacatcaggaggtgatcgtggtgctctgattgaactatttaaccaacccggttccccatattttattttcttgctcaggtaattttaatgtcggtcaattaaaacattgaattgtgggaaaaaggtttttttgggtggggggtttcctggaaatttggctgaatccctcctattgacatatatatagacctttgtttggcaaaccaggggactctggtccaaatcttaatctatatttaataattggcattacatataaattttagggtctgtttggtttgagaaaatgttttctattttttcattttcaatttcttatgatttagagaatgttgatcttttttctattttcatttcctgggttgggaaccgtcttggcacttggacccaacccatcagc

SEQ ID NO: 50782 - DNA, 269 bp, Glycine max
  Clone ID: PAT_MRT3847_16867C.1
cggctcgaggtgaaacggtgttctgatgtgagttgcgcaattcgggcgcgggctttgtcgaatttagcgcagtgcgtggggtttttgtctcgtggtgagaggactagtgcggttctgaaggagtttacggggtttgggagggttggtgatgggaatgttggaggtggaatgaatgatatgctgaggaggaggtgtatggatgataaggcagctgtgaggaaagctgcattgcttttggttactaacttgacttctctcttggaggtgca

SEQ ID NO: 50783 - DNA, 424 bp, Glycine max
  Clone ID: PAT_MRT3847_16868C.1
ctaagcaaccaaattgagaaacactcccaaagattggtgaccttagtctacccttacatccaaatcacattccatgagttcactggtgagagactcatgagaagtgaggcctattctgccatagagaactacctcagctccaaggcatcaacacaagcgaagaggctcaaagctgacatagggaagaacaaccagtctcttgttctcagcatggatgaccatgaagaagtagctgatgagttcaatggtgtaaagctttggtgggcctatgggaagcacatttccaagtcacaatccacaatttccttccaccaccctatgtcagatgagaaaaggcaaaggaagctttataccaatagtggtgcttattggagccatgtagtgtttgagcaccctgcaacatttcaaacactagctatggatc

SEQ ID NO: 50784 - DNA, 1879 bp, Glycine max
  Clone ID: PAT_MRT3847_16869C.1
catacgtaagcacggtcttaattcggctcgaggagagagtaagggtggtgaaaaacgatgaagccaggtgaaatgtttgctcacataggatccatagttgcttccttgatgtttgtttgggccatgtttaagcaatttttcccttatcaactaagcaaccaaattgagaaacactcccaaagattggtgaccttagtctacccttacatccaaatcacattccatgagttcactggtgagagactcatgagaagtgaggcctattctgccatagagaactacctcagctccaaggcatcaacacaagcgaagaggctcaaagctgacatagggaagaacaaccagtctcttgttctcagcatggatgaccatgaagaagtagctgatgagttcaatggtgtaaagctttggtgggcctatgggaagcacattttcaagtcacaatccacaatttccttccaccaccctatgtcagatgagaaaaggtactataaactcacttttcataaaagcaatagagatttgatcttagggagataccttagtcatgtgctgaaagagggtaaagcaattaaggttaaaaacaggcaaaggaagctttataccaatagtggtgcttattggagccatgtagtgtttgagcaccctgcaacatttcaaacactagctatggatccaaaggagaaggaaatgatcattgatgatctcataacattcagcaaggcaggggagttctatgcaaggattggaagggcatggaagagagggtatctgctttatggtcccccagggaccggtaagtccacgatgattgcggccatggcgaatttcttaggctatgatttgtatgatcttgagttgactgctgtgaaggacaacactgagttgaggaagctcctcattgagacatctagcaagtctataattgtgattgaggatattgattgttcacttgatttaaccggtcaacgaaggaagaaaaaggaagaggtggaggagaaggatcaaaggcaaaaacaacaaggaatgcaagaaagagaggttaagagtagccaggtaactctttctggtcttttgaatttcattgatgggttatggtctgcttgtggaggagaaagactaatagttttcaccacaaactatgtggagaaattggaccctgcattggttaggaaagggagaatggataagcacattgagttgtcatattgtggctatgaggcattcaagttgttggctaggaattatctcaacattgaatcacacaatctgtttggcagaatatgtgaattgctcaaggaaaccaaaatcaccccagctgaggttgcagaacatctgatgccaaagaatgcttttagggatgcagacctttacttgaagagtctgattcaagcacttgaattggcaaaggaagatgcaagaaagagccagcatgatcctcattggactgaaaatgattcagaagacaaagcaacagaaaagtcaacaaactacacatcaacttgatgcaaagtagagtcactaagataaagagtgtgtgaaaggagtgaatcatagtgggagggagtagacaagacaagcacactatatgctcattttgttgtttataacctcagaaaattggtaagctaacaaatatcctaaggtattggttgagtaaacagaagtatatttaatactcactaacatccttatgatatttagtagctgaactttaaaagtttatagaactacacctgtcctttgtggctttagacattgttaatttgttatatggcctaatctaagtagtacctaattgatgacctaactaaaattccaacagagatatgctgatgattgaaaattgagagaatatgttcgacccccaaaaaggaag

SEQ ID NO: 50785 - DNA, 263 bp, Glycine max
  unsure (1)..(263): unsure at all n locations
  Clone ID: PAT_MRT3847_1686C.1
aaaataatctgagtgancntnctnactttgtgggccatggcttnantnangtgcntncgcacaacccacnntcatnttcatcgcggttcagtgcttntcgccatttcgaaccgctgcttcaacgattcctcnttgcgaactggattntntccgtaaacnctctcgaaccgctcnnccacgtngcaatggccaagcnctgttcttaactgcncaagantagtcgttctnctggcgatttgaattgtgctgcctctgaaaattgt

SEQ ID NO: 50786 - DNA, 1424 bp, Glycine max
  Clone ID: PAT_MRT3847_16870C.1
gcgggtgcctcatcccgggggaacctcatcctcgctgtgaacaatgccgctccacttccaaggccaactctgaaacctctctgtctccgtcatagctgaacatattatttgatcatgtattcgttgacagtgaaacccttcttcacacctaatttagtttcttcttcttcaacttccacttcgtcctcttcgatttctctcgtgtcctttccatctcgttcggtctcatcaattagcttttccagaaatttaaagcccaaaggaagatttggtctcagagttgaagcatacgattcctccaataatgacaattccaaccccgccagtgctggcgactccaaaccccctaatggcactttgtcaaagagcaggagagaaattttactggaatatgttaagaatgtgcagccagaatttatggaattgtttgtgaaaagagcaccgcaacaggttgtggatgcaatgcgacaaacagtgacaaatatgattggaacactgccccctcaattttttgctgtaacaattaccactgtagctgaaaaccttgcacagctcatgtacagcatcatgatgactggatacatgttcaagaatgcgcaataccgtttggaattgcaagaaagtttggaacaagttattgctcttccggatgtgcaagataaaaaggatgtgccagactttgcatcgaacacacaaaatgaatgtttcaggtgaagttatgtttctgggcaatggaaaatggattgagaaaatagatgcgaaaaagtacattgaatgactgggggcctagattgacgagctgagaggtcatgttgggagacaaactagcaatggttaaaatgaactgttggaatacctaaaatctcttgagcctcgaaatttgaaggagttgactagtactgccggcgaggacgtagtgtttgcgatgaatgcatttataaagcgcctgctggctgtttcagatcctagccaaatgaagactagcgtgaccgagactagtgcagctgaacttgcgaagctgctttattggttgatggtggttgggtacagcattcgcaatattgaagttcgttatgacatggaaagagtatttggcgctcctccaaagctagctgaattaccgccaggtgaaaatgtttaagctgtctggaattaagcagttcaacaaagtactcgtgtccctagttgaagccaaatgccctaattagattttacaccttttttgttgattggctgaaaggccaatcatgagctcaaagagaagtctgcatttttctgcggtcatgaacgacgattggtatcctaatttatatatttgataaaacttttccttttttggccaccatgaaacttttattcacaattatactgacaaagatatcaaggtcgactacaaaattggcaagcttcgattttttttaaaa

SEQ ID NO: 50787 - DNA, 519 bp, Glycine max
  Clone ID: PAT_MRT3847_16871C.1
aattcggctcgagggcaggtgcaaaatcacgtgtgaacctcatcatccctgtgaagaatgccgctccacttcaaaggccaagtctgaaacctctctgtctccgtcatagctgaacatattatttgatcatgtattcgttgacagtgaaacccttcttcacacctaatttagtttcttcttcttcaacttccacttcgtcctcttcgatttctctcgtgtcctttccatctcgttcggtctcatcaattagcttttccagaaatttaaagcccaaaggaagatttggtctcagagttgaagcatacgattcctccaataatgacaattccaaccccgccagtgctggcgactccaaaccccctaatggcactttggaaacaagtgtctatctctgtctgagcagttatctgactagtgattaaatgttttgaaatcgaaagtcaaagagcaggagagaaattttactggaatatgttaagaatgtgcagccagaatttatggaattgtttgtgaaaagag

SEQ ID NO: 50788 - DNA, 435 bp, Glycine max
  unsure (1)..(435): unsure at all n locations
  Clone ID: PAT_MRT3847_16872C.1
cgccgccgcggcaggcatgaatacatcatagcaacaacactcatcatttccttgaccgagatgaggaggaggcggaggcccatcatgatgacgaggagcagcagcatcatattaataacatcatcataccctcccctgctgatgctgatcgaactactactactacttcttcttctactactactacatcacaagaaggagcagctgctgctgctgatgacgacgactaccaacgcaacaacagttgttgtagtagcagcaacagcaagaacaagcaccaggagctgcttcctcctgctgaagaagcagatgttgctgctgctgctgatgacaagatgatcttgaggcggcgaacacgacaacgacgacgtggaggaaaaagaactactgcttcctgaagaagaggaggaggagtcgtctactggtagtangaag

SEQ ID NO: 50789 - DNA, 381 bp, Glycine max
  unsure (1)..(381): unsure at all n locations
  Clone ID: PAT_MRT3847_16873C.1
tttttgtgaataaaagtttcatcaaatatattaataatattaagagatcaatcgttcatggccgctgaaaaatgcagacttctctttgagctcatgactggcctttcagccaatcaacaaaaaaagtgcaaaatctaattagggcacttggcttcaactaagagacaccagtactttgttgaactactttactccagactgcttaaacattttcacctggcggcaattcagctagctttggaggggtgccaagtactctntccatgtcataacgaacttcaatattgcgtatgctgtacccaaccaccatcaaccaataaagcagcttcgcaagttcagctgcactagtctcggtcacgctagtcttcatttggctaggat

SEQ ID NO: 50790 - DNA, 270 bp, Glycine max
  Clone ID: PAT_MRT3847_16874C.1
agaactaggcccacaagtgtggagtgagaccaagtcaggggaggcaccccaaaagatggcaggtgcgagaccgaacaaggatgacagtaaggactcagatttctggaagatgcttaatgagccagaggaccaggccccaggaggggaggaggtgccggctgaggagcaggacccaagccctgaggcagcagattcagcttctggtgctcccaatgattttcagaacaacgtgcaggtcaaagtcattcgaagccctgcggatttgattcg

SEQ ID NO: 50791 - DNA, 256 bp, Glycine max
  Clone ID: PAT_MRT3847_16875C.1
cttctacgcgtattggagagagaacgccattgatcttggcgactacaatttcactctctcctacgacaccaatatcactcgccaggcttgtctttcggctattagctggatcgtgtgtgatgtgttgaactgtatgttggatttctacatactctggcatctggtcaaggtggaggtcatgcctaacctcatactcgttgtcgacgaagaactaggtattgtggtccgtcttcaggatcaggctcgactagcttac

SEQ ID NO: 50792 - DNA, 693 bp, Glycine max
  Clone ID: PAT_MRT3847_16876C.1
cttatgatctggttggcaagaccttgatatggttgtgacaattagactggtaaaatatagaggctaattgaccatttttggatcatttttgcaaacaaaaataccaatatgggcttgccataaaactatttactggcatggatctcttttgaccattgaccgggtcaaaatgttagtttgacttgtgatcaatgttgttaatggcggatgacgtagcggaaaatggcggatgtcatggcggacaaaaaaaaaatatacatatatataattataaataaccaagtaccaacaccaaataaactcattgaaattgaaaaaatcaatggattgcattcaaataaactaaaaaagtttcatgggtgtcaaaaataaaaaagggtgtcaaatagaaaaacgaaaaaaaagctacagacatcaaaagcaggtgtcaaatagcaaaaaaaacaaaaaaaaacgcaccactgtccgtcgtccacgtcaacgttcctcttcgccgtcgtgctgccgttcaagctgccattcgtggtgctgctggttgctgcttcgcggggtcgtgctgctgtcggtcgtcgctgctgggtgcgggtgcggggtcgtgctgctgttctgtttctgcgttcgtggctgctgcgcttttgcaatatattatctggtagggttgtgtcgggtcagcccaacacctgccatgaaaaa

SEQ ID NO: 50793 - DNA, 738 bp, Glycine max
  Clone ID: PAT_MRT3847_16877C.1
gaattcggattgagcgaatattatcgcgatgttgaattcggaggatctggaactgcgtgttgttgcgttggggtgcgcgctggagatagggtacttcgggcggaaggaagcggtggaggcgatgatgaaggaggggttggtggagaagctggtggagttgcagaggtcggagaaaggtggggatttgattgagattggaagggaaaaggttagtggggttttggagagaaaaccttttgcgagctgcgtggcgaggtttgcggtgcagttggaagttggggaagggttgcggcagagagaaaagagggcttttaaacctgagattttgatcagagttagagacgcctctgtttctgaagccgaagctgccaccattgctgctgaggttttgtggggttccagcccatgaaaactgaacttcttcttccaagtataaaagaacttcaattcgagaccaccggttaaactcaacaattaatcgattatgtatactataggtttaatttgtcctgtgttgtatcatgtatgtacagattgggttttaggaacggggagttcaattcatcaaatgtgtaattattgattctttcttcacccactggtcactggaggtgaataatgcatgtgaagaatcgagtttgtcatgttgatatgtcattgatggcttgtctcttttacttacgcttaaaatcactagtaagtgttatgcatcggttttaatcagattatttttttcta

SEQ ID NO: 50794 - DNA, 388 bp, Glycine max
  Clone ID: PAT_MRT3847_16878C.1
tttttttttttttttttttttttttttttttttggtgggttttttttttaacaagaattttatgaaacatgggaattttttttataaattaggaacaatgtacaaaggtgatgaaaataccctgaacacttcacctccataaaatgtcgaatgaaaaaactagtacattgggctttaggggtgatattatgaaacccttttcaatcttttggtaggcaagcttcagcttccaaacttaaaataccctgggcatttgggttttaaaaaagcagccaaatggtcaaccttttgttcttgggaaaaagcttgtggggaaaattttttaaaggtcaaatgggaaccccgtgttgattggggatatcttccattggagcgcaatttatcattt

SEQ ID NO: 50795 - DNA, 573 bp, Glycine max
  Clone ID: PAT_MRT3847_16879C.1
tgagcatcagtctaggctatgctgcgatgcgaacgtgatcccaagcgtccatggtcacaaccgcggccagacaccataacagctgcgtatcccaatagtagcttaaagattaccatcgatggcgtatccgattggcgaaaccgtactacagttgaaaaggctatacctaaacataggttaacacatggcgtataccatacgcatgaccaagggcgttcgcgaataaccccaagacaccgcttagaattgggttgtaacccgtggccgtatgcgaggcacgtaagtattacttaggaaccaagcgctaaatgggggtgagcaccccgccaggccagttggttcgacgcgtatggatggcgacgggcgaaaccaaccagcgtgtaccattcgtgacatgagcgagcgttaaacgtcatggagcagccgtttgcatccggctaagacacattggccattctgcaaaagagtaagaatttgctgaggatgctgtggaatagtcaaagactcggctggacttaaaggctaggtcaacttagagctaaagaggtgaaggaacataagggagcgagagat

SEQ ID NO: 50796 - DNA, 137 bp, Glycine max
  unsure (1)..(137): unsure at all n locations
  Clone ID: PAT_MRT3847_1687C.1
cgcttttagattctgcgacttccctcacgtcaatggttcgattcccggcacccaccactttcccnttgttcattcattttnaaacatanaaacaccatgcgtcttcctctctcctctttcgtttgatttntcaacga

SEQ ID NO: 50797 - DNA, 254 bp, Glycine max
  Clone ID: PAT_MRT3847_16880C.1
aagttactggaaaggacaagaccaaggatcttagcactctgaagcagaagcttgaaaaaattaacggaaaaatacaaccttgctatcctcattctgatgctcctctttatcctactaaaccagtttgtgatccatgtcatgctccttcttatccttatactaattctgattaccttcatcatcctcagcttcatcatcacttcccttatcctgtaatgtgtctgttagggatattgatatagaagatataaaaa

SEQ ID NO: 50798 - DNA, 214 bp, Glycine max
  Clone ID: PAT_MRT3847_16881C.1
ttcatatctgaatctgccttattcatagctacttttgggggaccccctcatgcttatgtctgtctagaacatgataggaatcttacttaacacattttcacactccactgagtgtatatagtactggacctgatctttcatgctgaccataagcaaaccacaccctcatactcatgcgtcattcacttatatgcttctcaccagatctgctccc

SEQ ID NO: 50799 - DNA, 371 bp, Glycine max
  Clone ID: PAT_MRT3847_16882C.1
ggtgaacaagagagataaaatgaagttagggacaaaaaaatttgttgattatgtcttataaatagtaacaaaagtagtattgttaaaaacaatattagtagaagtgttaaaattcaaatttaaaaagagcaaatagatacataatattatctctataggctgtacaattgaatctaaatcctaagttcaagacattgattctcacatagtcacgtaaaaacaggccttgttccaaataatcaatttccaggagcatggaaaagtcatcagcatcctctccatgcaaaagcagcaagaggtatagctggcttgcaattgtacattggcaggatacttgttcctctaaatgatggcagaattgcagaattaca

SEQ ID NO: 50800 - DNA, 775 bp, Glycine max
  Clone ID: PAT_MRT3847_16883C.1
gtttatggaagatttgagcatatagtcttgtcctgtaatgcaacatcagatcatggaattttttggattgaaagggaagctgagaaagctttccaattaatgaaggctcagagctttgaaactgtgacagaccctccaactgtacaaaagtttcagaggttgaagcccatagagaaagaacatagagatgctttggaaagagctgttagcttaaatgtacctcatgcagtggacactgcagagaacgaaccgtttgagaacaatgaaggtgatgatgcatccggtaatggaagaaataacgtttcaagtaaccaatcaaaatttagtggtggaaggtcaaactgggatgatgtagttgaaaaactactaaaaaataagagagagacgggaatgggagaacaaaacctgaaaagggatacgaatgtcacccaataacgtatctctcttatggttttaaactctagatattcacatccattcatatatttggttcttttgtttgttttaggtattcttgagtttgttaattcatgtaaaaagatagttacaattgcttggacccccaggcgtataccagagtccagaggaattacagttgataagtgttattttgttttagtcctgaattgtttgaacttgaggtttcccttgtataggatcatttcaacatgttatgaaatgagaaagcactgcaaggtgtgctactcatgagtaatgttcctgattgtaaacattttttgttctactagtttgtgcttcacattctccactgttg

SEQ ID NO: 50801 - DNA, 2901 bp, Glycine max
  Clone ID: PAT_MRT3847_16884C.1
gaattcgagctttgtacccggggatcctctagagtcgacctgcaggagtgattctctttccttattgccttcatcatttacaccccaagatgcatcaaaaatgttgtccctatgtcaatctgttcaaaatgctcttaaggtgatacttaaccatgttgtagatttatgctcagtgtttttgattcatgtgttgataaactttattttctttgcagtctaacaaagcacatatttttggggatttttatgtgttgagcagcagctttataaaggtttgttgtggcatttgatatttttttttggtaaatagttgtggcatttgatgtagtcatgtagaagtcaacttaattatttaattttacaaccacattgcctattatatagtgcaaatgctactactatgtccagtttgaatattggtttaatagattaggttagtattgccaatgagaacaaaaattaagatgctagacatgttatgaaatttgcttagaagaggttcagcagtttagtgaatacacagttcagaaaattaatgctcagttcaccatcacaacatggctatcaatgggaaccctaaaaaaagtggtgatataaaatgcttgcagtgtcatctactgtacagaatggagttagatgttaggctaatatgtatgacccttttattttttggtgaacacatgtatgacccttttggagggcgagccctggtgcagcggtaaagttgtgcccttggtgacttgttggtcatgggttcgaatccggaaacagcctctttgccgaagtttttttttcccacaatagcatatcatttctaacttgcattcataaccagcctttgccgtgcaacttcttgtatagacaactacagactaagattagctattaactctcaaattcaaggtcctagaatttccattcatctaatcgtcatagacaaactgtagcaatatgtttctatattcctattcaacatttgcaaccagtaacatcaatgatcgtgtattgtaattagcagcataacagtaaaaaacagcattcccctgtaaacagctactgaacattacacttaaaaggaatttcttgaagctgcatcagaatatgtattaagttggagaaatcttagaagcttggacattccattcggaattttacagtttaatctactcgaatctttgcttattataatgtcatcatttcatcatccttccaaagttcctggggaaatagaacttgctgacaatctcatataaatcttttctatggagagtaatcagaatgtctgctctgtaagtgcagtatctcacggagggttaatgcttgatttcaaagcatgatgaattggagagacgaaccagaatagccgcatgcaactcataagcagcctcttcatttttcattgaatttgaatgtcacgtaattggggatagagccacagagaattccttcccggaaattcattctataaatcacgtactaaacgagctgcaaaggagccatctagtgaatgtttaactgggttggagaaaaagaaaccactgcttgtcacaaatatcaggaggaacatatctgtctacaggatcaatgtggaaatccgaatgtcttgcaagaaatgccactaccctgtcgccattctcttcaggatctatggagcatgtactgtaaactaatactcccccaggttttaccaatttggatgctgcatccaggagctcatcctgtaattccttcagttgttccatatcctccagattcttgttccaacgcaagtccgctctcttggaaagaacaccaagtccagagcatggagcgtccaacaaaactttgttactcttaagctgtccactatcaggtaatgtacgaagatcagcatggatggcagtaatgacaccatccacttggtgcaactttgctgtctctttaagaattctcaacctaccactatttacatcaattgcaaataccttaccttggccacttaaatgagaggccatgtagagggtctttccaccaggagcagcacagcaatcaatgatagtttcaccaggttgaggatccacaacagaaactaccagacctgcaatcaaggatgtgtgacacactgtacaagaatacaaccatgtaatataaaaatttcttttaattaaaaaaaaaaaaaaagctaagactggttgaaatctatacttcaactagcatattgggtaaaatagcatttatgcaagatgcaaggcctttggccatatgtctgctttctaaaggttgcttggcaaatgacctaaataatcctacttagtgactcatattccatcaagcagaagagaatcatagaaagaaacttcagtcctactaatacattaagataaatgcataaaaataatgcattattccttctttttttttaactgaaataatgcattattcctggtgggtcatcttagcaaagcagaggccagtgttcaaagtaaaatacaaaagaagggaaaagaaactttagatattacagccttataggcatcccttctatgagaaaagatgacaagttgacctgcactctcatcctgaactgaacataaaccctttttgagaagaccagcttgaataataatctgcaacccagttttgatacgaacaaattcatccaaatgcggtgaaagtttgtgtgggaccttcaatgcattaagctgtgtcacaaggtcatctcttgaaaaacctcttgcacggtttgctcttaagctgaaactgggttcactgttgttccatatcatcaatttaatggcttcttcctggccaagatactttgtccatctccttaccatccaaactggatgtgagtacagagttgccaaagcacgtgcttgagcacggtcatcaccctccactttgggcaaaggaagaaattcc

SEQ ID NO: 50802 - DNA, 837 bp, Glycine max
  Clone ID: PAT_MRT3847_16885C.1
tttcagttggaaacctcaatgggaagcgtcaatttctcttccatggtcgcttccttgctcgttctctcccagggcgtaaccctaatgctatccaaatcactgcttctgttcttcgactacgagagatcctactacagcgaatactccgtcggattctccggcgtcctcttcgccatgaaagtcgttctcaattcccaatcggagaactacacctccgtctacggagtcatcgtcccgtcccgttacgctgcgtgggccgaattggttctagctcagcttctcgtgccgggtgtgtcgtttctcggccatctcggtggcattctggcggggcttctttatctgaagctgaggagtacttattcgggttctaaccctataaaagttgtcattagagggattgttgatgctgtcaagtggccttttaagttcttgccgcggcggggacggatcaccggaaggggaaccgttggaagtaacagggcgtggagatgccagacgtgtacctatgacaacaacaatggctccctgagagtgtgtgagatgtgtgggaccaataggggtgtgagtggggtgtcttcttttcagaggacttcccgttctgatgggcttcctttggatgagttgcgtcgccggagaatcgacagatttggaggcagctgatcgtggttttcaggtcactgcaggatctggtaaataataccattggatatggccattgagatttagatttcacacatgttagctgttgaattataatgactttgcaatgaatgttttcatgctatgctagattgatttggcattttcttaaataaaatttggatacttttttctatt

SEQ ID NO: 50803 - DNA, 3036 bp, Glycine max
  unsure (1)..(3036): unsure at all n locations
  Clone ID: PAT_MRT3847_16886C.1
atcncggaacccgaagccggctcgagccgatgaagaaacataagagggagttataagatattcacagaagcagcaaaaatgcttatgcaacaagttcatgtatcaaatccaagttcatcttgtctcatccttcaaaagccatgcctccgtgacattactcacccttcttttcagctttggtcaaggccatcatcgttcccaaaccaaaggaagcaaaaaagggtttcttatggatgcaggagtaatggcaacaaaatcaaagctgtggctgtgactgaagctgaaaacaaatcagtgaaagttaaagccacaatcactgttcagccaaccgttggtgggattttctcagaaatggctatagagagagggttggatgatataaaggatttgctaggtcagtcaattctcttggagcttgctagcactgagcttgatcccaagacgaaattagagaaggaaactatcaaagattatgcccacagtaagcatcgatcagcacaagaggttaaatacgagggtgaatttgaagtgccagacaactttggagaagttggggccatttttgtgacgaatgagcatcacagggaaatgttcatcaaagacattgtcttggatggtttcctcttgggtcctgttaaatttacctgcgaatcttgggttcactccaagtatgataaccctgctaagagagtgtttttctccaacaagtcatatttgccatctgaaacaccagaaggagtgaagaggttaagagaagaggagctagaacagttacgtggcaatgggcaaggtgaacgcaagagctttgagagaatatacgattacgatgtgtacaatgatcttggagatcctgatagcagcgacgacctcaagagacccgttcttggtggcaatcaacatccatacccaaggcgttgcagaacaggaaggcctcgttgcgacaaagatccattatcggagaaaagaagtagtacggtttacgtgcctagagacgaaagcttctcggaagtgaagcaactaacgttttcgacaaagacgttatcgtcggggttgaaagcgctcgtgccggcgctgaagacattgatagttgacaagaatctagggtttcctgtgttctcggccatagatgaccttttcgatgaaggcctttacttgcctcctctaaaaggtatcaggagtatcttgcccaggctcgttaggcatattaaggatattcaggaagacattctcctttttgatcctcccgcaacaatgaacaaggacagatttttctggttaagggacgaagaatttggaagacagactctcgcgggtcttaacccttgctgcatccaattggtcacggaatggccattgaaaagcaaacttgatcccgaaatttatggccctgcggaatcagccatcactaccgaaatagttgagcgggaaataagagggttcaatacggtggaagaggccataaaacagaagaaactgttcatcctggactaccacgatttgttgttgccattagtaaaggatgtgagagaacttgaaggcacaacgctatatggatcaagggcattgttcttcctaacccgcgaaggcacattgagacctctggctattgagctgactcggccaccaatggacggaaaaccgcaatggaaggaagtcttcacgccttgctggcactcaactggtgtctggctttggaggctagccaaacttcatatcctcgcccatgactctggttaccatcaacttgttagtcactggctacgaactcactgtgcaacagagccttacatccttgcaacaaacaggcaactgagtgcaatgcacccaatctacagactactgcatccccatttccgttacaccatggaaatcaacgcgcttgctcgcgaggccctgataaacggcgacggaataatcgaaagcagtttctctccggggaagcactccatcctcttaagctcaatcgcctacgaccaacaatggcaattcgacctgcaatccctcccaaaggacctcatcagcagaggcatggccgtggaggaccccaccgcaccccacggcctcaagctaatcatcgaagactacccttacgccaacgacggcctcgtcctctgggacgccctcaaaacctggttcaccgaatacgtgaacctctactacgccgacgatggttctatagtgtcggacactgagctccaagcctggtgggaagagatcagaaccgttggacacggggataaaaaagacgaaccttggtggcctgtcttaaaaacaaagttagatttgattgacattgtgacaacaattgcgtggacgacttccggccaccacgcggctgtgaacttcggacaattctcctttgcggggtatttcccaaacagacccaccattgcaagaaacaacatgccctcggaggacccttcggacgccgaatgggagctgttcttggagaagccggaggtgattatgctgaagtgcttcccgtcgcagattcaggccaccaccgtgatgacggtgctggacattctgtcaaaccactcgccggacgaggagtatctcggggagacagtggagccggcgtgggaggaggagccgcttgtgaaggccgcgtttgagaagtttagagggaagttgattgagcttgaagggattatcgacgccaggaatgcggataggaccaggaggaaccggaacggtgccgggattgtgccctatgaacttctcaagccttcttcggagcctggtgtcacaggaaagggagttccttatagcatctctatttgattctgagttatgcatgactgtgtatcgtcactagcctctctgctagtattaaggtgtattatttgagacacatgtgacttactaataaataaaagataactcatgagaatagtgattataaaaaaaataatacttattaatatgaaataaagttttttcttcttaattgatagggatatatttgatgaaattttgattttttatctttcaaaaaatcaaagtagaataaagagaaatttcacaaaaaccccc

SEQ ID NO: 50804 - DNA, 620 bp, Glycine max
  unsure (1)..(620): unsure at all n locations
  Clone ID: PAT_MRT3847_16887C.1
gggacgcggatccggagggaccaaagtccagtaataaaaagacaaaaacagcttctgacaagcaaaaaccgagcccaaagtgttctcagaagaagatgaaaggcagtatgtctaatagataacgaataagatgatgcctgtctagatactgattagtgatccagaaacgtagaccaaagaggtcaagagaagaatataaatgaaaagtttgaaaactccacattccagagcggacccattttccacctccacgtgatttcagtctggaggttctaaagcagaaaccattcaacacgccttaagatgtggtggtgacttctcacaatagaataatttactaaatacttggccgtaagtattctatcaaacttgtaaattgacatttatggagagattgctaggttagctctcttattgatcatccagcttatagtttttcttgtctttttggatccattattactgaaatcaagggcaaagctaaggtaagaaactgtataggcccaggttgtatatgttggttatgggtccatccctcttcattagggggcttttgtttagattgggttatcttcgataatgctaatcgttaaggttctgttaccaaaanaaaaaaaaaa

SEQ ID NO: 50805 - DNA, 445 bp, Glycine max
  Clone ID: PAT_MRT3847_16888C.1
ctcgagccgaatcggctcgagccaaatcttctccctcaggccaccaccgctaacagtaacacctccgattcaactcagttatgcccaccttctccactccgagtcccacttcactccctccccgccgttgattttatccctccccccgtagatctgatctggaccgtccctggcgtcgctgatgtcgctgctcgccgcttccacctctttatctggtggattgaaatggtggcttgtgttgttatcttgcatggtttggtttgtggttgattatggtgtgtgtggaagagcactgcagctggaagcaccaccttctttgtctcctgctgcagcacctgttgttgctgttgatgatctgccactgccggtaaatgctcatgggttgaagcatttgcctgcaccgtttccgtcacgcgccaatttcacccaagggagaagagaatac

SEQ ID NO: 50806 - DNA, 406 bp, Glycine max
  Clone ID: PAT_MRT3847_1688C.1
ggaccagccaaaaaataaaaccccttggaccttttataaattaccccgccctttgggctggtcccaacctaaaaaggggggggccaaaaggaaagagaaagggcccataataaccttatcccacctttacccaaggccgaaaatttgccccataaaaaaactttccccctaaaaaccctacccggaacaaaaaccccggacatccccaggatctaaacttttttgggccctgggaacctcgtccccaattttcccatggttgggggacaaagggtttttttctttccccccctaaaaaaccccaccgggggttggaaaaaaaccccagccaaagggagcccccccttgctttttctacccccaaaaaaagctgaagggagctgttaagtccaaggccttgcccttt

SEQ ID NO: 50807 - DNA, 661 bp, Glycine max
  unsure (1)..(661): unsure at all n locations
  Clone ID: PAT_MRT3847_16890C.1
aattcggctcgaggggagatcgcacgggaattccgggcttctccctctggtgtgtgtgatgttcttcttttttctttttttttttctttttactttattacctatatatgcttctgccactctccttaccacggatacatcgcaggactcgcgtttgtcttcgatctaacaaggtattatctattactttcacaatcaggcgtaagggttttctttttaccgtgctaataatagctaacaacgcatgtgcaattgataacattaatggaagcaagtaattcgtatatgagaaacgattcaaagaagtttatgtgttcgatgctttcgatttggggaattcgtaattgaagtggtattaattccaatttttgggcatgttctttatttacagagattgtctaatgcttagtggatttctttaatttgtgcattgaaagaatgtaataggatgttttatggtattttctcgacgggaacattgatctcaataataacctcattgtacaaaaaaaaaaaaaaaaaaaaatatttaaattttccaacattattacggattggcatttaatgtcgntgagttgattattttgcttttgtgatatacgaattgtaatatgtttattttgtntcgttattagtttttttggcctttaatttatcaatt

SEQ ID NO: 50808 - DNA, 396 bp, Glycine max
  Clone ID: PAT_MRT3847_16891C.1
cggctcgcgggcgacggaaggagaacactgctcgcagcatatacttataaattacatttttcgttgaataaaaacagacataacatgtgggcaattggcaaactttccagcggctgacatggagacacttaacacctactagagacctgcagccatggagatcataaaagatgcctttgagaactgcagtttcttttagttgttcaaccatggcatatccattgcgcttatggacacagcggagaagctgacaatagaacattacacgatgactatggagcataggttcaaagaaatggtgaccagcaaatgtctttgagtcagttcattcagaaatcaatgacttggactgcgaaagcacctatttcctgcgccatcttccactctccaacgttt

SEQ ID NO: 50809 - DNA, 388 bp, Glycine max
  Clone ID: PAT_MRT3847_16892C.1
gctatgcgtgttaatacaggtgaaaaaacaggcagagcaatgaacagtgctatgaaggggcgtgccagggggcatgccaacactgatagctacactaactgcgaacaagacagtgacagatggacaacagcgagcacaatagcaatgactacaaaaccgaatgcaaacgcatgggccgaggcatggagcaagcaaaccgtgaagcataccgaaatcaattgtgacactagatggactaccgcacggacggacgaccgaaaggaggcaattgaggggacaattgactgtcagaaatgcgctcacaaaagcgatcgcaggacctatccacaaaagaatccacagaaaaatatggggataaaaaaacggacggtaaaacagagcactcccc

SEQ ID NO: 50810 - DNA, 198 bp, Glycine max
  Clone ID: PAT_MRT3847_16893C.1
tcgtacggctgcgagaagacgacagcagggggctcttcttgatctaggtatttcccacgggggggcacattttccgggagttggagagctatcaacttttctcttaggcgccaacattctgtaacggaagagaatgccgcaacctcgctcggtgtctctccgttatccacatcgatcttactctcgactctacctacc

SEQ ID NO: 50811 - DNA, 405 bp, Glycine max
  Clone ID: PAT_MRT3847_16894C.1
ccacgcgtccgctcttttttaggggaaaaataatgggggggtcagggggggtgctcaatagctgactacccattatgcgcgagatgggtgagattcacaggtttgataggactgctcctgattataacttggtctacaacattaaaacagtcattctgtctacaagtacattgaactgtgaccaaaccgttaagagacatggggagtcctgatgtaagacttagggtatttggagagtggtgttatttctcaaaacaggacgagggtggggttgtttgctccactgtctagagtgacattcttaggggtcaagtatatgtggatcatatcttcaaacaaaataacatgcctaggtcaagtggtgtgaggtttagaggaacctaacttacctaccagtgcatgcaa

SEQ ID NO: 50812 - DNA, 253 bp, Glycine max
  unsure (1)..(253): unsure at all n locations
  Clone ID: PAT_MRT3847_16895C.1
gtcgcggtnggtgcagccgtngcgatgcntgcgaatacgcccatggcgtgttcgaatgctggctgcacccttccaggtacagaacggaggcctgtaaggatggcaggaactgcaagaganaggtgtgtnttttcgnagacacccctcgcnaatgagaatttgccggtaacaacatcttcaccctcttcaaatgacatgccatgcaagaagaaccttaacaagctcttaaaccatgcttcaaagtcaaacaaca

SEQ ID NO: 50813 - DNA, 696 bp, Glycine max
  Clone ID: PAT_MRT3847_16896C.1
agataaataagcccttaaacaaaattcagttcatactgcttcgcaagatcgtcgtcccaagcataaggttgctaaacgaccctttgatgatgatgaggacgaagtggatttcaggaacgtgatcagaaatatctttaattacaaccccaataaatttgttgatgacgatgacgatgacaatatggaggcaggctttgatgaaatcttgagggaagaaaagcggagtgaaatgattgctaaaagggaggacgaggagcaacttaggttaattgaggaggaagaggaaagagagaggagaagaaaaatggcaaagttaaagaaacggaagcttggctagcagtagttagtagtaacatgtcattgattttggtataatgaaaattctcttttcccaagggcagtttaatcatgggattaaattatacaattcatcaatgaagatagaaaaacattcgccctcacattgagcttgtttcaatttgaattacttagaaaagatataccgttatgtaaacgcagtttcggatttagtcaagggcaggggttggggttgcattgtgtatgtatgattttgagcgttttgcacactgattggcggtcattatacgcagtggatggattggaaatgagatattgttcaccattttgcttcgtctattattctgagcaatgtattttataatagtattggtagcc

SEQ ID NO: 50814 - DNA, 2689 bp, Glycine max
  Clone ID: PAT_MRT3847_16897C.1
ccgattagaagtataaatttttctttgcgacaggaaaatagaagtatagatgtgactctttcccgttgtttatctttggacaggccagagcgtctcggcgaaaaatcaccgtaaagggatccgggtcgggtgggtaataactaatgtgttttgttttgggtatatagttcgagatccatcgctgaaaggtgtcggaaataataatacgataagattgggtcactcactgtaaagaaatctttgcaatctaattaaatcatcaatagataaataaattaaaaaaataaaaaattctgcaacccgacgaacaccataaaagagctactcttgcacttctaaattcctttctttcatttcggtttccccattcaacgattctcgctgtgtatcgataattcactaaagttctttcaaggaattcctctttgcaatttgcctttctgccgttgttattgaaaccacaatgcggggctatgacgacgaaggagatggttacgaccactattttgagaatgagggactagaaactcagtatgacgacgggggtgaggaagaggaggaagaagaggaagaggtgcccaggaagccttcggaggaggatatggagtaccttgaggtgaggcagaagttgtcagaatccattaggtagtagctcgagggggatcgtacttcgaaagaaatttttcgcgagcagtcgaatgatcgtagctcgagccgtccggtttctccattcaacgatttgcgctgtgaatcgatcattcattaacgatctttcaaggaaatattcgttgcgatcggtgattctgttgttgttattgaaaccacaatgcggggctatggcgatgaaggagatggttacgatgattattatgaggatgaagatgagtatgaagaggaggctgaggaagagtatgaagaagaggaagaggcgcctaggaagccttcaaaagaagaaatggagtaccttgagttgaggcagaagttgaaagaatccattagaaagcagatgaagaaggagagtagtggtagtggtacttcgcgccgggattcaaccgatcgaagcaagaataagcttccttatgataattatggttccttttttggtccatctcaaccagttattgcacagagagtaattcaggagagcaagtcattgctagaaaatcagcatttggcatctaggttttctgacccacatcgcattaagaagaaccagaataaagtacctagtggaggatcaaagtcttcatctcataatctggcacccaaagtcagcgagatgaaagttaaagcccagaaaatcaagaatactagagattactcatttcttttatctgatgatgcggaacttccagctagtcgaaaaggccccccatctctgaatattcctgtacgagatcaagagggacgaccagctcaagttccagcaaggaataaactgcctttgagcaatggtggcaagcatgttcgtgccagtcatgaggaacggaatgtaggttctgcagccggccatttgcctcctaaatcaggatccagttacaggaccagttcaaccagtaaacctagtatggcatcagcagattctaggaaacagcctggtaacaacagtggtaatggaccaggccggcctgttgggccaaaaggcttgccttcaaagatttctgttggtaccactgggaataagtcttcaacacctgctataaaaaacccagtgaatggtatgccgaaatcactcccttcgaagaatcatccatccattccaaaacagattgtagaacaaagaatttcgaagcacagtgttgaacaaagaattccaaagcagagtgttgaacaaagatttccaaagcagagtgttgaacaaagaattcaaaagcagagtgttgaacaaagaattcaaaagcagagtgtggaacaaagaaaagacatacgagaactatatagacctaaaatggcaccaaaacaaccagtggcatcatcaaaaccacagataaataggccacttaaacaaaattcagtgcatactgcttcgcaagatcgtcgtcccaagcctaaggctgctaaacgaccctttgatgatgaggaggacgaagtggatgtcaggaacatgatcagaaatatgtttaattacaaccctaataaatttgttgatgatgatgacgtcgacgatatggaggcaggctttgatgaaatcttgagggaagaaaagaggagtgaaatgattgctaaaaaggaggacgaggagcaacttaggttaatcgaggaggaagaggaaagagagaggagaagaaaaatggcaaagttaaagaaacggaagcttggttattagtagttagtagtaacatgtcaatgattttagtataatgaaaattctctttttccaagggcagtttaatcgtgggattaaattattctattcaccaatgaagattgaaaaatattcgccctcacattgagcttgtttcagtttgaatttacatagaaaagatataccgttatgtaaacgcagtttcgtttatagttaacgtaagggcagtggtggggtttttgcattgtgtatgattttgagcgtttggcacatttattggccgtcattatacgcagtggatggattggaaagtgagatatattgttcaccattttgcttcatctatttttttgagcaatgtattttaaattagtgttgggagcg

SEQ ID NO: 50815 - DNA, 898 bp, Glycine max
  Clone ID: PAT_MRT3847_16898C.1
ggaaacaaggaaaaatacattatgattcattgacaaaattaatgttacattggtcactagaacaacgttacccgttagttgaatacaataataaccatcactaagtctcaacatgagataagttagatgaatcaaatgattcaaatgtttttgggtttttaccaaaaactaagctttaagagtttttcctgagatttttttgtgcagcctaatatcatgctttttttgcattagcagcccaagctcggttgtgtatggcaacgtatcccaatcctcaatgacgcatattttcttgaagtagaggtgaataaaataaaataaaaaatctaccagagtttgcaccagatcaaagaattcaatcaacaacagaagtttgcattgcgtgcaacatccctctcttcaagccctttcagaaatgatctgattgcaagacgttcggaggagtatgtcaagaaacatgctaatattgcgcccccaacaaccatcaaagctaaccgtaaaaacaatgcagtgatcccaaaaagaaaaggcaaagatggagtagcaatggccaagaaggccatccctaatccatagaaccacgtagcagcatcacatgatgacatctgacgctgatgaactttttcagaatcatcatcagaagattcaggatgagacaacgaggaaggcatttgtgatgcaataatccttccccgatgataaatcaaatttagataacctccaaatagtataaagaagattgtgaatgtccattcatacatcaaaagcaaaccagtccatggagccacttgtcgtggtactataaagatagataatccaagagacaccactgcaaccaataaacagacagaaatactgcccaaatatgcaggcaccttgtactgaacaccatttatga

SEQ ID NO: 50816 - DNA, 1652 bp, Glycine max
  Clone ID: PAT_MRT3847_16899C.1
ccttttgcgttcgaaattatatatccgaagggtgctgagatagatgtccgagcaattgtggttggtgatcatacaatgtctgttctagaaatttggggtgcagagtatcaggagcaggatgcaatcttagtgaagcctgaaagccgtgatctcctagaatcaatctgtaacagggaaaaagtttcaatggctgttattggaactatcagtggagatggacgtgttgttttagttgacagtgtagcagctcagaagtctatttcaaatggactccctccacctccccctgctgtggatcttgaactggagaaagtccttggtgacatgcctaagaaaacttttaagtttaatcgggttgtttatgagcgggagccacttgatattgtccctgggctcgaagatagattccctaaagagggtattgagtttaccgtctgtttgttcaaagcgcttcttaacaacaaaagttgataggtgtgttactggtctagtggcacaacaacaaactgttggccctttgcagattcccattgctgatgttgctgttacagctcaaacttttgttgatgtgactggaggtgcttgtgccattggtgagcaacccatcaaaggcctgttagaccccaaagcaatggctcggttggctgttggagaagcactaacaaatcttgtatgggcaaaggtcacttccctttctgatgtcaaggctagtggtaactggatgtatgctgccaagcttgatggggaaggagctgacatgtatgatgcagctatatctctatctgaagcaatgattgaacttggcattgctattgatggagggaaagacagcctttctatggcagcccacgctgaaagtgaagttgtcaaggcaccaggaaatcttgtcatcagtgtttatgttacttgtcctgatataacaaaaacagtgactccagatttaaaactcaaggatgatggtattttgcttcatattgatttgtcaaaaggtaagaggcggttaggtggatctgctcttgcccaggcgtttgaccaagttggagatgagtgtcctgatcttgatgatgttccttaccttaaaaaggcctttgaaggtgttcaagaccttctttctgatgaattgatatctgctggtcatgacatcagtgatggtgggctgctagtttgtgccttagagatggcatttgctggtaactgtggtcttagtttggacttggcgtcgcaaggtaccagccttttccaaacactctatgctgaagagcttgggttagttcttgaggtaaacaagaaaaatctggctttggtaatggataaattgagtaatgtgggagtttctgctgaaatcataggtcaagtaacagccaatccatcaatagaagttaaggttgatggggagacttatctgcccgtgcccacgcgtttccccagggtcgggtggggtgtccccagcttgctgctggtcctgtccctaagatgggcttcctgggtggtcatggccttcgttcggctgaaccgtcgtctgctgccctcgtcggcagtgtcggtggcccgctccttcgtgccttggagatggcatttgctggtaattgtggacttagtttggacttgcatcgcaaggtaacagccttttccaaacactctatgctgaagag

SEQ ID NO: 50817 - DNA, 220 bp, Glycine max
  Clone ID: PAT_MRT3847_1689C.1
gaatatcattgtttgattggtgtttttttttaggaacaaaggcatgttaaagagtcgggggcctcttataaacgaaaaccagtgagtgctcggaatgaacaacctcgcctccgtaaaaaatgtaagcatggggcctaaagctttaggatctaactcctactgactagctgcacttttgccttgaaccatttaccctattaaaaaagaaggctcttgaacc

SEQ ID NO: 50818 - DNA, 142 bp, Glycine max
  Clone ID: PAT_MRT3847_168C.1
acggtgttgaccagagagtatctgtatgctcgccctggttgtttggtggattattctccacaaaggatagcgcagttgggggcaaataagtgcactaacaagacactttgtgaagagaacctcgatgtgttattacctgcaa

SEQ ID NO: 50819 - DNA, 573 bp, Glycine max
  Clone ID: PAT_MRT3847_16900C.1
cgctttctctacattgcaagtatttcttagttccttcttcgtggatttcaaaatggagaaattacattaatttggctgtcaagaattcagataaacctgaaactttagatggggtaatcgattcactgatgtgtgaaaagcattcacggctcattgaaaggcctcctgaactggttttcagacgtggtgctataattgccagagaatcttctgtaagtggcttaaccatcatatctgagaatgattggaaatgcttctgtgaagaatggagtggtattgagaccaaaggaatatctgcaagaattgagaatgttaatgattcagagaatgctttgactggatcctgcagagagatgccaatatgcgaggatcaacttaacacttgggataaagtgaattatgaaagtgggactggacacattgtgattaagacttgtcctgaggtttgtgagagttgcgtcggagaaaaggaagagctgtgagctaatgcagaagcttaactattgcaatcaggacatttgtgtaattcttgtccgtggtaaggaggtccctagatcaatattggaggcttca

SEQ ID NO: 50820 - DNA, 567 bp, Glycine max
  Clone ID: PAT_MRT3847_16901C.1
tttctttcccacgcgttcgctacaaaccctaacgcttgcttcttcaacactctctcatgatcaattttgagctttaatggaggcttctcaatgtcactgattgaatggtaatagctcagaggtgtgtttttggacaacatatttggagaaactttttcttgatcttcctcgatttactgcacttctaaatagttatcttctgaaaaattgtgggctgggttatctatgcctggaaacgaagtaggagacagggtccataatttttttggtcaagaaaacttatcccagggtcagtatcattcacaggaagttgacgggaactggccagggctaagcaacaatttatgggctggtagccagagaccaactgttgcaccttttatttccaatttgaagaactttaatctacaacaatcagattttgagcagggacacacaagcactccacatttgcgacatgggtttgaacctggttcaatcaaatttgaggccttgactctggcagaaatcaacccccaaaccaacagacaactgtaaatggctatatgcaagggcatcaggtttttc

SEQ ID NO: 50821 - DNA, 1148 bp, Glycine max
  Clone ID: PAT_MRT3847_16902C.1
caaaaggagcgacgccatcttttatgtaataaaggaattatggaaacaaggaaaaatacattatgcttcattgacaaaactaatactgcattggtcactagaacaacaatacccgttagttgaatacaataataaccaccactaagtctcaacatgagataagttagatgcatcaaatgattcaaatgtttttgagttttctcaaaaactaaattttaagagtttttcctaagattttgttccgcctaatgtcatatgctttgctgccaatttttgcattagcaagcccaagctcggttgtgtatggcaacttatcccaatcctatatagatcaatgacgcatattttcttgaagtaaaggtgaataaaaaaaataatctaccacagtttgcaccagatcaaagaattaaatcaacaacagaagtttgcattgcgtgaagcatccctctcttcaagccctttcagaaatgatctgattgcaagatgttcagaggagtatgtcaagaaacatgttaatattaagcccccaacgaccatcaaagctaaccgtaaaaacaatgcagtgatcccaaaaagaaaaggcaaagatggagtagcaatggccaagaaggccatccctaatccatagaaccacgtagcagcattacatgatgacatctgacgctgatgaacttttccagaatcatcatcagaatattcatgatgagacaatgaggaaggtgtttgtgatgtcataatccttccacgatgataaatcaaatttagataacctccaaatagtataaagaagattgtgaatgtccattcatacatcaaaagcaaaccagtccatggagccacttgccgtggtactatcaagagagctaatccaagagacaccactgcagccaataaacagacacagacagaaatactgcccatatatgcaggcgccttgtactgagcaccatttatgagcttatgaggggaattgagagttgaggtagaaatggtagtatatgcaagtggcccccctgatttaatcctgtaataaaggtgtctgacatgatcacatagtgaggttctataacaggaaccaaagtatccctgattctttagaaatgaacgatagcagcagaacagcacagcacaaaatggtagcctcgtgc

SEQ ID NO: 50822 - DNA, 357 bp, Glycine max
  Clone ID: PAT_MRT3847_16903C.1
gggactgaggagaaatccaactggtgaccctatgctaaaaatggatccaatgggatatagtttgataataaaggatacaggaggaccgcagaaaaaaattaggaaaccattattcaaaaatgtatttattgaaaatttggtttttgattgggtccaattctcaaatgtttgatcaatctagctgactccccgagataaggctttattattagaaaattccacaaattcattataaataaaataagttaaagaacatctgagaatattctcaagttttctggaaaattccattacccccttgcaaatgactagctaaaattttgaattaagttgagatctatatgtgtgatcatttta

SEQ ID NO: 50823 - DNA, 444 bp, Glycine max
  Clone ID: PAT_MRT3847_16904C.1
gtgccgcctgcttgggggggggggggggggggggggggggggggggggggggggggggggccaaaaccaaccacatgggtagagagggagggagcgcagaggcagagacaaaagcaagaccaaacccggcgatagtacgcattatttaccaaatagcacaaagcaatgacactgaaggaaggaattttgtcgtgtaagtgtagcagccaataaggggccactggtcatcgccgcctatgcggcaggagtctacaagaaaaagtgtggaatgccacgaaccccctcctggacctagagttggcattaggttccaaataactgcccgtgtgcccacccgcgatgtagtttgaacccattgcggcccagataacatatggatcgataaggctgcgtttaccgaatcaggtgtgcttagggttcattggaacggttataggttactcg

SEQ ID NO: 50824 - DNA, 490 bp, Glycine max
  Clone ID: PAT_MRT3847_16905C.1
ctggtgcagaatttattgaagctattagctaatgtttgcgagctgtgttaagagtgatattaagcaataatgtgttgggagctatcagattgtatagttaaatctagcggtgatccttaattactgattagattatatataaaatgctcatgtaataactttacaaagttcggagtttacattcaaagatcgtctgaggagaaagaaaggctaatactggactctgctgaatttctcattgggaaggaaagttgaggcttgacagttctaaaatttttcattctgagcagaactcatattttgtggaactgtagcttctagatctgtccgacattgccttatctgcgaactctgagttagctggcaaaaggagaacattgcttagtatttgacacactatctcgaacgttaacggagaacatctgtgtcagtgcctacactatatgtatgtggataccacacaggttctgcccttgctggacctgatcag

SEQ ID NO: 50825 - DNA, 236 bp, Glycine max
  Clone ID: PAT_MRT3847_16906C.1
atcccaattgtaataccatattataaaaaaaaacacacgctattttttaaactctcaatcttataacacataatatcttcctaaaaaaaaatttttatttacctcacacttatataaaccaaagcttcattgatctcatattctccctataaagacattgtattaacacactccattaaatactaccaaatcatttcatttcataattatattttcttactttttaacattactta

SEQ ID NO: 50826 - DNA, 528 bp, Glycine max
  Clone ID: PAT_MRT3847_16907C.1
ccacgcgtccgggggagtccaatgctgtagatcgaggcagtgcttcaggattaagtacacagcctgttaatagtcttcccaaactcctgttgcttctgcagcttcaggattggttggcgaccgaagaatatctttgggtgcaggagcaggttgtgctggccttgctgcacaattggaacaaggatatcgtcaggcaagagaggttgtccgctctaataatggtataaaggttcttctgcatctcctccaaccgcgcatatactcacctcctgctgctctggactgtcttcgtgctctagcatgtcgagtcctgcttggattagccagagatgatactatcgcacacatattgacaaagcttcaggttgggaaaaagctatcggaactgattcgggattcaggcagccaaacacttggaacagagcagggtaggtggcaagctgaactttcccaggctgcaattgagctaattgggattgttactaattgagggcggggaagtacattagctggtactgatgcgcgtgc

SEQ ID NO: 50827 - DNA, 681 bp, Glycine max
  Clone ID: PAT_MRT3847_16908C.1
cacaattcagatctataaaaacaaatgagtgcaacaacaaactaaccaagttcttgcttagtcacattcacatcaagttagcagattatacaagaaagtccttttttttctcttttttaaatttcaattatatgcttcattatttacaaacatgcccccaataagaagctacctgtcgcagtgatcttcacgaatatgaagaggggcccttcacatgatgatcaaagcatgttgaagttgatgctaaattggtcaagacatagatgtaaatagatattgatcaccacagggcttcacaattagtgatgagtttttttgtgttgaaacctgcactcgggtgaagtacctgaaaaaggctacaatcgtttcctggcattgtagatttgtagctggcaggctaagaggattaaagacattcttttcatgctacttgtaagctattccatatgcatggggatttataaatgtagcactagacaagaatgccgtgttgagctcaacacttgaaaatccggccctggatatatcgtttccggtttccctagaaaggtggcacccatctgcaagtgtctgttgcagaggatcaagaactctctgcataaatttgagaaaagttccatctttcgcagccacatgttctacaaacacatatagtccaccaggtcgcagcaccctcctcac

SEQ ID NO: 50828 - DNA, 236 bp, Glycine max
  Clone ID: PAT_MRT3847_16909C.1
gctacgcgttcgctcgtcgtatgacttcatacctgagcatcgacatgtcaaacgtgctcgctgatcatgggaaacatgtctgcataagatgtagacatcgccgtagtgctcacatgacggacgactcatgcttgtaggcccactacgtactgcgccgacaaggtgatgtgaatgttgaacgcgtgtctgatcaaacacgacagagagtacatcatgctatgagtgaaggatatgag

SEQ ID NO: 50829 - DNA, 354 bp, Glycine max
  Clone ID: PAT_MRT3847_1690C.1
tagattcaattacatatttctgtagggtagtaagcttctgggcggtggttcttctaacaacatgtgacttgttttcaccaaatgcaatcctgcatgtaattttgagaaatgaaaaggagagacaagttaagataagaacttcccctgatgaagttagtgattctgaggtattttccccctttaaatgtataaataaatgtgctatacatgacatattctgtaactgataatgaaatttctgtcatatccaattgtttgatttatgtatgttattgcacttccagctagattgatgtttttcctaaattgtttttagtaattcttaataaacatattcaactctattaatcattg

SEQ ID NO: 50830 - DNA, 407 bp, Glycine max
  Clone ID: PAT_MRT3847_16910C.1
tactggagacatttctacaccaaaactctattgtgaagacatggttaatcaatttgatggaggctaaaattggccaaacctacttattactacagactttctttttgaaacaatttatggtaaaagaccttggacacttaaaatactttcttgggatggaaacagcaagcagcaataacagcattttaatttctcaaaggaatatacccttgatctgttaaaagaaacagggaaatagggtggaatggaacacctctagaaaaaatggaaacattagttaagtagattctcctgtagagagggaattgttagtaggaaaatcgatctacctataacttactactacaggcattgcttacaaaatacgtgtagtaactgaatttatgcatacttttaccacgagacac

SEQ ID NO: 50831 - DNA, 452 bp, Glycine max
  Clone ID: PAT_MRT3847_16911C.1
ccgccatcaggatgacggtctatcgcgccgccaacggcacgatttggacacggccatcgacgatgttccacgagatggttgaagtcgacggccggcaagtgccgcgcttcgcgctgatggactgaatgctggcggaaaccgtctccttgcgagcgggccttcgagcccgttttacgtattggcgcaaccgcagcggtgcttgggcggcgcgcaacggccatcaacccggcgcggcccgtttctggcgcttgaaccaggcatgctcgcccggcgcccggtcgcgaaattcgaaggtgatgcgtacgcgccgcgagacctgcacgtagacgccgcacgtcagcgtcagtgccaccgcaacggcaacgccgtcgatgagagttgaacgcgcccctggaacgccgccggccatgagcatcagtccgatcagcggcggcagcagcgccatgtgcaca

SEQ ID NO: 50832 - DNA, 228 bp, Glycine max
  Clone ID: PAT_MRT3847_16912C.1
aaatgctctcaatctatttctagtttgtgagacatcagatgtcctcacgaatgctggtgcccatagccaagacgcaaccacaaagcagataacggggtcgtatgcaaacctcaaatgaagtgtacgaaacatacctcagaccttagcagcaccgtctgagtctgcggctcctgtctaaaggaacgcctcataaccttctccggcgcgcatgcccatttccaaacccat

SEQ ID NO: 50833 - DNA, 587 bp, Glycine max
  Clone ID: PAT_MRT3847_16913C.1
attttggaagaatatgtatgtatggtttaattcttataaaactgatttcttaaaaaaaaaaaaaaaaaaaaaaaaaaaaaaaaaaaaaaaaaaataaaaaaaaaataaaaaaaaaaaataaaaaaaaaaaaaaaaataatataaaaaaacattaaaataacaaaaaacatagtaaataaaaaatataaaaaaaaaaaataaatggggcggtcctttttaaataaactatattttacctaccattaaatttaaataaaattatacattttttatttaattaaaaaattaaataaattgccgccttttataaaaatatccaaactttaaaaaaactctatttttataataattaatattatttttagaaaactaaaaacttttttaaaaatattgaaatattattttaaaaatatacctatttcaattataaccctttacataacataatatcaaaaatatcttaattattatataataattatcccacccctttatataatgtcctattttatttatctcaaatactttcttatcataatatatttaacttcccctattaacttatatatactttgttatatattata

SEQ ID NO: 50834 - DNA, 1591 bp, Glycine max
  Clone ID: PAT_MRT3847_16914C.1
ctcgagccgattcggctcgagattttatttgcctttaaaattcaaatctttcagcaattataattctgaattattgactcaaattaatgtaggtgagcattgttatggaacaaatgttgcgccactgattctgtgcgtgaggttttaaatacggttcctacggcatgttcatcttattggttagcagagtgactaacgattcaaatccattcaatcgcactgcctctgcttcttatctgtggcttacctgcagaggttgttcactttaaaatttctcatgggaagaaaatgaactatctgttgctagaggtaaatccacgaatgaccctctttactggtagttcaagagtggcagataaatgggctgttgatttgaaaggtcgcgttaaattagaagatgctggatttgactggaaaatactgggccctgatgtccatcaggaagattacatagcgtgggtctgtgatcaggatgcatatgcatgcagtggtcagaaatgctcagcacaatcattgttatttatgcatgagaactggtctaaaacttccttgctatctaagttgaaagatcttgctgagagaagaaagctagaagacttgacaatcggcccagtcctcacatgtacgactggtatgatgctagaacacaagaataaattgcttgagataccaggatcaaagctgctctttgggggtagtcctctagagaaccattcaattccacctatttatggtgccattaaaccaacagctgtctatgttcctctcgaggaaattatgaaggataagaattttgatcttgtaacaaaagaaatatttggaccctttcaggttatcacggactacaaaaacagtcaactatcagttgtattggatgctgtggaaagaatgcataaccatttaacggctgctgtagtttcaaatgatcctttgtttttacaggaagttgttggcaattcagtaaatggtactacttatgctggtctaagagcaaggacaaccggagctcctcagaatcattggtttggtcccgctggcgacgctagaggtgcaggaattggaacaccggaggctataaaacttgtatggtcttgccacagagaagttatatatgattttggacctgtgccaaaggattggaaaactcctcagtccacttgaaaaaaagtcctatcaatgatagcaggaacaatgagattaggaatgtagatgggaaggaagtatgtttagcatgtagctcatttcaacgcccctctgacatttttagatttttaataaatttatggaaattgagttttgatttaccttttttataactaaatatatttgcatgtacctattgattatactgcgaacggtaggaaattcaatcatgttactacatacgctggtcgacccgcccgggctaccgcggccccccagaaccgtctgctaccactgctgccgttaaatggttatgcattctttccacagcatccaatacaactgatagttgactgtttttgtagtccgtgataacctgaaagggtccaaatatttcttttgttacaagatcaaaattcttatccttcataatttcctcgagaggaac

SEQ ID NO: 50835 - DNA, 698 bp, Glycine max
  Clone ID: PAT_MRT3847_16915C.1
tgttctcgtgggcggacgcgtgggcggacgcgtgggcggtctcgtggggaaaaactgtatcaactttgtttggaaaatgggatgaaagcatgcattatgttaatggagactacactgggaaagggaaaggtcatgaatctttgtcagatgcccgtttgctctggaagcgaagcagggctcccaagtttcccactagatataacttcacccgctttgccatcacattaaatgaacttacccctggattgaaggagaagttgccacctacagattcgaggttaagacccgaccaaaggcatttggaaaatggggaatatgacatggcaaatgcagaaaagttacggttagagcagcggcagcgccaggctcggaaaatgcaagagagtggttgggaaccacggtggtttggtagggataaagcaagtgggtcataccgctacttaggagggtattgggaggcccgaaaacaaggaaattggaactcttgtcctgacatttttggccatattccttctgatcatgtttcagacgaaggtcaataatattcgttctagtttttcaatcttttccctctattttttttttttactaatgggtgtcttacggctgctacatcgcagtgaatgttcccccatgaaattcaccctagtaaatcatttgaaaatatgagcaggaaaaaatgtaattcttttttttct

SEQ ID NO: 50836 - DNA, 492 bp, Glycine max
  Clone ID: PAT_MRT3847_16916C.1
ttttacgcccagaaggcactgttgtggtgagggatacccctgaagtaattgagaaagtagctcgggttgcacatgcagtgaggtggaagcccaccatatataacaaagaacctgaatcacatggcagggagaaaatcccacgcgtccgcaagaccttctggaaaagctaattctcatcccactaacatagctgtgtaatttaggtaaaatttccttctcgctgatttggggatgaggttttcaaggctatctttctctgtgcatcaaagcgatgcgatttcctttcctgttcagtgtttatataaagagaaagtaaggttaggatctgagatgtgaagactgtgcagttttatatggaaagcacaagccagtgttagttatattttctctttgccattaaggattcacttgtaattcagtgcttatatttatcattgcttatttattgaaaacagccatcactgatctaattggttttttaacttttgttct

SEQ ID NO: 50837 - DNA, 423 bp, Glycine max
  Clone ID: PAT_MRT3847_16917C.1
ggaaagcaaaacaaatgggggggggtattttttttttggggttatgacccgttaccaactcccaaaaaaaaagccccccagggggggggctcttttatctaaacggtttcactggagggggagtgcttcttagaccaataccttttaagggggttgaccccttgttaatcgccttaaattgtgagggggaggacataaatcctcctttccaattccctttgggaagcctccttgataggaaaaacctaccttttttttttccctccaagggttccgaattaacaacggtgtgtctttaccctgaccttcagacgcaaacggttttaaacttttggataaaccctcagccctagatactggtctacaaggaccccaaacttttgtaacctcccctccccctgaattgaaatggggcaatttaaa

SEQ ID NO: 50838 - DNA, 143 bp, Glycine max
  Clone ID: PAT_MRT3847_16918C.1
ggctcaagctcttatacacccagaaaggggcattttgcggggttttgtcagtgatggagatagacaggaaccacatggagacacatagcgccgggttcgcgttcgatgggattgagaccaactactctttcctctttattttc

SEQ ID NO: 50839 - DNA, 2547 bp, Glycine max
  Clone ID: PAT_MRT3847_16919C.1
gttgactgttaatgataattttttattatccactatagacaagtgcttcattcctttttcacccacctctgcaggtagaacaaaccaaactcactcttcacttctatggctaagttttagatcttccgcctaccatttctcgaaacactcaatttgcggcgtaaatccgtcgctcctctgctctatcacccatcaaacccccacaccggaggagacaagcccaatatcactgctcaccgttagggctagggttttagtttaccacttatccaatcgcgcggcatgagcagcgagctgcgtgcaacttcgtcgtcatcggcggaagcaaccttcggtctcgacgagcagatatcgcagctcatgcaatgcaagccactctctgaacaccaggttggagttttatctgagaaggttaaggagattttgatggattaaagtaatgtcccgcctgtgaaaagccccgtctcaatttgtggtgatatccatgggcagtttcatgatcttgctgaactatattgaattggaggaacgtgtctagatactaaatacttctatatgggtgattatgtggaccgtggttactattctagttgaatctgtatgactggttgtttcactgaaagtgcggtattctaaacggcttacgatccttagatgaaaccatgaaagccgtcagatcactcaagtatatggattttacgatgaatgccttagaaaatattgtagtgcaagtgttcgaatgatcctaagtgtccttttataatatctgtaagatgacggttttggtctactccggaatatatgtattgcgtggacagttctcaacttgctttgtgaggtaccaatttatgaggaattttggtcatgttcaactggttgcacaggatctcctcttttgcgagatgctgataaatcatggattcaaatggagtggcttaggcagatgtactactcttttttgcatgttaagtacgaaataagctacccttccagattattcatatatgtaagcttaatttgtccgctaaatttcttctcctggtgctggtatacaatttgattctgttaaaatgaacatagcatttgccctatttcgaggcattgttagtcttggcctgggtgtttagtattgaatataaatgggaagataatttgcccatcctattttcacattttcaattttgattgtttttcctgagcaagagtataatgtgaaatcgttaaaatgaacggctttttggatttacatcgttgttgatggttactgctctcctgaggcttctttagatgaattggtttttggatcgtgaaattaaagcctgcgatgctgcactgaagctcagttacccggtcctttctgctgaaatagttatgcttgattgtcactgcagctacagtacaaaatatatactaccttggaaatgagtacggtgaatcataaattcgttgtcaataccacttctcacatcatggggttgaaaatgggtacgttgttgttgcaacttttttttttattcatgacgggcctaacgggcccgttgtttttgttgtgtaactaatgcgcgttttaagtggtttgtcatacaagctgtgatataggacagtattagaacttggaggatatgattgtaataatgtaatgttcaaggtgaaactcatccctcttaattttttagagactacaatatttaaagagaacttttttcaacatataaaaataattatgatatgattcacacaacaaacaatgaaacaattataaaggatatagcttatgtcagagatagatgtagccttcaggatttgatggtggaagtcgatcgaattttacgcccagaaggcactgttgtggtgagggatacccctgaagtaattgagaaagtagctcgggttgtgcgtgcagtgaggtggaagcccaccatatataataaagaacctgaatcacatggcagggagaaaatcctagttgcaaccaagaccttctggaagagctaattctcatcccactaacatagctgtttaatataggtaaaatttccttctcgctgtttcggggatgaggttttcaaggctacctttctctgtgcatcaaagcgatgtggtttcctttcctgttcagtgtttatataaagagaaagtaaagttaggatctgagaaaactaagatgtgaagagtgtgcagttttatatggaaagcacgagccagtgttagttatatattttctctttgccattaaggacttgtaattcagtgcttttatttatcattgcgtatttattaaaacagccatcactgatctaattggctttttaacttatgttctaatatgtacggtgtaatttaattctctcctcactaccatgtctatgaagacttcttccctgatcttcgctccaactactagcattgtttttaaaatttcgagtaaagggtgtgttttcatttacaaattttagtcaatgctattaatgtcttgtttaaatgggggaatgtaatgtttggattggtggtagagaatggaacaaagtggactggaacatagtagta

SEQ ID NO: 50840 - DNA, 1433 bp, Glycine max
  Clone ID: PAT_MRT3847_1691C.1
attttgtttcttaatatggtgaggctgggggaatcaattggggataggtggatgaataaggaaagcttggtctgattagtctatactatatgccttgctattccactttttctgagtttttctctgcactcctttgctagctaccctctcttttgggcttttttgggccttcaaatcttgcttggagaaggctcaattttggtggaaacctctcacacaagaaagcatagtttcttttgggttcattctacttggtgtttagagatggtgagaggaaagactcagctgaggcgcatagagaacgccacaagcaggcaagtcaccttttcaaagcggcgtaatgggttgctgaagaaggcctttgaactttctgttctttgtgatgctgaggttgctctcatcattttctctccaagaggaaagctttatgaatttgcaagctcaagcatgcaggacacaattgaacgataccgcaggcataacaggagtgctcaaacagtgaacagatctgatgaacaaaatatgcagcatttgaagcaagaaacagcaaacttgatgaagaagattgagcttcttgaagcttcaaaacggaagctcttgggagaaggtttggggtcatgctctttagaagaactgcaacagatagaacaacagttggaaaggagtgtaagcagtgttcgtgcaagaaagaatcaggtttacaaggaacaaattgatcaactaaaagagaaggaaagagccctatatgctgaaaatgctaggctgtgtgagcagtatggtggtatccagccacagccagcaacaaaggatccgaaagaaattcaaccctatgcagaaagcagtccaagttcagaagtggagactgaattgttcattggactactcaggtctagctattgaacataatttaatccttgcctatgcaaatatcaaataagaagcccaactgcaatgtataaatatcacatgtttcctaatactgagatgaataatattatcgcttgtattatataaagaactttctagccttatgattagggtttaattattgatatgtttgcctttcctcatttctgaagcccttttcatatataatagcatgcacaaaagggatctaattcaattagttgaacatggtatgtgagtgatataaatcttttgataccgtcttcgatttccatcattttatgattaagcagcaaaggatcggaaagggattcgaccctatgcagaaagcagtccaagttctgaagtggaggctgaattgttcattgggctacccaggtctatctagttagagatattttaatccttgcctagtatcaaataacaagcccccctgcaatgtataaatatcacatgtttcttaatactgtgggatgaataagtattatcgcgctatactatataaagaactttccaattctatgatt

SEQ ID NO: 50841 - DNA, 1703 bp, Glycine max
  unsure (1)..(1703): unsure at all n locations
  Clone ID: PAT_MRT3847_16920C.1
ctgtgatctggaaaaagccagcagcggagatgtgtctccccaaccaaaatgaatttggtctagacttatgtgatgattcagatgacccaagttttgcatggtacttcaaattgaagaaatgcgtcactaggatgtcttctgtcaaaggtgaatatgctattggcacaattcccaagtggccagaaaggctaactgcttctccactgagatccacagtcctgaaaaatggtgctgatgtatatgaggcagacactaagcgatgggtaaggagggttgcacactataagaactctctaaaaataaagttggggacttcagcagtacgcaatgtcatggatatgaatgcattttttgggggatttgccgcagcactaaattctgatcctgtgtgggtaatgaatgttgttccatctcacaagccaataactcttgatgcaatctttgacagaggtcttattggagtttatcatgattggtgtgaacctttctcaacatatcctcgcacctatgacctgatacatgtggcaagcatggaatcacttgtaaaggatccagcctctggcagaaacagatgtacccttcttgatttgatggtggaactcgatcgaattttacgcccagaaggcactgttgtggtgagggatacccctgaagtaattgagaaagtagctcgggttgcacatgcagtgaggtggaagcccaccatatataacaaagaacctgaatcacatggcagggagaaaatcctagttgcaaccaagaccttctggaaaagctaattctcatcccactaacatagctgtgtaatttaggtaaaatttccttctcgctgatttggggatgaggttttcaaggctatctttctctgtgcatcanagcgatgcgatatcatttcctgttcagtccatttttaacgagtacgtgaggctatgatctgagccgtgaggtcagcgttgaatcccttataaaagatccagcatctggtcaaaacagatgtactcttgttgatttaatggttgaaattgatcgaattctgcgtcctgagggaactatggtggtaagggatgctcctgaagtaattgacagagtagctcacattgctggtgcagtgaggtggaagcctacggtttacgataaagaacctgaatcacacggcagagaaaagattctagttgcaaccaagactctctggaagctctaattcccattccacggacgccactgtgtaatttaggtgaattcccttttcctttctgtgagggtggtgtcaaagatatcttctctatggcatcaaagggatgccatgccattttctaatctgattcaatattctcatataaaggttaagatttgaaaaagatgggaagacccttgtgcagttttaggtggaaagcggaagccagtgttgattatactttctctcaacttcaaagatggttgtaattcaaaaaaaaattatattaaaaaagaataatcattgattctagttcagctacatttcaccctttttcttttcttttacatttgtattttattgtgaatttttatcatggattgaatctaaagtgttagagatgtaatattaaatcgattgcgaaatttcctatctgcttaagttttttagactgttaattaagagcatggtatcacgggctctgagataaagtgtttgagatgtaatataaattcattcatgtattttc

SEQ ID NO: 50842 - DNA, 151 bp, Glycine max
  Clone ID: PAT_MRT3847_16921C.1
caaaaggttcaagcctaagttagccttgaagggaacttcaaacccctccaaaatggccaccaaaatccaatcaatgggcgtccgtttaaaaactcctgaactggaaaaacctggcgttaaccaacttaaacccccttcagcaaatccccct

SEQ ID NO: 50843 - DNA, 196 bp, Glycine max
  unsure (1)..(196): unsure at all n locations
  Clone ID: PAT_MRT3847_16922C.1
ccaaaaccttcgattattttatttaaactggcaataatggaatccagcaggacgcatgaagtagggcgaagtcatgtctctcactacctannnnnnccntntntnactttnnnnnnccnnggggtgcttcatgcaaatgaaagagttaatcctgatgcatatgaangtttctgaaccataccccatancccntcct

SEQ ID NO: 50844 - DNA, 160 bp, Glycine max
  Clone ID: PAT_MRT3847_16923C.1
aaagaaccccttgcaaatgcaagaaacttttctacacgtcataacagaaaattttaatcttatcagttttcttaaatgttaaactcgcttatcctaacatactcatgttcactaatccggccccaacaaggtattttgctcattgcagtaacataacgcg

SEQ ID NO: 50845 - DNA, 549 bp, Glycine max
  unsure (1)..(549): unsure at all n locations
  Clone ID: PAT_MRT3847_16924C.1
tcgaggacggcgtgcnngagaagaccgaccagaagggggggagtgacccanatnnagatatagtacctggtgtgcgtnntgtgtggcacccnncttccctcgtgacagagagtttttcttcttttcttctcgtcacgttnnttttttttcttcttttctttctttcnntttcccttctcaccaacaccccacttcactttaaccaccannaactcaacttcaagccttcggtgtttattttccgtccctcaaaccgtatcntttccatttttttgaccatgttcctactnttcccntggtccctccacacaccctctttagcgcgttcaaanaatatatcaacccgtagaagaaagaagaaagaagccatttttgtgacctgagaaaaagggtgtttatgatcgtaaaaacttaatcacttactgaaaacannagagatatcgaagaatgggctctttgcccaaagctataggaggatcggtgtgcgtcccaattcccgtcgtccgttttcagcacaaacccctatttgccctttcttgcgtcgatgtg

SEQ ID NO: 50846 - DNA, 2568 bp, Glycine max
  Clone ID: PAT_MRT3847_16925C.1
gaaacgcgcatgctgaaattaaaacctgaaaaaagcccggcaaacacttatctctcacattctttgactctattttgtagtattttgctcatattccatagtttgtgccattaattcccacatttctctattttctagtatttggcacatagtgcattgtttgggccattattaatcaaccaaggaaaaacaccaccttttggcttcttctgctgttccaactgtgcattttgtgtgctgtttctttcacaaacaagcagcaacagcagccagaatgagaatggggaacctcttctggcttggcattgttgcagcacttgttttcagcttctgggttgattccttttcagcctatgaatatccaccacttcaatgaaaccgagttctcttcgttggagtctcaagaacaggtacattcatccctccttgggaggactcctctcatggttggactcacccttattcaaagtgctgctggcaaaggagcagtttgcttggatggaacattgcctggttatcatttgcatcggggatatggatcaggagcaaacagctgggtcgttaatttagagggaggtgggtggtgtaatgacgttagatcatgtgtttatcgcaagaaaacacggcgtgggtcatcaacattcatggaaaaacagataccttttactggaatattaagcaataatgttgaagataatccagattttttcaactggaacagagtgaaaattcgttattgtgacggtgcctcttttgctggggatggtgaagataaggctgcgcaactgcaatttagaggacagcgtatttggtcggcagcaatcgaagatttgatgtcaaagggaatgcgatttgccaggcaggctcttctttctggatgctcggctggtggtttggctactattatacactgtgatgaattcagaggttttttcccacagactacgaaagtgaagtgtcttagtgatgcaggattatttcttgatgcgattgatgtctccaggggacataccatcaggaatttattcagtggtgtcgtaaggctacagggagtgcaaaagaatctgccacacatttgtactagtcaccttgatcccacttcgtgcttcttccctcagaatttgattgctggtattagaaccccgctattcattcttaatactgcctatgactcatggcaggtccaaacaagcttagctccttcatcagcagatccccatggcttttggcatgattgcagattaaatcatgctaaatgtacttcttcacaaatccaatatttgcaaggattcaggaatcaaatgctgaatgctattaaaggcttctcaagatcacgtcagaatggattgttcataaattcatgttttgctcactgccaatctgagaggcaggatacatggtttgctgacaactctcctgtcattgggaacaaggcaattgctctttctgttggagactggtatttcgaccgagcagttgttaaggccattgattgtccttacccttgtgataatacatgccaccatcttgtcttcagatgagccaaatctcgtcaatctccaccatttccctcatctcattcatttggatctattattacttgcgattaggaaatatgctattcaattgggaggaatgctagtaatacatttttttgacacatttttcttaacacattttattattaggtgaaattcatgcaaaagacttactaaattatgcaggtctcattccatctttggtgggactagtatgaaattcaccaaatgacagtgtgtcaagaagaaaacgttaaaaagtgtgagcattttctcgtttagtttatgatcagacaataaatggttgtttgaagtgcaaaattaataagccttttccattatttagtaaattggtgggagtgattttcatgtatagattacttagttgggaaagctgaggcaaatgcctttggttttttgcaaagattgggagaggtaaaagactattagaatatacacactgtaatggagtaagcattggcagtatttggatgagataatctcaatctccttccttttcattttggaatgaaaaatagattatttaattatcaatgtttattatatacactgatgacttgaataatgtttcaaaaattgcccttcttctgatcagtgaagaatcctattcaaccaagttatgggacacaataaaagaaaagaggaagctgatgcaaatttaatctgtcaactattaccatgttggcgtaagtacttttcatgttaggaatgccatggtgcagcagtgatcaaatgtcatcacttagttcccttctagcttggaacaaaaagaacgtgttccaacaaagtttggtacacttagtcagtagatagttgtgttcttaactgtcataggagttgattcattattgtgtatgtgaaaaacacttgactagaaaaggtaaaactcattgagtaatttacgtcttgtaagttgtttcggatactcatacccaacgaaactgaaaaaaaaaaaagggatgtgtttaaagtgttataacattattagctaatttaccagtgatctaac

SEQ ID NO: 50847 - DNA, 965 bp, Glycine max
  Clone ID: PAT_MRT3847_16926C.1
ggctcgagcttaatacagcctatgactcatggcaggtccaaacaagcttagctccttcatcagcagatccccatggcttttggcatgattgtagattaaatcatgctaaatgtacttcttcacaaatccaatatttgcaaggtggtttgacatatgagaaatagctttcacaagaagtataaatatgtcttcagtaaattactgtaacaagtcatttccctgtatctaatgcaggattcaggaatcaaatgctgaatgctattaaaggcttctcaagatcacctcaaaatggattgtttataaattcatgtttttctcactgccaaactgagaggcaggatacatggtttgctgacaattctcctgttatcaggaacaaggcaattgctctggctgttggagactggtatttcgatcgagcaggtgttaaggccattgattgtccttacccttgtgataatacatgccatcatctgattttcagatgagccaaattccatccatcatctcattcatttttgcacttcttctcatcagtggaggattatgctattcaatcaagttatggaaaacaataaaagaaaaaaggcagctgaaaaatgcaaatttaatctgtcaaacattaccatgttggtgaaagtacttttcaagttaggaatgccatggtgcagcagtgatccaatgtcatcacttagttcccttttagcttggaataaatagaacgtgttccaacaaagtttggtacacttagtagatcgttgtgttcttaattgtcataggagttgattcattattgtgtatgtgaaaaacgcttaattagaaaaggtcaaactcatttagtaatttacgtcttgtaagttgtttcggatactcataccccacgaaactgaaaaaaaaaaaaaaaaaaaaaaaaaagggatgtgtttaaagtgttataacattattagctaatttaccagtgatct

SEQ ID NO: 50848 - DNA, 1647 bp, Glycine max
  Clone ID: PAT_MRT3847_16927C.1
agcgcatggtcctttctgaaaattcctccgcaatgttcctcaatttctccgccaatactcccaagttggttcctctcgcgctagggttttagtctacagctcattctcacacacaaccctaacaacacaaatttcccactttctagggtttcctttcgtcatccaccatggccgagtggcagtccctcctccaatcgattctcgtcggcctcattttctcttaccttctagccaagctcatctccatcgtcgtttccttcaaagacgacaatctcaccgtcacgcgcgcctccgccgccgaaaccaccgccacgcgcgcggaacaattcgaggatgctctgaagcgcgacgacgccgtttcctccgatgcgcgccccttcgaggaggagtcggtcgtggccgagcacggcagcgtgaggatcgacagcgatggcgactacgacgacgactgggagggcgtggagagcaccgaattggacgaggcgttcagcgccgcgacggctttcgtggccgccgccgccgccgatcggctatcgcagaaggtgtcgagcgacgtgcagctacagctttacggtctttacaagattgccaccgaaggtccctgcagcacgccccagccttcgcccctcaaaatgaccgcacgtgccaaatggcaagcgtggcagaaattgggtgctatgcctcctgaagatgcaatgcagaagtacattgatattgtgaccgagatctatcctacttggcttgatggttcatctttgaggaataaaagcggcgacagtggtggacatggttcagaggctaagggaccaatgggccccgtattcagcacttttgtttatgaagaggaatatggcagtgactcacaaatggaagccattcatggatttgccagggaaggagatatggctaatctgctcaagtgtattgaaaatggtgtttcaatgaatttaaagggacaatgatggacaaactcccttgcattacgctgttacatgtgagagggaagccatagctgagtatttagtgaagcataatgcagacatatattcaaaagataatgatgggagttcaccacgtgacatctgtgagtcaaactggccatgcatgcagcatgtgggggaagaagtaaattgattgattgattgtttgcttgttgcagcttctggccaatacaaccttttagccaaatcccaagaggatgttcgtgtctatataacttgattttttttgtccttactcatgatggtgtatacacccttttcagtctagtgtacgcctatgcaccgcttaggtaatggttagttaattaggttgtattctgttctattattgtttcctctgctcagctctttaaatctggctctcatttcttatatatttcatggataaagatatacacggaaactagaaatagtaacagggaaagggaatcttaaacgatattctttcctcggaaaaccttctacccttctattgaaggcgatatagattttacagggttattttaggtcttcaaatggtgttaagattatccgcagtgaaatctttgattgataatgatgtcgtgattatgttgaatctgatgttttaattaataatgtaatttaaatttgtgtcaaatattataaatcatatttttttcatatt

SEQ ID NO: 50849 - DNA, 498 bp, Glycine max
  Clone ID: PAT_MRT3847_16928C.1
acccacgcgtccgacggctgcgagaagacgacagaagaccacaagatggcgaggcaattgaaagagatgggagtagtgaagagtggtgaagaagagcttggaattggaactcttgtttttgtgttatgtgtgaccctctctcttattgcaactatcatcttcttctgtgcagatgaagtgcccaagaactccaagaaagcctcccaagacaacaactacggtggttctgcctgcgccaccgggtgtggggcagcatgtggtggaggctgcggtggttgagggttcaggcacgtacggtacacctctgaattgtgacgtgaaggaactaactaacgagacgagagtatctattaatctatttggcacatgtttctgtttttttcgttctagtcaaaatggtataggatgctaagaaatgaaatgattgattgtacgttgtacgacccaaactaaatgcgtgaaatctaatcaaatcaccctgccttttttattccttcc

SEQ ID NO: 50850 - DNA, 448 bp, Glycine max
  Clone ID: PAT_MRT3847_16929C.1
tacggctgcgagaagacgacagaagggtctggaggtaacaaagaggagtagctgtgcagagaagcctagggttctacatttttagagagactagtgagtgttagagtgattgtgaggtgctaagaagaggatgagggatgccctttcttgtgtaagcaacaattattttgtactctctatctcatttgtgttagggtttccttgtatggctggctaaaaaccctagttggggatttctaatgaacagttgatgtatttacttttcatatctaattaattgtgttttgtgtgttcaatgcttctttcaatgcttaattattgcatgctcttggtctgatcacccatttgtctctattgttaggtgactttagcattgggaaatgtactattgccttagaacttgacagaagcaggacaaaataactcaaggatggattggggggttttg

SEQ ID NO: 50851 - DNA, 947 bp, Glycine max
  Clone ID: PAT_MRT3847_1692C.1
gttttctgttttggaccatggacttggtttttaccaaatcaagaaaaggatgagcttttttgggccttcaaatcttgcttggagaaggctcaattttggtggaaacctctcacacaagaaagcatagtttcttttgggttcattctacttggtgtttagagatggtgagaggaaagactcagctgaggcgcatagagaacgccacaagcaggcaagtcaccttttcaaagcggcgtaatgggttgctgaagaaggcctttgaactttctgttctttgtgatgctgaggttgctctcatcattttctctccaagaggaaagctttatgaatttgcaagctcaagcatgcaggacacaattgaacgataccgcaggcataacaggagtgctcaaacagtgaacagatctgatgaacaaaatatgcagcatttgaagcaagaaacagcaaacttgatgaagaagattgagcttcttgaagcttcaaaacggaagctcttgggagaaggtttggggtcatgctctttagaagaactgcaacagatagaacaacagttggaaaggagtgtaagcagtgttcgtgcaagaaagaatcaggtttacaaggaacaaattgatcaactaaaagagaaggaaagagccctatatgctgaaaatgctaggctgtgtgagcagtatggtggtatccagccacagccagcaacaaaggatccgaaagaaattcaaccctatgcagaaagcagtccaagttcagaagtggagactgaattgttcattggactactcaggtctagctattgaacataatttaatccttgcctatgcaaatatcaaataagaagcccaactgcaatgtataaatatcacatgtttcctaatactgagatgaataatattatcgcttgtattatataaagaactttctagccttatgattagggtttaattatt

SEQ ID NO: 50852 - DNA, 155 bp, Glycine max
  Clone ID: PAT_MRT3847_16930C.1
cccgaaggtttatcgcgacgcaaggcgtgatccaaggagacaggcataccttgtgcggagtcgagtgacaagtcgctggagcagcgcccgacagaagttaccgaacgcgtgagctggggagtctagcacgaaaagagagggatgctcaccagcat

SEQ ID NO: 50853 - DNA, 1187 bp, Glycine max
  Clone ID: PAT_MRT3847_16931C.1
agcccgtggccctcgctgcaagttcctccgcactgttcctcttcttctttttctgttttggttttttcttttcgcatagataatagttacttttttttttctttcttttctgcagcttaatggcatgagactgtgaggaatatcttatgtgctattattgaatattgtatgcaaattggcaaataagctcacttcgtttcctgtctcatctccttttcgtaggcatgcgtggcagaaattgcgtgctatgcctcctgaagatgcaatgcagaagtacattgatattgtgaccgagatctatcctacttggcttgatggttcatctttgaggaataaaagcggcgacagtggtggacatggttcagaggctaagggaccaatgggccccgtattcagcacttttgtttatgaagaggaatatggcagtgactcacaaatggaagccattcatggatttgccagggaaggagatatggctaatctgctcaagtgtattgaaaatggtgtttcaatgaatttaaaggacagtgagggccggacaccattacactgggctgtggatcgtggccaccttaatgtcacagagttgcttgttggcaagaatgctgatgtgaatgccaaggacaatgatggacaaactcccttgcattacgctgttacatgtgagagggaagccatagctgagtatttagtgaagcataatgcagacatatattcaaaagataatgatgggagttcaccacgtgacatctgtgagtcaaactggccatgcatgcagcatgtgggggaagaagtaaattgattgattgattgtttgcttgttgcagcttctggccaatacaaccttttagccaaatcccaagaggatgttcgtgtctatataacttgattttttttgtccttactcatgatggtgtatacacccttttcagtctagtgtacgcctatgcaccgcttaggtaatggttagttaattaggttgtattctgttctattattgtttcctctgctcagctctttaaatctggctctcatttcttatatatttcatggataaagatatacacggaaactagaaatagtaacagggaaagggaatcttaaacgatattctttcctcggaaaaccttctacccttctattgaaggcgatatagattttacagggttattttaggtcttcaaaaa

SEQ ID NO: 50854 - DNA, 348 bp, Glycine max
  Clone ID: PAT_MRT3847_16932C.1
cttccttttttttttttttttggtttttttttcctttttttatttgtttttttttttttttttttttttttttttttttttttaaaggggagaaaaaaaaatttgggagggccccactattagttatttctccttttggggccccaccttgaaagttaaaaaactgggcgccccggatggatatggggcctcccttttaaagttaggggaatttgaactttgtttggggaaaaccttttttttgggattaactttttccctcaacggggggcatttaccacttgttttcctccaaacatcccctttttttttttaggaaaacctggggggtccctggggggggccctt

SEQ ID NO: 50855 - DNA, 994 bp, Glycine max
  Clone ID: PAT_MRT3847_16933C.1
ccctcctactcgtccgagaagtacattgatattgtgactgagacatatcctacttggcttgatggttcgtctttggtgagccaaaaagctgtttcttcttgtgccctcgatggatgaataactactttcatcaaaaggaggaaaaattatttatagaatgaaagtaaggaataaaagtggggacagtggtggccatggttcagaggctaagggacctatgggcccagtattcagtacttttgtttatgaagaggaatatggcagtgactcacaaatggaagccattcatggatttgccagggaaggagatatggctaatctgctcaagtgtattgaaaatggtgtttccatgaatttaaaggacagtgagggccggacaccattacactgggctgtggatcgtggccaccttaatgtcacagagttgcttgttggcaagaatgctgatgtgaatgccaaggataatgatggacaaactcccttgcattatgctgttacatgtgagagagaagccatagccgagtatttattgaagcataatgcagacatatattcaaaagataatgatgggagttcaccacgtgacatctgtgagtcaaactggccctgtatgcagcatgtggggggagaagtaaattgattgattgattgtttgcttgttgctgcttctggccaatacaaccttttacccaaatccctataggatgttcgtgtctatataacttgattttttttgtccttactcatggtgtatacacccttttcagtctagtgtacgctgtacgcctatgcaccgcttaggaggttagttaattaggttgtattctgttctattattgtttcctctgcttaactctttaattctggctctcatttcttatatatttcatggataaactagaaatagtgacagggaaagggtatcttcaacgatatcctttcctcggaaaaccttctacccttctattgaaggtgatatagattttacagggtt

SEQ ID NO: 50856 - DNA, 495 bp, Glycine max
  Clone ID: PAT_MRT3847_16935C.1
gattgaacctttctcccttcttcccacccagcgcatggtccttcctgaaaattcctcaatttctccgccaatcccaatctggttcctctcgcgctagggttttagtcttagctcactctcatcacaaccctaacaacacaaatttcccactttctagggtttcgtttcatccaccatggccgagtggcagtccctcctccaatcgattttcgtcggcctcattttctcctaccttctcgccaagctcatttccatcgtcgtttccttcaaagacgacaatctcaccgtcacgcgcgccgccgccgccgaaaccaccacaaccacgcgcgacgacgccgtttcctccgatgcgcgccctttcgaggaggagtcgatggtggccgagcacggcagcgtgaggaacgatagtgacggcgactacgacgacgaccactgggaaggcgtggagagcaccgaattggacgaggcgttcagcgccgcgacggcgttcgtgga

SEQ ID NO: 50857 - DNA, 322 bp, Glycine max
  Clone ID: PAT_MRT3847_16936C.1
ctcagatgaggttctctcccaaggtgttgatgaagagtgtagcagcaactattcagaaagggaggcatgcaccatcaggaaaagcaaatcagagagatcaagcagatggtactcagacagaatgcgaagaggaagaggtaagaatgaccttgatgaagctcaggttacagatgtgtataactatagaatctttgctgccacttggaatgtagcagggaagccacctccatgttatccgagtcttgaagactgtcttcacacatctccacctgctgatatctatgctcttgggtttcaatgaaattgtacctcttactgcggc

SEQ ID NO: 50858 - DNA, 214 bp, Glycine max
  Clone ID: PAT_MRT3847_16937C.1
agcgcatctcagttcttcacttttatacgctaatctcatgtacagattatacatttaagatgcagaactttgctatcgtaatagtataataagtactacccaattccaaatatcccatgggaacccatattagatttggtatactatatactatacgatacaatctatatggctccatagataagggtgcatgttttcagtatgtgcagagcgt

SEQ ID NO: 50859 - DNA, 353 bp, Glycine max
  Clone ID: PAT_MRT3847_16938C.1
acggcgagaagacgacagaaggggagcaattccatgataatggtcttttggcaaattcctctgtgaagttgtaagctgacaaatctccatacttgatgaattgaagttgaaatgcagagtcactgagaattatatagcaaatgccaagtgaaatggagtccaataatgctgaatatgtgacactgggaggagaaggttcaactccaaagttagagaagatgagcaaggtttcaattatgcctctgatgttcttgatcttttatgaggtctcgggaggaccttttggtgtggaagacactgtgagagcagctggtccatttgtggctctccttggtttcttgcttttcccattc

SEQ ID NO: 50860 - DNA, 336 bp, Glycine max
  Clone ID: PAT_MRT3847_16939C.1
cccacgcgtgcgtacgaatcacactttctatagtgcgagtcatggaccaatggaacgcaacggcgcactatctgtagcattcatatgccttgtatgcgactgcgtgggacgacagtctgctgccgcatgggcgagaagcacttaggctactcactccgacggcactgctgcccaagcaccttccacagtaccgaaatcaccagcttgggtagctgatggaagataatctgcaccaggtgcgaccgatgcatctactatagcgggatgttcgatcaccacccccgtcatggctggttctgtgtctaatctaactgcagcatgttgtggtcttgcgac

SEQ ID NO: 50861 - DNA, 1411 bp, Glycine max
  Clone ID: PAT_MRT3847_1693C.1
ctgttttggaccatggacttggtttttaccaaatcaagaaaaggatgaggtttcaatttttctattaccataaaacaattttgtttcttaatatggtgaggctgggggaatcaattggggataggtggatgaataaggaaagcttggtctgattagtctatactatatgccttgctattcccctttttctgagtttctctctgcacttcttgctagctaccctctcttttggggtatttcttttcattctccaaaaactcttcaattttccttcccttttctgtgctattctctcctcactggtcaaaaggtttgtgggattttgctaatttggtgcaaatctgattcctttgacaaatccctcttgatctcctggcttattgaaaactactacaattccgagttgctttttttccctagttgcttttctgggccttgaaatcttgcttggagaaggctcaattttggtggaaacctctaccacaagaaagcatagtttttttgggttaatcatacttgaggtgtttagagatggtgagaggaaagactcagatgaggcgcatagagaacgccacaagcaggcaagtcaccttctcaaagcggcgtaatgggttgctgaagaaggcctttgaactttctgttctttgtgatgctgaggttgctctcatcattttctctccaagaggaaagctttatgaatttgcaagctccagcatgcaggacacaattgaacgctaccgcaggcataacaggagtgctcaaacagtgaacagatctgatgaacaaaatatgcagcatttgaagcaagaaacagcaaacttgatgaagaagattgagcttcttgaggcttcaaaacggttcaagatcttgcttttcaatccatcttcgcaacttgtttatattcactgttagatttatctcacaaagaataaaaataaaaaatatattctgtgtactattcatccctcaggaagctcttgggagaaggtttggggtcatgctccttagaagaactgcaacagatagaacaacaattggaaaggagtgtaagcaatgttcgtgcaagaaagaatcaagtttacaaggaacaaattgatcaactaaaagagaaggaaagagctctatatgctgaaaatgctaggctgtgtgagcagtatggtatccagccacagccagcaacaaaggatccgaaagaaattcaaccctatgcagaaagcagtccaagttcagaagtggagactgaattgttcattggactacccaggtctatctagttgaagataatttaatccttgcctagtatgaaataagaagcccaactgcaatgtataaatatcacatgtttcctaatactttgagatgaataatattatcgcttatattatataaagaactttccaattttatgatt

SEQ ID NO: 50862 - DNA, 422 bp, Glycine max
  Clone ID: PAT_MRT3847_16940C.1
aagattaaaaaaaattactaccttttataaagggttttccaacagcattttgccattttgacatggtgaaaaaacattgggaaaccctatttttacaaggggagccaatggaataaaggggagggatctgctatatatccaaggtctggaaaatcaatggacaagcggtccaggaattttagaagccctatccttaggttggggacctgccctttgggccttcacttgggcatgccttacagagccttttgatcaagcctgtaattctccttgaggcggcgaatcaggcttctgaaccaatcacccgtttgggcaaacttgttaacagatggaaggggaggcgggctcatcgaatttcggacagaatcgccttttgagagggggggccttgttttcccaataaatgaaacccaggctttact

SEQ ID NO: 50863 - DNA, 978 bp, Glycine max
  Clone ID: PAT_MRT3847_16941C.1
acgaggaaacaacataattttgcattaaataaaattgttaaaaaaatatataatcattgattattatgaaactaaggtttcgataattgacaaacttttattcaagtatctcttactatatgttttttgaataaaaaagtaacatttactataaactagattttaaatccatgcattgcaaaaatttctttaatttttttttatattttacttaatactttttaaaatatatatttatcaataaaattattatttttaaaaatatttatattaaatttgaggaagaagattatctatattcttaattaagttcatttataaatacttaaatgtgtttgcgctaaacatcaaattctggtactattcaaataatttaactttaacttcaatatattaattatttgtgttcaatcgcttgattaaagagtcttcaatctacacctatcatagtatttatagtttgaataaaattaaattaaaaaataaagtatactcatatatatatataataacttttattttaatttttatccttaattattaattttaaaagtatataataaatataatattaaaaattaatatgaaaatggtataaattaacattttatcatcaaaattatatataaatagaattaatgttagcaatttaatttttttattaaatgtaattagctaggagcattaaattaaattacatccgactactattacaaagttaaataatcaatctaatgattagaaaacttcagttgaactttattatagatatatagagagagagataactctatatatttttatttctcatgaaatatatattagagtaactaatgtagaaaatgagcataagtagtgataaaacatttaacattactacttaaaattaaaattatctaaataaacatttaattattacaattgtatattatatagtgttttattgaaaattatcaaatttattttttttaattatta

SEQ ID NO: 50864 - DNA, 526 bp, Glycine max
  unsure (1)..(526): unsure at all n locations
  Clone ID: PAT_MRT3847_16942C.1
ganattggggnacaggaagagaaacgggttttttttttttttttttttttttttttttttttaaccccaaacactgggaaccggattttattcaagcaaatttcaatttttgaacaagtttttgccgcatttttagggaaaaaacctgaccttaaaaaaaggggggtcccttacaataaggaaagggggaatttcaatttagaaaccctaaaaacaaaggaacctgggggggggactggtcctggaactaaaacgggtcttttaaaggaaggaaatcatcgatgcccgcaggttcccctgtttttttaaagcccaacgggataaccttggagcaatagttgaaactaggaatgaagaggggtttcgtaccattgtttaaaaaggggaattgggggtcgaaatgcaaagctcaaaggaacagcagaggccacttttaaatggtgggcattggcattgactgggtgggataaagttatagggaaaatctctccctccagtttttcatttacagggacccctgaaaaag

SEQ ID NO: 50865 - DNA, 481 bp, Glycine max
  Clone ID: PAT_MRT3847_16943C.1
cccattcgtacgtacaaattgcgctttgcggcaaaggaaagcaagagtgagagtgtgcgtgtgtgagtgaggactaaagactgaggagtctctcattcattgatggcggaagaagcagttctgggataccttgagaaaaactcggagattcgagactcgggcgagttcgcagctgaactcggcattgaccacaacgagatcgtgaacgtgattaagagcttgcacggtttcggatacgttgacgcgcaagacatcaagagggaaacatgggtactcactgatgagggcaaaacctattccagcgtaggatcccctgaagtgcaactcttcttcgccatacccccagaggagggtatctccaaacaagaccttcagaaaaaggttgaaccttctgtctttaagatagcttgtgctcaggctgcgaagacaaatgggtggagaagggaaacaatttattactagaaaggaatggatttgtcag

SEQ ID NO: 50866 - DNA, 338 bp, Glycine max
  Clone ID: PAT_MRT3847_16944C.1
agtcttgatgtgacctcatgtgctgtgactgacaggaaacgttgccaaagaacgtggctgcacaactgctctcttgcaaattggatactgttactgtcctatattatcctgagtgggctccaattaattgtcgagttcatcgacaaccaattcacatcactgaacgatattatgtcatgaaagcaatgatgtcatcattgaatatgatgcatgtactattccaaatgattgcagttcataggttgttgccaaggttggagatcacaatcaaatggttggattgcatgcagcttgaagcttaggtagactgagatatacttcattgataccatatattg

SEQ ID NO: 50867 - DNA, 216 bp, Glycine max
  Clone ID: PAT_MRT3847_16945C.1
ttcactcattcattattaggtaaacaacacaaatttagaaaggaaagaggaaagaaacagctaccacaaaaaaagaacaaagtaactgcactttattgaagggtggtaaatttggcgtggcttggattttgctggccttgatcgccgaagcttggtgtctgtaaaattcatttagggcgaattccccaacaatatatgaggaggttcatgagcacg

SEQ ID NO: 50868 - DNA, 402 bp, Glycine max
  Clone ID: PAT_MRT3847_16946C.1
gagaaccagggaccaaaaaaaaatttttcgatctattactaaaagggttttgacatttttgaaatgacaaataaccttctaaaaggtttaaaaaattacaaacaattttatggggtgttaaggagccttacacttggccagtggcacttataaatgaaatgtttctaatccccaaaaaccaccctgttaatccatttgaactttaaataaaaaggttttttggggaccatgtctttttagggacacaataaaatgagcgattttttgaaaaccaaaatttttttcctttcaaacttaagggtaggatggtggtgaatcatcccaacaagggatttggggaaggtggcaatgccaacccttttgcctttttggtggaaggaccagggggggggaagccctttt

SEQ ID NO: 50869 - DNA, 145 bp, Glycine max
  Clone ID: PAT_MRT3847_16947C.1
tgcgtcagctgtgtatggaccctactgggggccggatctgaatcgacctatctggaaacaggattacacttatacgccactcttcaatgatgaactcatggatagtcgcattctggaagaaaggtggatatggccagattgagac

SEQ ID NO: 50870 - DNA, 343 bp, Glycine max
  Clone ID: PAT_MRT3847_16948C.1
ctcatgttgcgccacttgcttattctttgtgcaaggggcgaggcggggcttcgatgggaaattgctgctcaaattcaactaacacccttacccgaacaactaatggtcacctcagtacacaatcaacttcatcatcttacgcgatcatcaccattagctatacttctactactacgacatctactacttcttctgtactcacgagcatctccataaatagcacgatctcagagtcaagcggtggtaaatcttatccaaatgaacagatcttacctacctctaatttgatgatctccacttttgccgagtcgtaagctgccactagtaatttaagagctgatac

SEQ ID NO: 50871 - DNA, 334 bp, Glycine max
  Clone ID: PAT_MRT3847_16949C.1
cccacgcgtccgaccacgcgttcgatgattttgaaacgtggtcttagtggttcctcaggggacaagttccgcacatggatgggtattacagtggctgatactgacaactgcgctgtcaccactgaagctaataacctctacttcattaaggtgaatgggatcaaaggccgcttgaaccaccttccgtctatctgcgatggcgacatggtgatggtcaccgcgaataaagcaaaacccgatctgaggaagaaagtcttagcaagtgtcatccttcgccaaagcaagccattgcgccgaaaggacagcgtctacatgtactgtcaagataatgctg

SEQ ID NO: 50872 - DNA, 291 bp, Glycine max
  Clone ID: PAT_MRT3847_1694C.1
tttttttagcaaggctaaatctgtctttgatttcgggaggggtactcatatacaagcctccatagtttcatgaaaaaaacaattttctacttccttttaaacactctttcggagctaaaaaatttgtatttatattctttgaaacacgtataaataaaaatccaaatcccgactctcatattaagcgaaaatatacgttttattaaattgtagacaattgtttcaaaaacctattggggatttacacttgataaaactcttataccagggccaccctcttttttatacttt

SEQ ID NO: 50873 - DNA, 160 bp, Glycine max
  Clone ID: PAT_MRT3847_16950C.1
ctcaaatccctcgagtacgctgcagaaacacagatggtactgctcctttttttcaaaatgcccaacacataaggcgtagtatattcttaaactaggggaggtacacacaccattcaactactacaatatatattatatccaaaataaataatatcaacac

SEQ ID NO: 50874 - DNA, 493 bp, Glycine max
  Clone ID: PAT_MRT3847_16951C.1
ctttttcttgtgttgtttagataaatttctcaataaatagtacttgttacataattaaataaaaagaaaaataaaataaactagtctcacaagttaaaacaagaataaactaatttgtctaaaccctctcagagtgtcatttagattatctaaaagctgatttaaacttatgcttatggataagcttagtttatgcttatgagaaaaatttaattcattttaccttctcagcaatttcatttgacttccgtgcatggtttctcaaatattcatattcaaacttagatatgataattaacgaactaggctttgttacattactaattttgtctttcatggcattctccctaagaatcttgagcttctccaaggctaaagcttttgacgatttcactacttctagctcctacacgacaccttgaaatcttttctcagtcacctttatctccaacaaggcctttttaatctcttctttggtttctcggacgcgtgg

SEQ ID NO: 50875 - DNA, 132 bp, Glycine max
  Clone ID: PAT_MRT3847_16952C.1
gttgagagggatccatcttgccaacctatgacgatattggactttgagcttgcatcacgactactctcacacgaggaatctcgagagctgactttccgttgcacgtgagattcctaccctcggctattcgct

SEQ ID NO: 50876 - DNA, 1584 bp, Glycine max
  Clone ID: PAT_MRT3847_16953C.1
atgcggaagagaaagggtgcatctgcagtggtagaagacgaagaagaaaacgaaaacgaggattgtgaaggaaatggtttctttgcttgctacctcttgacatccctcagcccccgctacaaaggccacacttatatcgggttcctctctcatctcatctctcttattttcacttctcaaagatccaattttgatgacacccttttactcaatccaaaaatcacgcacaccccttttgattttttctttatacaaatcatgggtctttaccaatttaaatgttgggtatttaactattttgtttttaaggtttctgctttgacttgtttgttttgtgatggatcttacacttgtttgaaatgttgggtatttaacaattttgtttttaaggtttctgattcaacttgtttcttattcacagtgaatccgaggcgccggatcaggcaacacaatggggagattgggtgtggagcttggagaacgaggaagaggaggccttgggagatggttttgtgtatctatggcttcccaacaaatgtctctgctcttcagtttgaatgggcatggcagcaccctgttgaatcattggcggtaaggaaggcagctgtggagtttaaatccctctcaggaattgccaacaagattaaacttgcatacacaatgctcacccttccatcctggcagagcatgaatatcactgtgaacttcttctccactaagtacatgaaacactgtgctggttgcccgagcttgcccgcacacatgaagaccaagtttggctcactggatgaacttccatgttataatgaaggcattgatggtttgtcagagaatgaagatgataatattgatgaagtagaattcaataataatactagtactagtggttctgttccagatgtgggtgatgattttgtcactcctgattcaccagaaaatccaaatcacagggacaagattagcgaagcatttgagtggaacaaagaatctgaagtaagacaaccactaggtaattcattttcttcacaagagcagagccaaccgtttagttctacaacgccactgacaatgaaatcatcttcaacaacttcattacatagagtagatattattgaagatgattttatgagtgtgatcaataagagtggtgctgatttgattcaaccagaacctgagcaatcaggtgctacatcagcagccaataaaaatcatgacatcagccacacatttgttgtgcccaatgaagctgagattatcgatttgtcaaccccctctcctagttgcagaagtgttttggataggaagaagagaagagtttcttcttctgttggtactgattttattgacttaaccaactcccccaacttcgtccaattgtaaggctttgtttggcctttcacaccaatgtgatgataaaacattggctattaaataatctgctctgtcatactccattatctttctctgatatggatcacgcaaagcaattattgaccacaggccaccaatgaatgtgtaagaatggagaaatctgaacaaataaatattatcttgtttgtttgctcaatgattgattcctgccat

SEQ ID NO: 50877 - DNA, 1318 bp, Glycine max
  Clone ID: PAT_MRT3847_16954C.1
cattgcgtccgcaaaactgtagtcggtgcacaagctttcttgaacaccagcgcctacaacttttactaatcaattcaagaagctatatatacatacaaagatcgatcttttagcgaggtaaaatcggaaccaaaccacaaacacttaatttctcatctcatcatttctaattctacctcttttctcttgcactaacaatccaagatgaataccaacaacgacaccgaaaaaaaccaatcatttccagaagcacaaggagcatcatcatcatcatcttctccacccaatgttgggactgagaattggggaactcacataatgggcacccctgctgttccaagcagccacccagataacaaaaaagcagctttacaaagtggacaacctcaaccagttcaatactaccatgaccaacatcaacatccctacgtgcaacatagcccagttgacaaaccaagcaacagtcccatggagtcaatccttaacatgttcgattcatggagcaaaaaagctgaagccaccgcacacaacgtctggcacaaccttaaaactggtccatcagtgtcttcagctgcactggggaagatgaatctgactgtgaaagcaatatcagagggtggatttgagtccctttacaagcaaacattcacaacctatccaaacgagaagctcaagaagagctttgcttgttacctttcaacatcaacaggtcctgttgcaggaaccctttacctgtccaatattcatgtagcgttttgcagcgatcgccctttgtgtttcactgcaccctctggccaagaaacttggacatactacaaggtaatggtgcctttgggaaaggttggagtggtcaacccagtgaccatgagggaaaacccatcagaaaagtacattcaggttgtaacggtggaagggcatgatttttggttcatgggttttgttaattttgacaaagcagttaagaacatctcagaaggtatctcacattttgtagcgccaggagtggccgtgccatccactagtggttcggaagctaatcgaaagaactttcagtgatttctagtttttggagtactatgatgtatactaattttgtttagaatttgactttgcggtttgtgtcgtatactagaacaatactttgttgtaaaaaaacttaggagtgtatgctatatatttcatgtgtgctctgcatcttttttccccctctggtgtttttgcatcttttgttaaatacgcccatatttgggaaagttcattttttttcttgtagtaatctaataaaatataataatcaaaacaggttgtttggtcttat

SEQ ID NO: 50878 - DNA, 1366 bp, Glycine max
  Clone ID: PAT_MRT3847_16955C.1
gcacgagaacatatctaccagtctcgactcaccggtcatatttcattagagagagagagagagagagatgcggaagagaaagggtgcatctgcagtggtagaagacgaagaagaaaacgaaaacgaggattgtgaaggaaatggtttctttgcttgctacctcttgacatccctcagcccccgctacaaaggccacacttatatcggattcacagtgaatccgaggcgccggatcaggcaacacaatggggagattgggtgtggagcttggagaacgaggaagaggaggccttgggagatggttttgtgtatctatggcttcccaacaaatgtctctgctcttcagtttgaatgggcatggcagcaccctgttgaatcattggcggtaaggaaggcagctgtggagtttaaatccctctcaggaattgccaacaagattaaacttgcatacacaatgctcacccttccatcctggcagagcatgaatatcactgtgaacttcttctccactaagtacatgaaacactgtgctggttgcccgagcttgcccgcacacatgaagaccaagtttggctcactggatgaacttccatgttataatgaaggcattgatggtttgtcagagaatgaagatgataatattgatgaagtagaattcaataataatactagtactagtggttctgttccagatgtgggtgatgattttgtcactcctgattcaccagaaaatccaaatcacagggacaagattagcgaagcatttgagtggaacaaagaatctgaagtaagacaaccactaggtaattcattttcttcacaagagcagagccaaccgtttagttctacaacgccactgacaatgaaatcatcttcaacaacttcattacatagagtagatattattgaagatgattttatgagtgtgatcaataagagtggtgctgatttgattcaaccagaacctgagcaatcaggtgctacatcagcagccaataaaaatcatgacatcagccacacatttgttgtgcccaatgaagctgagattatcgatttgtcaaccccctctcctagttgcagaagtgttttggataggaagaagagaagagtttcttcttctgttggtactgattttattgacttaaccaactcccccaactttgtccaattgtaaggctttggcctgccacaacactgatgtgatgagaaaacataatttgttaaataatctgctttgtcacactccattatctttctcagatatggatcacacaaagcagttattgacaacagagaccaccaatgaatgtgtaagaatggagaattatgaacaaataaatattatcttgtttgtttcctcaaaaat

SEQ ID NO: 50879 - DNA, 566 bp, Glycine max
  Clone ID: PAT_MRT3847_16956C.1
ggaaaaaagggaccaaagagggtttatttcccattcaaaaaaacgcttggatattattggttacaaagcaaacgggcccaacttaatcacatcaattatgatggggggggaggttgcaataggataaggaaaaccctgcgtgttactagtccaatctgggaacattgccaccaagctgaaaggaatactcatacccacagaacccaaaccaaggggggggaaaaaagaggggaaaagaaaatcagggggaccggtttacacacccaccaacatattggcagggcaccaggtcctcctacctggaccccctatgggggatttggctaatctagaatccaaatcctggtttttgactatgaaacaaattggttcttcaaatactgaaaaatcattataaccaaattttcaagggcctctatgcttggggaagcaaaaacaaccctgggggtgagcatgaggggaaatacctccacctttggagggggcaagggcccccagcagggaaactacctcatccatttccggccggttatggggactgggatcccaacactttttcattacat

SEQ ID NO: 50880 - DNA, 259 bp, Glycine max
  unsure (1)..(259): unsure at all n locations
  Clone ID: PAT_MRT3847_16957C.1
ctggacttcgccagtacttggacaacaacatggatggattttacattgctccagcttttatggacaaacttgttgttcacattaccaagaacttcatgaccctgcccaacatcaaggttcctctcattcttggtatctggggaggcaagggacaaggaaaatctttccaatgtgagcttgtctttgccaagntggggaatcnnccccatcatgatgcntgctggagntttggaaagtggaatggnggagccccaacaaa

SEQ ID NO: 50881 - DNA, 371 bp, Glycine max
  Clone ID: PAT_MRT3847_16958C.1
gcagaaccgcactcttctaaggaattgttacattggttatacttgagtgtttatcgtgatgagcttcaatggaaatgtgttgcacagtgcttggttttcccttttaccattgttgtgagctcaactttattattatgtcttagtatacccaaaagttatgacttctgtgtatgtagctaaagcttttctttattgctgctttcaacatgtgctcaactcaactgcaggaacatcgacctcttgtcatttggttcataattatttactcctttacttaattatgtgtctcctcatcattggggatcagcgaccagaatctgtgaacattgatgcacctgatatcaatggaacaaggtttttcagtcaacttg

SEQ ID NO: 50882 - DNA, 235 bp, Glycine max
  Clone ID: PAT_MRT3847_16959C.1
gcgtccgcggacgcgtgggtcgcccacggagtttggagcaatgtgtactgattgcttagtgcaattctccattctcaacacttttttcggagcagccttgaatttcgttttcgttcatgcatcctccacccactaggttgtagcgtgcatgcgtcctccgcccgcgtttttggagacctgcctcccgctggggtggagcccactccattgtttaccctgtctcggagccgcttgc

SEQ ID NO: 50883 - DNA, 1767 bp, Glycine max
  Clone ID: PAT_MRT3847_1695C.1
tgccgttacacggccatccttcactttcactttcctctttctctcttcaaatcaaacactcataccccacgcacacgacccaacacaaaaccacacccgattctctctctctctctctctcctagtacaaggtgggaacagtttcgattgtctctctctgacaccctacgatttctgcggcagcatcattccacacgcagagtcagtttcgttcttcttctaattcatcgctcccgatgaaacgagggtaccaggaatccccttcaagctcgttaggtctacctcattccagatctacacatgatcctcaaggtggtgcacactttgttgagcatgaaagccattttcattggaacaatgcctgatgccaatgtgataatcaagaagcttagagaagctgaaggattaacttttggcaacagagtctattgggtgcgttttgatgaagaattttctgataagaaatttaaatcttccagcccttttggaataaagtacacgttccatttggaggacgctgttgattgtcctgaatggattgtccccttccatgtattcaagtcattagctgaagagaatgactttgagcttgttttcgcaaagaactcacatgaatttgtgcatgagtatatgaaaaaaccggaatttgtggagctcatgcgaagacttggtgcattgggagatggcaaccaagatcaaagtacactctctgctgatgaatgggaggcagcatatttatacatgtcatttgtattgagaaagcgaggtcaacctgacaaaacccaacagagtggcagaaggaaccgagggtcaatgcacatttcagaggaagacatcatgtacattagcactgatgattaaacgtgaataagaaacagccagtgactgaattttatacaatggcatagggcatgaatcggcttgtattgccatgtgccagtaccattgatctcacaaccttgagctccagcaattttttttgctgcaatatgtacgttgaattttgtaggtctactataaataattgaaaacaaaatctctgcctccggatttgtattatcttcttgattagatttgtggcaggttatttttaacaaacttcctctgtaatatattcttccctgttacagcagatgataatgttagtgaatattgaaaatgaaaaaaaaaaggagcaaagggagatggcaaccaagatcaaagcacactctcagctgatgaatgggaggcagcatatttatacatgtcatttgtattgagaaagcgaggtcaacctgacaaaacccaatcaagtagcagaaaggaccgagggtcgatgcatatttcagaggaagacatcatgtacattagcactgattaacgtgaataagaaagaaacaaccaatcactgatttttctacaatgtgccaatatcattgatctcacaaccttgagatccagcaaatttttttgctgcgttgaattttttagatccactataaataattgaaaacaaattttctgccttcgaatttgtgttagcttagcttctggattagacttatggcagtttatttttagcaaactccctcacactaatatatccttccctgttcaagcagatactaataatagtgaatattaaaaaagtatccattggcacaggtttttatttttagagtccttttagaacctagccaattgcgattttcttcaatccaaattagattttgattatgattatgtgtgttgatctttaatattatttttaatatataggttatgttc

SEQ ID NO: 50884 - DNA, 475 bp, Glycine max
  Clone ID: PAT_MRT3847_16960C.1
caacaacatggatggattttacattgctccagcttttatggacaaacttgttgttcacattaccaagaacttcatgaccctgcccaacatcaaggcatgccactacaaacatattaattctttgcataaactgaacagttagacttttgcaaaattgggagacacattcatttttttttcttcaatattttaccaggttcctctcattcttggtatctggggagggcaagggacaaggaaaatctttccaatgtgagcttgtctttgccaagatgggaatcaagtgagtttcttgctgaactagcccctccattatgtgcatttttcaaaaattcagttagatcatccaaaaccacattgaaatatcagcaaacataattttaaatataaaatcacttgttcagtcttatgttgaacaattattatgagtccaaaattgattgtgactgtaaacaactttaactttaagtaactg

SEQ ID NO: 50885 - DNA, 151 bp, Glycine max
  Clone ID: PAT_MRT3847_16961C.1
ggctcgagctcaaagacaacacaaaagcgaaccgccaatccctttcaacgagcacaccacacgccaccacggggcacaattaagaacgacgccaccgcagagacagggacgacccgaacgacacagctcaacaacagcaaggacggcacgc

SEQ ID NO: 50886 - DNA, 463 bp, Glycine max
  Clone ID: PAT_MRT3847_16962C.1
ctcgagccgtgcggttgacgtatggcttcttttcctccgtcgacgagctgatagtgcggcaatgaacgataccgacatcctgccgcttgtgtcgatgaatgcaacgtgcgacgctctggcgtgcgatgaggacacatatcgtctgctgcagccattttgggatttcctacgattgaactacgggcatattcttcggtcaccactattcccgcctttcttcgctttgtccatcgactacatctgggtcgccgtgttcacatttatcgacgtatgctgcacagaagtgccgttctttaagcaagccaagatacagaaggaccgaaaagtgacgtgggacctcataaaggagtcactgcatctacaactgttcaaccagctcttgtggatttacccgatggcattggttcagctgttgtgggtaccagaggagaaactaccggcgctagcgcccacagtatgggag

SEQ ID NO: 50887 - DNA, 139 bp, Glycine max
  Clone ID: PAT_MRT3847_16963C.1
ggaatacaaggacggagattgtatgctggttggtgatgttccgagggagatgttcactgattcttgcttgaggctgaagataatgaagagtttggaaacaattgagcttgcacctagagccatggataagtgcaaaagt

SEQ ID NO: 50888 - DNA, 426 bp, Glycine max
  unsure (1)..(426): unsure at all n locations
  Clone ID: PAT_MRT3847_16964C.1
ggaatatgaaaccttcatcaattttgatgttaggacaaaacttatatatagccttatgcttgactaaccgtttgcaagcctcaaagcttcgtttgggaacggatctgcagtgttacttttgcgttggtcaattagattagtcttggaacgcgtgccgaactcaatcatgctcagaattttttaggtgtttttgtgttgttccccaattagtttcaccaattagaattgcggttttactcgataatctccatagtaaaggtttgcattaaaggtctacatagattaccaagttaaatcttcaattttgattggagaacaattaagaattattatatcttttttggcttgtcaagtgcatttcatataagagatgatcaaacgtattcataatattacatgatccactgcatctattaatntcttgtg

SEQ ID NO: 50889 - DNA, 349 bp, Glycine max
  Clone ID: PAT_MRT3847_16965C.1
gtcaggctagtactagtcgcgagcgcccttttttttttttttttttcttttttttttttttttttttttttttttttttttttttttttttttttttttttttttttttttttgaaagggatacgactcaataccaaatgctattggaataaacaccaacctgcgttaatacctaaatttccaacccaatttgggctccacataattaaatacaataaatggaaaaaaatcctttgagaccccttatttccgggcaacctccattttacccttagacgaatgcctagcatcccaaagctaaactcctaacaggacctggtcccccgcgaaatttaccccccataccgtg

SEQ ID NO: 50890 - DNA, 232 bp, Glycine max
  Clone ID: PAT_MRT3847_16966C.1
gttcctgttctctgtaactgcgtttggggcgtacaaacgcacattctagtgaatgatgctagcaactgatgaagcattatttgggagctaaccacctcaaaaaccagacctgtgctacaagtaaagctgaatgctttggctcgaattctagttctttgatgaaccaacatatctgttcacagattgacttccggacaaattccctggttatgaaaaccgagtcatatttgaa

SEQ ID NO: 50891 - DNA, 436 bp, Glycine max
  Clone ID: PAT_MRT3847_16967C.1
ccctcgcgttctagcaacggggaccagaagcagccatgttctctgcagggactgggagggatgtgacacctcatgagttcgttaaggcgtactcgtctcacctcacgcgatccggaacgatggaactggcagagtggactgctattgtgaaaactgcaagatttaaggagttggctgcttatgaacctgactgtgactatgtcacagctgctttcatgggaagaaagatctacttgacaggacgacttggtgttggtgcctatcagaggacctatggtgggagcaagaggaatgggaatcaccctcctcatttttgccagagctggggtgccattgatcgacacattcttcaacagttgcagaacatgaacacttactgaactggacaccactggtggatcgaaaatcacttccactgggcgactggatcttgacc

SEQ ID NO: 50892 - DNA, 291 bp, Glycine max
  Clone ID: PAT_MRT3847_16968C.1
aatctcccacttcggctcgtggctgcgagaagcgacagaagggcaatatacatattgcatgtatatattcaatgtacattaatttgaattcttcaactcttttggtcgacgtggggtctttatacaggcctggaaagaacatggaatataatgtagttgccagaaaaaagaattggtggaatgtgattcacatgcatgtgttgtggtccggtttgttagtacttatgtcttagctcgatctcgagatatggatgttgatttacagttgaaaatatgataataaatttaacg

SEQ ID NO: 50893 - DNA, 2014 bp, Glycine max
  Clone ID: PAT_MRT3847_16969C.1
gtacaacctccggttccggtccggattcccgggtcgacccacgcgtccgctcccctttgctcgtggatctacggatatgctaatgaagttgaagctgcatcagctacagcaccggctaccaccgtcaagtactaatgctcagcagcaccggcttcagctccatgtcctttcaacccagcagtctctcactgcaaatcatagaattcctcatcatcacagtttggcgccaactggtgggattctgactgtggatggtagcatgtcaaacacattttgaacttatgaccaggtttctgaaaaccagtttgttagagagagaaagcatactggctccacatcccgttctggcattagctctccaacagcaaatacaacaggtgcatcaccaagttcagcaccctcaactccctcgacccatacgcctggcgatgtgatgtcaatgcctgctttacctcatagtggtagttcttcaaagcctttaatgatgtttagcgctgatggctctggaactctgacatcaccttctaaccaattggctgatgtggatcgttttgtggaggatggatctcttgatgataatgtggagtcttttttatcccatgatgatacagaccctagagatactgttggtcgttgtatggatgtaagcaaaggtttcacattttctgatataaattctgtacgtgcaagcactaacaaagttgtctgttgccatttctcatctgatgggaaattgctagctagtggtggccatgacaaaaaggctgttttatggtacacagattctctaaaacaaaaagctactcttgaagagcattcatctttgattactgatgtccgtttcagtccaagcatgcctcgtcttgcaacatcttcattcgacaaaactgtcagggtttgggatgttgacaatcctggttattcacttcgcaccttcacgggacattcaacatctgttatgtcactagattttcatccaaataaagatgacctcatctgctcttgtgatggtgatggtgagatacggtattggagcataaacaagggaagttgtgcctagagtctccaagggtggcaccacacagatgagatttcagcctcgtctcgggaggtaccttgctgcagcggcagagaatattgtgtctatatttgatgtggagacacaagcgtgtcgatattcactaaagggacacacaaaaccggtggattgtgtgtgttgggatccttctggggagttgctggcatctgtgagtgaggactctgtcagggtttggactcttggatcagggagtgaaggggaatgtgttcatgaacttagctgtaatggcaataagtttcatacatctgttttccacccaacgtacccttcattgctggtcattggctgttaccagtcattggagctgtggaacatgagcgagaacaagacaatgactctgtctgctcatgatggtctcattacttccttggcggtttcaactgtaaatggtttggttgcttcagccagtcatgacaagttcctcaagctctggaagtgagtgtggctcttccaagttaccataaatataatggcaatacattaggtctttttgtcaatgttgttcacatgtttgtagtttatttcccttttttttgcttcttgatcgaatttgattttctacgtatctttagcttactaacctatgttatgtaatgtaacattgccttcctgctgtcacatcttccatttaaatatttacttggatattgtttatgtttttaatacaggttgttttttagtctgttgatattgttgtagtttatgatgtccccttttttgtagtttggtcaaccaccctccctcgcatgtttgtagtttatgtacccttttatgtagcttgatcaaccaccctccctcttttgccatttgggtataatctgattttctatgtaaccatagatactaactttttgtaatattgtcacccctgttgtatcctgtttcataattgttatacttggagatttctgctca

SEQ ID NO: 50894 - DNA, 305 bp, Glycine max
  Clone ID: PAT_MRT3847_1696C.1
ccaagggaaaaattttgggtaaaatgggctgaaccttgaggggggatttttttaaaaaaatttgcttttgcccccttttttccgtgggcaaaaaagtaccccccccttttttagaaaaggttttaaaaaaccccaaaggggaggttccaggggttgttttttttttggccctttgaaactttttgcccctttttgttttttgttcaagtttgaaggacccttcctttgccaaaaatcccatgaatcctttgatgggccatcgcccccaaaaaaagaacttcccttaaaaggggatttgaaagaat

SEQ ID NO: 50895 - DNA, 259 bp, Glycine max
  unsure (1)..(259): unsure at all n locations
  Clone ID: PAT_MRT3847_16970C.1
tcgcgagtacgtgagagaaacttttgcttggatgcactattactggttcctcaccaacgatggcatcgagtttctcagaaactacctaaacttncttcccgaaatggccctgctcctttggaagaggcaggcaaggccacctggcaggccctttggaggcccattccgggattgcccttaaaggccaccaccccttttaaagggaaaccaaagtttgggggggaatcggaaggataccccgggaagccccccagaagga

SEQ ID NO: 50896 - DNA, 192 bp, Glycine max
  Clone ID: PAT_MRT3847_16971C.1
tgtttttttcgggggcagacaaaacgagcacaggccgcctcatgagccagtccgtgacacagacgcggcaaggaccatcacaggggactcacaaccaacacactgggcaaccgaagtcactgtcagcgacggcaagccccccaggcgacaaagggagccctgccacgacaggacacccccggcgcgataagg

SEQ ID NO: 50897 - DNA, 454 bp, Glycine max
  Clone ID: PAT_MRT3847_16972C.1
ctctctcaaagctttcactttctgcttcatttgttgctgctacagtttttcactcatgaatatcttcttcatttgatgcatcacctttgaaggaagcccttcagtttcgatcatggcaaccaatccatctcatttgcctggaattcataatgaagaaaaagttgtctcagagattgggaattctgaaaagcagttgtgggcattgatccattccaaaggccttttgcactctgatgctcaagacttgtaccacagggtccggtctagttatgagagaataatcttgagtaatcacatgttctcagaacttcaggatgttgaatattctttgtggaagctgcactataagcatattgatgaatttcgcaaaataataaagaaaacctctggtaatgtggagagcaaaaaatcaggaatgccacaaaatcgtgctgtgcagggagacagtggcaat

SEQ ID NO: 50898 - DNA, 443 bp, Glycine max
  Clone ID: PAT_MRT3847_16973C.1
accgccccggcgttcccttgtcgtcccacgcgtccgcttttctgtccgcccacgcgtccgcccacgcgtccgccctcgcgtccgtggtgacgaaaaatcgatgcgtgaaaggacacacctgctgttggcttgttgctcaaggatggcaatttgtaagaaagatgttcggagagacgaatgtggaatcccttctggattaccgctcacagttatacgcaacagcattgccaatgagatgctcattagatatagctatgaaaaattactgcgccaggctaaagctccaagtatgtttttacaacctctcaaaaattttgtttctctgtgtgtgcatggcgatgataacccaattagtgtgcatgaatacgacaagccctactttaatggatctaaatcgaaaagctctctagctggtcataatatcaccattactgatggtattg

SEQ ID NO: 50899 - DNA, 387 bp, Glycine max
  Clone ID: PAT_MRT3847_16974C.1
ggggggttcgggtctcgaaaaactcacctctcatcatagattaatattaagaataaaggccttctccaggtcggttcttatggcccacgtgcggattcccatccacatactttgtggttgtgaagaacctcaggcgtaagtgtcacgcgctcgcttatcacatggaacgcgattttcgcattctcgaagccagactctccaacatcgaagaatcctcttcttctgttccgctcccgatcgatcaggtcgaaggcgtttctggtccagcgaaatgatttctactaggttctatgggatttatgcttgattcaaaaggttgaaggctagataacactttcagctccagtgaaatgatttctactagctaggttctgagggatttattat

SEQ ID NO: 50900 - DNA, 219 bp, Glycine max
  Clone ID: PAT_MRT3847_16975C.1
ttcccggctcgacccacgcgttcgtccactcgtccggctatatctcaaagtgaatatcaccgaggagttattgcattgaacttccatattgatgattttaaaacacaagcggcatttattcaagactattattatatttcaaaaattaaggaataagatgtaaaccaattctttaactcttacaaggccccacttaatcccaatttatttttgaccaaa

SEQ ID NO: 50901 - DNA, 312 bp, Glycine max
  Clone ID: PAT_MRT3847_16976C.1
cccacgcgtccgcccacgcgttcgacatatttttgcaacccaaagtcaaacaaagaaaaagcgccataaagcaactgaactgggtggattgattgttttatgataaaaaggcctcatgccttgtctcctatttttttttttttttttgtaaatcaaaaagttccctttctttttgttatattggtgtttaataatttggaaaaaaggttaaaggttagtgtttgaaagttgttctttttttgttaggtaggtttactcgtaggcatttttatttgcacgtttcttttgttagtgcaagatcacatatttgtt

SEQ ID NO: 50902 - DNA, 414 bp, Glycine max
  Clone ID: PAT_MRT3847_16977C.1
cgaagctcggaattcggctcgtgatcatacagcacacagcgtggtgagccatcccaaacaggccaacccgtggccctttatacaagccgacgaaggggccacacgagtcaacagactacatggaaaacagcaagacagcagctgagctggctatacctaacccgaaagggacgctgactgcggtacagaggacacaatcatgtcgacaacacacaggtatatgatgctgacactgcaaagagcaagatagagaggccatatcggaggtgtgatgctggtccaccaaagggcgtcaagagggtgacatagatgcttaaacagaatgaccaataacgtatactaaagagcatggacacaacatcaaaaaaccgcaccggggcgattaagaagccagacccattactataaacaaaa

SEQ ID NO: 50903 - DNA, 419 bp, Glycine max
  Clone ID: PAT_MRT3847_16978C.1
gaaaaagaaggatgcagagcaatctgcagcagagattgctatagagaagcttggcgatttgtacagaggccattgatcccactccacaggaagcacaagaaagtttagtatctcgaattgcctacatattttctgaaaagtttgttgtatgtgatcatccactcagtggtcacattcgagcaactttgttgaggaaaggtgatctttgtggttccattcctatttctgtcattgctttctatgatgcaaagcttttcagcttgtgtaaatgtattaatcctgaggtggagtcaaacccatttttagttatttcatacataatgaatgccactgcaaacttacaccagtttcttgctacttctgaacgacatctctggattagaaggctgagtccatatccacaagatattatagagtca

SEQ ID NO: 50904 - DNA, 329 bp, Glycine max
  Clone ID: PAT_MRT3847_16979C.1
tcggaagctctaccgttcacgtgtaaagttttaagatacatgagagcaaacttgagatggggtttatcgctgtcttgacaatcactcttagagagatgattgacaaagatgaaaagacaactatacggtcctttgaccatgatctaagcttgaacttcatagagactgagattcacctcaactggcctgatcttgactatcgcatggaaactaacacgatcagtagatacaatgagttctataacaccagagagctgaggctcaacgttgagatcaaggaatatctaaataagaatcttactaatggatcaatctagaatactataact

SEQ ID NO: 50905 - DNA, 1530 bp, Glycine max
  Clone ID: PAT_MRT3847_1697C.1
ccacgcgtccgtagacactttgaaggtctgaagttcaccccgtggaagttttcttatgaccgaatgctgcgaaatgttgcaatcagattctacaagagcagtgttcagctaccagaactgcaggcttgcaaggcttctgattttgtcagggatgtgtggattggaaggtggacaaggcatggcaagaatgatgactgctcgatagaaaatgatggtaggtaccggtgcctagcgccggattttccttgccaagctccttggtgtgatggttccttgggaattctggagagtaatggttgggtgtattcaactcattgctcattcaagttgtattcagctgagtctgcttggaattgcttgaaaaacagatggattttcttctggggtgattcaaaccatgttgacacaataaggaatttgctcaactttgttttagacttgcctgaaataccttctgtccccagaagatttgacatgaacttttccaacccaagagacccttctcaaacagttaggattacaagcatcttcaatgggcattggaatgaaacacaaaactatctggggttggattctctgagagatgaagggtttcaagatttgctaaagaagtacttctcagaagacacaattcctgacactgtgatcatgaactctggcttgcacgatggcgtccactggcgcaacataagagcattctctgttggagcagactatgcagcatccttttggggagatgttatgaagacagtgaagcaaagggggttggcatggccaagagtgtttttccggaatacagttgcaactggtggatatgcaaggtcactagcattcaatcctaacaagatggaggtgttcaatggtgtgttgttggagaaattgaagcaatcaggagttgtttctggtgtgattgataactttgatatgacatttccatggcattttgataaccggtgtaatgatggagttcactatggaagagctccagcaaagatgaagtggagagatggccaaattggacatcaatatttcgtggaccttatgttagctcatgttcttctcaatgcgctatgtgcaagatagcattcaaagcaagtgttgtatgcacacccaatatagaataatgcacttttgcttggttgaagactattgaggtagtgtccacaatgcttggactctggctgtttctatgtagttaggtttgtcattctttcttgctcatatattttttgttagtgtgagttatgcatacatgataagattgttccacttgtagattagcaggggatttaactcctcaaaacacattttactatccatgatcaatagtattattcaaaggctattctttgtttgaatctctcttattgtttagagtatccatgggcttaaaatctaagccgtaattactactacttgacttgtagccatctatataggccttgtagttaaaggtaactttgtgcaattgtgcttttcttgttgacagtggacggttacaattaattattgcagcaaacttttctcact

SEQ ID NO: 50906 - DNA, 633 bp, Glycine max
  Clone ID: PAT_MRT3847_16980C.1
gtaattgtttatggagagatcatgcaatcacgtataagtatagagaataactataatttaacaactgtgaaatgaaaggatgatatggtgatgtgtatggtctctgaattcgaagacagaggaagaagggaaataagataggaagggtatagaccaaattctcattaaaatttgtcaatcaatacatggccaaatatatctcagtcacatgctcactattctaactaactgcccaaaggaatctaagaattgatcccctctaacagaatacatgataagagccttctagaataagctgagtcactctccctattattacaatatcagatatctaaaagctaatgataaagcacgtaatccttcatctttttcggtgtaagaataatccttttgggcctcaactctgcttcagtggcaatccgtccactctcctcaatggcctgtacttgacaaatgggctcagtcatagcatgtggaaaaaatataatctatagattctaatcaatttaaaaagaaaataagaaataagcagtagaagtgtttcttctagccatttttccttagcaatgagaggcaacaaatgaatgggaagatcattattcatataatatcaaaaggctattcatgtggatg

SEQ ID NO: 50907 - DNA, 262 bp, Glycine max
  Clone ID: PAT_MRT3847_16981C.1
ggttgctcgagctcgagccgctcgagccgctaccaccttgattcactcattgtggattgaacaagaaatttacattactttcgactggaaaccttcagtaagatggtttgcagaaagttcttcttgtttatagtgtgatttagtgatgttagataattcaagtgaaggattggtaggcccattagtatgacaccgggggggtgggtgtagtattttgttactccaatatggatgtttatctgagtgtccagatattgtctgt

SEQ ID NO: 50908 - DNA, 327 bp, Glycine max
  Clone ID: PAT_MRT3847_16982C.1
gatagcatattccagtgtttttcatttcatcgtgcattcaatggccaccacagcatctctatccggaaccatggtgagcacctccttcatgaggaggcaacctatcaccaccatcaagccgggacacattctccaccgttgcgtgaagctctttttggtcagattattggtccaagtgttcgtgtcacttgcatggcctcgtcacatggtgaatctcataaccccagactgataactggagtttgaatgcccatctgatgttttcactgtttacaatgcataggatgaacgcattgatcttccctactcgtgcagggccggttcttg

SEQ ID NO: 50909 - DNA, 166 bp, Glycine max
  Clone ID: PAT_MRT3847_16983C.1
tatattatacatctcagcaactttgctgggaagtttcaagtttgtccctcttgatgtttttccccctctttcctttggtcgttgatacaatagaaccttctttttctttgaaaggttgattgtaaaataacgtcaagatcgtagaattttcttaaaaaaaaaaaaa

SEQ ID NO: 50910 - DNA, 406 bp, Glycine max
  Clone ID: PAT_MRT3847_16984C.1
gctcggaattcggctcgaggctatttccaaccacccaaattccttttgtttgttgctgacttgtttcttctggttgttgagctcttaagccaaacacccaaggtatcatcttcattttatccctgtcacatttttgctggcagcttctcattgacaatgaacaatctcaagctacgagtagaggttgcgagtgctcataaccttgtgcccagagatgggcaaggaacatctacctcttatgtggaactccactattgatacacacagattcccgacaactactaaagacacagatttgagtccttcctggaatgagagcttctactcaaccatcactgtggcaagttagttacctaccctcactcttgaagcctgtatttaccactacaacaaaggcaattgcttc

SEQ ID NO: 50911 - DNA, 973 bp, Glycine max
  Clone ID: PAT_MRT3847_16985C.1
gtttcgcgtttcgtttgggatctgaatggcgacgagaaatcgcactctgcttttcagaaagcacagagatgcgttgaagagtgttcgaattccctcattctcttcggcgccgtccaccgcttccggcgccggcggtggccccgtcatcgaattggccaccacttcatttctcaattccaatcgctcttacactccgatcagtaccgatgatcccggcaattcaagtaggggtccaaatgcaattactgtagtggggctacctccggcgtgggtggatttatcagaagaaatatcagcaaatgtgcaacgtgcgcgcacaaaaatggcagagttggctaaggctcattcaaaggctttgatgccatcatttggagatggtaaggaagaccaacgagctattgaaactctaacacatgagataactgacttaataaagaagtcggagaagagactgcggagactttctgctactgggccttctgaggattccaatgtcaggaaaaatgtgcagcgctctcttgctactgaccttcagaacctctctgttgagctccgcaagaaacaatcaacttatttaaagcgccttagacagcaaaaagagggtcaagatggagttgatctagagatgttaaatggaagtaaatccaaatatgaagatgatgacttggataatatggtatttaatgagcatcaaatggccaagctgaaaaaaagtgaagcattcacaatagaaagagaaaaagaaatccaacaggttgtggaatctgtgaacgagcttgctcagattatgaaggatttatcagtactagtcatagaccagggaaccattgtcgatagaatagactacaacattcagaatgttgcaaccacagttgaggatggccttaagcagctgcagaaggcagagagaactcataacaagggaggcatggacatgtgtgctactgtgcatctgatcatgtgcttcgcaatg

SEQ ID NO: 50912 - DNA, 1306 bp, Glycine max
  Clone ID: PAT_MRT3847_16986C.1
ccgcaaatatgctggggcaatattagttttaggtagagaccttgttgtggttcctaaactaatccatccattaccaccagcaatttcttcaccagaaacatcaccagaacctcatattgaagatacatggatgcaggagttgaatgctaacagaccgccgacgccaacaagaggccgtcccccagtaacaaacgaccgaggttcgctcgcttggatatagtgatcatgtagaatgtcccttcatatttgtgccgttctggtcgtgctgtcagccttgtttttgtgttatgtatatagcatgatgccatttacgggagtctccgagcctgtgaacttaatccctgcagttggttttggttctcatcactccatctcctggcctgcataagattcaatatctactttccaattacctcatttagagatttttgggaatcatgagcctaatgttaccagggcacagctcgaaaaaagtcgccgatcgaaattaacactcccccgtgtatgttttgcagaggtttcggaatccacttttcagtgtgactggattgttcatttgttttccagttattacattgtctttattttctctgtgctatttataatgttccgccacagataaggctcgcttctttattttgtcactttttttttaagtagagtcgtcaaatacatgatgccatttacgggagtctccgagcctgtgaacttaatccctgcagaaagttttggttctcatcactccatcagcaggccttgataagataagatatgcattttccgcatcactccatcagaaagttttggttctcatcatgctacgtttacttggaccaagctagaaagaagttcgcaatccaagttcacccccccgtttgtaaattgagcataggttacgaaatcaaggttatggttgtcatggaggctctttttgtctttcaattcttacatattttttacttgccctaggctattgttggggttttgttaatcaagaggacagaaggttttttttttttttttaatgtgatggtgagttatataaatcagttcttggaggtccttgtatcataggtgttgctcggtaatttcatctttgtacaattaatttttgagtgaatcgatattctcctatgaagaatgtgaattttgataatagttttgtattttgccctatgctgcaaatgtcttggggggttggatttttgtcaggatttacttagcttccagatgcttctgccaggattttatagatattgactattgcggtgcctaataggctaatagctaatgtgaacgaggtttc

SEQ ID NO: 50913 - DNA, 650 bp, Glycine max
  Clone ID: PAT_MRT3847_16987C.1
cccacgcgtccgcccacgcgtccgcccacgcgtccgcccacgcgtccgatggcgacgagggatcgcactctgcttttcagaaagcacagagatgcgttgaagagtgttcgggttccctccatctcctcgccggcattcaccggttccggcgccggcggtggccccgtcatcgaattggccaccacggctcgagattttttctgcgagacttggaaatggcgagttattcattgttttaatggatacagtaggggtccaaatgcaattacagtggggctacctccggcgtgggtggatttatcagaagaaatatcagtaaatgtgcaacgtgcacgcacaaaaatggcagagttggctaaggctcattcaaaggctttgatgccatcatttggagatggtaaggaagaccaacgagctattgaaactctaacacatgagataactgacttaataaagaagtccgagaagagactgcggagactttctgctactgggccttctgaggattccaatgtcaggaaaaatgtgcagcgctctcttgctactgaccttcagaacctctctgttgagctccgcaagaaacaatcaacttatttaaagcgccttaaacagcaaaaagagggtcaagatggagttgatctagagatgtt

SEQ ID NO: 50914 - DNA, 2427 bp, Glycine max
  Clone ID: PAT_MRT3847_16988C.1
aaaatgaaattggtcaaattctttttcacgcacatttcccaggagcttactgagaaggcaggagaccaaattaagagaagaaaattgcccccggaaaagtgctgctaatttgcatgtatatattgtggcatttgaatttcgaaatgagaacttagatcatacaaggagtgacatgtgcataatgttggtccctcttatagtttatatacgaggtgacatccacctttacatgtatatatatatatataaaaaaaaccaatccacaaatcactctgcagatctctgttttctgtgcaccaaaatagtaaacactacacagtcagtataaactatgtacacattaccatacaatcgaaaattcacctaaaccctgatttacatacagactacaatataacattcatcaacaagagccaaaattaaaaaaataaaataaataaaaacaggttgaggatgagattgccaatgccacctccatgatttacacccaaaacccagcaccatcatgcaatctagtttttcctatccattccgacacatttcatcatgaacaaatttaacccttttcctaattttttaaaactgtcgaaaaattagaaacagagagacctaaaacgtggtcgtgttgacgaggttgttgttattcctggcagcaccaactcggtaccgattccgagtcaatccggccgagtcgtaaaactcgtcaatctcatcaccgtccccatctcccacagtcctcatcatatgcaacaccttcctcgccctctccctcgccctctccgttcccgtttgttcgatctccttcaaaacctccaccactctcgcgtccttggccaaacccttgaacctcaagcttctatgactcagcgcgtacaaagccgccacgcaattctcccgattcgcctccgagtccaactcgttccctcgtaataaccccaccagaatctccaccgcgttggcgtccagcatcgccgtgcgcccctcggtgcacacggcgaggttgcagagaatcagcagcacccggctcgccaaattccccgccaccaccatcgagaggagcgtggggacagccccgagtttaaccaatttcaatctgttgctctgtacaagtgacaaatgatacagcgcgagcgctgagtcgtgccgagtccgctcggactcggcacgaagcgcgtgcatcaacggatgcaacgcgccgagaacgccaatcgccatcttgttgtcatcgtccaaagccaaactaaaaagtgcgcccgcagcgtgctcctgcgactcacccaatccccccttcaaaacatcgattaaaaacggcacaaaccctgacctaacgatcttcaacttgttctgcttctcaagagaaaggttgaccaaagacgccactgcgttgacctgaacgacgccgtatcgggaagcgagtaaaccacgaagcgctaacagcacccgcggcgtgcagagcgaaaccctagcctcctctttgcacctcgtgatcttcctcagcgcgattgcgccttcttcttgctcaaacacctcgttactcttcaatttcttcaatatcccttcttcctcctccgatgccggtgtgttggggttttcgatttcgatctcgcaggaggaggaggaggaagagaagcacgttggacgaatcgttaacggcaacggcgttcccggactcggagggatgatgacggattcctcggaggaggatccggagttgaagtgattgactcgggggcctaactcggtggcggcgtgggagaagatgacaggagggttgtcggccaccgcgttgagaagctccatttcggaaaccctaacgcggtcattttctttttgttctaagacgtggcgctggagggaggcgtaatcgggagggagcgggtgttgggtgcgggcgttgtcgcaccagtggaggattgtcgttttgatggcgaggttggggattagggttgagaagtcgggtcgggtgccgtcgtctagcttgggggagaagttgaggtctttgcagagttgaacggcgagtcgttcgaaggtttggcccgaagctacgacgacagggtcggacattagtgagccggaaatggggcaggtgaattccttgggaacttggttcgggtcgggattggaggtttgggatgaggaacggtggaagctgaatttccacctgtgtttgccgttgccacccatgattttgtagcggtttcggaatgaacaagggattctgtcaaggatctcttatgacttatctctccaaccgattcattcagagtctctgactcagtcttccaaatcgcttcgttcctgaagccgttgcggtctccaaagatagtttcacggattcacggtagtagataagttttttttcggaacataaatacatgaattgagaaaaatctataaattttatttatgatttatgatttatgattt

SEQ ID NO: 50915 - DNA, 299 bp, Glycine max
  Clone ID: PAT_MRT3847_16989C.1
cctaaaacttcgaaagtatgccttaaaaaaaactctgaaattacaacattacagagacttacagtacttgcacatctcagatttcatatattatataaactgataacagatattgaaaacaagtaaacaaccatctcaagtagactagattagaaagaaaatagacctttaccaatacatgcatgaccctagttgccaatcaaattatctgcaaactgaattagagtctttgtagatgaaccttcttcttcaggggcttcagcagcagcattcttaaatttctgcattcttccaccaat

SEQ ID NO: 50916 - DNA, 543 bp, Glycine max
  Clone ID: PAT_MRT3847_1698C.1
ggctcgagatcggccgccctttttttttttttttttttttttttttttttggaataaagtacacgttccatttggaggacgctgttgattgtcctgaatggattgtccccttccatgtattcaagtcattagctgaagagaatgactttgagcttgttttcgcaaagaactcacatgaatttgtgcatgagtatatgaaaaaaccggaatttgtggagctcatgcgaagacttggtgcattgggagatggcaaccaagatcaaagtacactctctgctgatgaatgggaggcagcatatttatacatgtcatttgtattgagaaagcgaggtcaacctgacaaaacccaacagagtggcagaaggaaccgagggtcaatgcacatttcagaggaagacatcatgtacattagcactgatgattaaacgtgaataagaaacagccagtgactgaattttatacaatggcatagggcatgaatcggcttgtattgccatgtgccagtaccattgatctcacaaccttgagcctcagcaatttttt

SEQ ID NO: 50917 - DNA, 437 bp, Glycine max
  Clone ID: PAT_MRT3847_16990C.1
ccctcgagccgctctctctaacccatatataattaatgactctagcaagtttcacagaacagatgtatctttgtcttgcaatttctatactggtgattttgtatgtcctcctactagccttggattccccatggaccaacaaaggagtctctttgatgctgcaagattgcaacttccctattcttacagaaagtatatatgtctacaactcagaacaagaagaggaatgaatccctgaaggaaatagatttgagattcagctacctttgtttacttcctttttgttatctgcaatgagtctcaatatttcaatttgcttctctctactcgggactatttatttcattgtatatatatccaattgacttttaattatctgactgtccatgcatgctatgagagtttatgagtatataatgcagctttttttcgcttgc

SEQ ID NO: 50918 - DNA, 228 bp, Glycine max
  Clone ID: PAT_MRT3847_16991C.1
ggctcgagctctaatatacctgaacggtgaagtgaattgcttgaaagacaaaaatgtagccgaaggaaatttttgaacatactgggataggtgtcatagctcaagctctacttgttgggcacagggacgaaaacaaatggagagcccactctctttgattacgtttttttcatgatttcttaatataaatcggactcatgaaaaactagcacatatatatatatatac

SEQ ID NO: 50919 - DNA, 267 bp, Glycine max
  Clone ID: PAT_MRT3847_16992C.1
gttgtttttttcttcttcctattcaaatgttgcaatttttaatgagcttaatttctatgcacggtcactaacaaaagttttacactctcaaccaatcataaaatatatgataggtgtgacgactttcaaggtagttattgtaaggtttaattgttaagcaatcagaaatcatgataggtgtgacgacttgcaagaaggcatttattgtaaaaaccaacaaatttaccatttatgtcaaattctaattgaatgacatcgtaaagtgtg

SEQ ID NO: 50920 - DNA, 493 bp, Glycine max
  Clone ID: PAT_MRT3847_16993C.1
ggagagttcatggctgaggttgaaattctcggtagaattcggcactccaatgtggtgaagcttttgtgctgcttttcaagtgagaattcaaagcttcttgtgtatgagtacatggagaaccagagcttggacaagtggcttcatggaaggaacagagtttcagcaaatgggttgagttcacctagcaaaaattgtttgctcctgaagtggccaactaggttgcggattgcggttggagctgcacaagggttgtgttacatgcaccatgactgttctcctcctattatccatagagatgtgaaatctagcaatatattgatggactcggagttcagggccagcattgcagattttggactagctaggatgttggtaaagccaggggagccacgtacaatgtccaacattgcagggtctcttggctacattccaccaggtaaatgatcaattcatttctccacagcaataatgaaaagtttacacccctatatgt

SEQ ID NO: 50921 - DNA, 286 bp, Glycine max
  Clone ID: PAT_MRT3847_16994C.1
tgttaagggagttactgccacccctggccaaagaggatcacacagacctgcatgcttggcatgatatccaaggcggtattactaggatggcagactctggggggaccattcataggcccatatggaacactgttacgctgaatgaacaagcaggtacattgagccgaaatggctatcatatggtgagacaagcaatgggcgttatgcagtgttgggtgcagatggtgcaatagcagctgagaccctaggcaatgctcgtctgatttctgaagacacagcactccca

SEQ ID NO: 50922 - DNA, 180 bp, Glycine max
  Clone ID: PAT_MRT3847_16995C.1
gaaaaggggccaccattagtcctaacaataaaaagaaacaacaatgcaactgtgttttgttttaaaatctaaagtatccccaattttcggtcgcacctacagggaaacacaatgttgggagaaatcaaatttggaaccccaagaatctgaggcttggggaagaaagcggtagcctcccaa

SEQ ID NO: 50923 - DNA, 802 bp, Glycine max
  Clone ID: PAT_MRT3847_16996C.1
tgcacagtcattcatagcatgacatcaatcaagttcttcacttcacaatttcagagtagcgttcatattttttcccctttcccaacacactcccaacacttgcggtgccgccacgtgtcccatcgttttcggtgttagtttccttccttctcaggtcaacaacagtcaccgatcactcccctcccgcacccaaaaataaaaaaaaaactaaccaatttttctctccgtataaataacaccaaatcaaaaatcaaaaccatcgtgagggattctcttttcaaccaccgtcatcagcgatcggattcggattcggactccgtctcgggaaaattcgagaagatttttcgaatttttcaccactgctttgtgcgcagcgatcggtttcggattcgggctccgattttcgcctctcgcgaagagcttggggttcatttgcactaatggaggggaaggaggtttgcgcgtcggagtcggcggttgatggaagccgcgacgtttggagttcggagccctcgctcgcttcctccgcggatcacctcgttgtaatggtgaacggaattctcggacgtgagacggattggaaatatgctgcggagaaatttgtcaaggagttgccagataaagtgtttgttcactgtagcgaacgaaatgtgtctatgcatacactagatggtgtggatgtaatgggagagagattagcagaagaggtacttgaagtgattaaaagaaagccaaatatgcgtaagatatcctttgttgcacactcagttggaggattagtggcacgatatgcatttgggag

SEQ ID NO: 50924 - DNA, 350 bp, Glycine max
  Clone ID: PAT_MRT3847_16997C.1
ggaccaacaaagaactagttatgaacatgttctaaaatttattgagggacatctaacaactctgatttcgaggcctgttgaataaaatacagagagctactacataacgacctgtatacaccttattttcattactagaaccattgataaaaaaaaccgtccccaaatactctattctggttaaaagcacctaaggactataaatgttgaagcccttcccttttttcacccattgggtaggctaggtcggtcttagccgcaggcaaaaccttcttatatactgtgaggtgtaagtcatgtagaaaacccggctgcaaaagccactccagtggttggtaaccaggctgacc

SEQ ID NO: 50925 - DNA, 373 bp, Glycine max
  Clone ID: PAT_MRT3847_16998C.1
gaggtggttaacttatatccttgcttctccttttgttctccattcacaaggggtggtcaccaaataaagcacaagttggtttttctattatccttttctttgttttgtaatcatcaccaaacccatatttggtgagtatgagaaattattaaatgatcccataccatcatagtctcaatcaatctccacgtgacacataatcgagttttattaactctttcatgcaaagtgaaaagctcaaccatatgtcacatggagattaaccaagaacatggccatattgtcatctcataccatgtaataatttctcagtgattacaaaatatagaggatggggaagtatgtatgacataagaaaccacatgcttatatc

SEQ ID NO: 50926 - DNA, 264 bp, Glycine max
  Clone ID: PAT_MRT3847_16999C.1
ggtcacccacctctttaatatgtgtccagtcctgactgacatttggtgcaatgctttggtgtctatatcaatctgaaagcattgtgattttgtgccttaaggcgaggcattcgtggtcatttcaatccattggcaatgaccaacatgaattaggttagtttgagtccactaccaagggatttgtaaggaaaagatctccaatggtaaagaagacattctgtgtggttacaaagtcatcaatcatgtgaattggtgcaaaagaca

SEQ ID NO: 50927 - DNA, 1216 bp, Glycine max
  unsure (1)..(1216): unsure at all n locations
  Clone ID: PAT_MRT3847_1699C.1
gacccacgcgtccgcatacttcactttcgctttcctctttctctcttcaaatcaaacactcataccccacgcacacgacccaacacaaaaccacacccgattctctctctctctctctctcctagtacaacttgggaacagtttcgattgtctctctctgacaccctacgatttctgcggcagcatcattccacacgcagagtcagtgtcgttcttcttctaattcatcgctcccgatgaaacgagggtaccaggaatccccttcaagctcgttaggtccacctcattccagagctagacatgatcctcaaggtggtgcacactttgttgaggatgaaagcacaaagatttttgctcggaaagtagcagatcattatagtgcgagatccaaccagactttggaagaacgggaggctagtccgataattcatttgaagaaactcaataattggattaaaagcgtcttaattcagctttatgctcgtcgaggagatgcagtacttgacctcgcctgtggcaagggtggtgatcttatcaaatgggacaaggccaaaattggatattatgttggtattgacattgctgaaggctcgatcaaagactgcagaacacgttacaacggtgatgctgatcatcatcaacgacgtaaaaagtttacatttcctgctcgccttatatgtggagattgttatgaggttcgcttggacaaagttcttgcagatgatgctccttttgatctttgtagttgccagtttgcattgcattactcatggtctacagaggtccgcgcccggcaagcattggccaatgtgtcagctttgctacgcccaggaggcattttcattggaactatgcctgatgccaatgtgattatcaagaagcttagagaagctgaaggattaacttttggaaacagtgtctattgggtgcgttttgatgaagaattttctgataagaaatttaaatcttccagcccttttggaataaagtacacgttccatttggaggatgctgttgattgtcctgaatggattgtccccttccacatattcaagtcattagctgaagagtatgactntgagcttgtttttgcgaagaactcgcacgaatttgtacacgagtatatgaaaaaaccagaatttngtggagctcatgcgaagactcggtgcattgggagatgggcaccaagatcanagcacactctcagctgatgaat

SEQ ID NO: 50928 - DNA, 294 bp, Glycine max
  Clone ID: PAT_MRT3847_169C.1
gctgaggagaaccgctatgtggtccggctaagtgaaagcaacctggtcatctgatgggctgtcagaattgacactctgccccgtcctggaaggctcggaaggcttcctgcaggagggagagctgcacgggactgaggaccaagatgcaaaggcctagcagacaaaacagcaaaggccaagtccctggaggtgggaccgtccgccccactgaggaggcagcctgcggtacagcacgtgagcaggagatcaagaacccgccctatccctgcagccccggttacttccatgcagggt

SEQ ID NO: 50929 - DNA, 360 bp, Glycine max
  unsure (1)..(360): unsure at all n locations
  Clone ID: PAT_MRT3847_16C.1
nnnnnnnnnnnnnnnnnnnnnnnnnnnnnnnnnnnnnnnnnncaatggtcaaaatgcacggataatgggattgatttgatcgaatactacttgagtctacctgagtacctgtattctaggtttcattctttacaccagcaaagttgggtttaagaaaaaatgtactgggatcaactcaagtatgtattaacaataatttaaatctatgcagactaaatttacagcaagcttaatatctaattgtactgcctggtcaattatgtgcattatatgacaatattctgtagccataaatttagtctgcatagatttaaattattgttaatacatactgggatcaactcaagctcgagccgaatt

SEQ ID NO: 50930 - DNA, 173 bp, Glycine max
  Clone ID: PAT_MRT3847_17000C.1
ggcaaatttgttgaccgtaggcaatactagagctggcgttgacactctgtgcactcgtcgactctgacgtgggtgtctaatggtggactgagggggctttcctcggaactccagtgtgcgagcgcccctttctaagtttagctcccgtaaggagctcaccattctttatcttc

SEQ ID NO: 50931 - DNA, 172 bp, Glycine max
  unsure (1)..(172): unsure at all n locations
  Clone ID: PAT_MRT3847_17001C.1
aattaaaatatgtagtattaaaaaatacaagttaatgttagttatancttngtnttacaaacgataattaaganaganaacaagaaaacactagtgcctaaggatactcccaactcggttacttgttttctttcnnaattatcgtttgtaaaacaaagttataattaanatt

SEQ ID NO: 50932 - DNA, 299 bp, Glycine max
  Clone ID: PAT_MRT3847_17002C.1
cctaaaaacccaagaaataattaaaaccgacccgggggctaattaaattaacagtcttgggttcaaaaaaaaattgtagggggggggctttaaaacccgggatctcccaaaggagtaggggcttgaccattaaacaaaaatttctcacaactttattccgggattgagaacggttttcttagggaccatatttatgtggcggagctcaagcacaaaagtcatttttttgtttacaatcacatgtctttgttactccagcaacttgatgcggctttgcattttgagcttgatatagaacc

SEQ ID NO: 50933 - DNA, 393 bp, Glycine max
  Clone ID: PAT_MRT3847_17003C.1
ccacgcgttcgtttattcgtttgtttttatttttttggaaaccctgattaccgtgatagaactaagcaaccggggggaacagggaacccccaacccaagccacgacaaccacgcaaacgaacccacaaatacagaaaccgggcccgaggccagagaacaacaaaacaaaccctgggagagctacacggggggcggccccggttgggaaacacaacgcactggcggaggcgaccccggagcaacatctgctctggtgggacatacactcaaatgattgccgcgatgtcaagcaccccctcgccggtacccaccctgcggtaccctaccctggcggcctgcaaaaaacactcttcatagcaggtggggggagaccgaaagggtcctcaccaaccg

SEQ ID NO: 50934 - DNA, 289 bp, Glycine max
  Clone ID: PAT_MRT3847_17004C.1
cccacgcgtccgcattaattaaatggacatttatttcatgtgtgaaaaaaaaaacaaaatgagccatacaaactactcataagagaattcacacatactatatatatataacacatctatatgacaacttctaaacagatctacacaatgttcaaaacacacattccttctcttcttctatcccttctcattatttcactctttgtagctgaaatcatatgcaagtagacaccatcaagctctcaacaaactgcacaacttcaccaacttcagaagaaattcacaaatt

SEQ ID NO: 50935 - DNA, 1071 bp, Glycine max
  Clone ID: PAT_MRT3847_17005C.1
aaaatcaacctctattttaatttatcaaacactgacaaaacgtatttctttttcaaaaaaaataaattggtagatatataatttctatttacaaattcacggttgaaatattcatgcatgctggtgttcagaaatcgggattccatatgtcctcacaaaggaacttgctaggaatcagcaggccacggtctaccttccagacattaggtgcaccaaagcttggttttcatagaaggagccaacatcccaatcctcagttgcagatgaaagtgtcattaaggcaactacaattgatctcatgcttggcctaagttgagggttctcatgtgtacatgctttggcaagctgagacaccttaaataccgagtcaagagggtagttgtcaccaagtgtagggtcaataagttgacgaagatctacttttggatctgacagaccaagaacttcttcaaacaaggcaactagtccttttgattcattctcaggttcgtttgtcctgacaatagcttccttgcctgatatgagttcataaagaacaactccaaaagcatatacatctattttgaaaaacacatgatcatattgtgcatattctggaggcatataaccaaatgtacccacaagacgcgtatgtaatgaagaactaccatattcggtcaattttgtgagaccaaaatctgcaacctttgcacgaaagtttttgtctatcaaaatgtttgctgatttaatatctctatggatgtagacaggaacagtgtgctcatggatgtattccaatcctcttgctgcatcaagggcaatttgaactcgagctgcccatgttaacggatccctccctgagcctcgcaaatgttgacttaaattgccgttctcaatgtactcataaaccaaaaataaggagccctcaacacaatatcctattaacctcaccaagttcaagtgatggacgtgtgtaagaacatttaattctgcaaggaattcatttgattgaaaaataagcacttaataggtaagttgttagttacataactagcataggatcctaggcacaggatgattagttgagctcgt

SEQ ID NO: 50936 - DNA, 1024 bp, Glycine max
  Clone ID: PAT_MRT3847_17006C.1
acggctgcgagaagacgacagaagggggaccacaaccatgtcagcgttcatttcccacaaccttaaacccggcggcatcatggtgtccccttcctgcaaccaccgttcctcattcccttcgcaactttctttgaaagcacccttctctgcttcccatcctttagtcctcacccgaagactcttccttccttcggtttccggcatctgggacgctctcaccggcggcaacaacaacaatgcccgcgaagccgttctcgcaattcgacgcggaatgcttcttttccgccagggtgatgtttcggggtctcttgcggagtttgacaaggcaattcagttggaccctcgtcaaaaggcgtatccttggcaaggggcttatcactttactaccttaatcgatttgaagaggcagctgagcagtttcggttagatgttgcccaaaatccaaatgacactgaagagtccatatggtgctttctgtgtgaagctcaactgtttggagtggatgaagcaaggaagcgatatcttgaggttggcagagacccaaggccagtcatgcgggaagcatataacatgtttaaagatggtggggatccagaaaagcttgtagctgcattctctggtagcagagaaggtgaatatttttatgcttcattatatgctgggctttattacgaatctcagaacggaacagatgctgctaaagttcatatagttgctgcatgccagtctccttatgggcaaaggtctgatgattatatggcctctcttgccaaggttcactgtcgctgtcgaaattgggtcttcaactaaaacttttttcagtgtgtccattgtgcacgacgaagctcattcataagtttctctatacactactcacagcttcttgtgagttactgtgctactggaacggttaaaagaatttatcatattccttttttccttaaccttttcactttgattttgtggtctatatgaatattagtagactggtagaaagtttttaaacatgagatttcttttagcc

SEQ ID NO: 50937 - DNA, 380 bp, Glycine max
  unsure (1)..(380): unsure at all n locations
  Clone ID: PAT_MRT3847_17007C.1
tttttgatcaaaattggaaatgtaacctctggcggacagagaattgccttcaaangggtcacttggacatagggttggatcaattgcaaaattgcatattccacatgtatgacagctgacaggaggaagagcacaaaaatgtgagccatgtgtctaacaaatacatacacaaaatgtaactattctaaaacgattggagtgtctacgtataacctcgcaatgtgccctggaatggcgccactctttcggatgatacaacccatactaacttcacgctttcagagatgggatgctcatccggacttaccatgagaatgcctgcttggaacaatacaagacctttgatgagcgcctcaacagcatccaaatccagatgaatg

SEQ ID NO: 50938 - DNA, 342 bp, Glycine max
  Clone ID: PAT_MRT3847_17008C.1
ggaatacaggatctgactccagaattcaactctaattaaagcattgatttcccctcactaagatggctcaggctttgttgaagctcattctggagttgggtatctttgccattgaagaggtcaaatttaagtcacagtcaccatcagcattttattgtcattttttttgcttgatgcaaaggacaagacataactagctaatagtgaagtttcagtctaattttttagacggcctttaactaatttaaccgttcaaaagtgatgaagttgaaacccgtgggcaaattatggcaatgaaatacttgtcggcgcaatatgctgaaactcagctaggtttgatga

SEQ ID NO: 50939 - DNA, 1205 bp, Glycine max
  Clone ID: PAT_MRT3847_17009C.1
aattcggcaccagggttccggttccggttcgatcccttccatgaatggatttgtggaacaagcattgtccatgtcttctccgaacctctctgagactgtcatgaaagggtttaaaccggactctgtgccggtttatgctgctttggttaaggaatttgctgtttttgataggtggttttcttcaattccgggtccaacacaacccaataggctttttgtgtactcagcaacctctcatggctcaacaagtcatatcaagaggcagttagcgaaagggtatcctcaaaaaacaatctttgattcaatgcatgagaatggcctagactttgggatttactttcagaacataccaacaactctgttctataggaatcttaggaaattgaagtacatatggaagttccatcagtatgatttgaagttcaagagggatgctagagatgggaagcttccacccttgactgtgattgagcctaggtactttgacttgaagggcatacccgcgaacgatgaccacccgtctcatgatgttgcacatgggcaaatgctggttaaggaggtttatgaggctctaagagcaagtcctcagtggaatgaaacacttttcatcattacatatgatgaacatggtggattttttgatcatgtgaagaccccttttgtcaacattcctaatccagatgggaacactggacctgctccctatttcttcaagtttgataggttaggggttcgggtgccaactattatggtctctccttggatcaagaaagggactgtgataagtggcgccaaaggacctgctgaaaactcagaatttgagcactcttcaattcctgcaaccataaagaagatgttcaacctttctgctaactttttgactcacagagatgcatgggctgggacctttgagcatgttgttggggatttaagttcacccagaacagattgcccagtgactttgccaattgtgatacctcactctgaaaaacccaaatcctattctcagccgtgcaaggacgggaggtttctcaaggtctctgtttgaaagaatataaggaaattaaaaaaaaaaaaaaaaaactttagtgtttttgcaacagcacaacgacagcatcctatagaaaccgttgttgttcttggtcatggagaaaccgttctttgaccacatgcctggggtggatgaaagagagcatcaacacatt

SEQ ID NO: 50940 - DNA, 805 bp, Glycine max
  unsure (1)..(805): unsure at all n locations
  Clone ID: PAT_MRT3847_1700C.1
cttctctatctagcattccacagaatcaacagtctactaatgttcaacagtcaatgcagtccatgccacagcagcactcacaagttatcaggcatcagcaacaacagacttctattgtacatcagcaacaaataccagtcactcaacagccaagcttacctgcacaacagcaacaacaacttatggggcatcagccaaatacaacaaacatgcaacatgcacagatgcttgggcaacagaacaatgttggtgatatacagcaaccacagaggatgctctcacaacagagtaatcttacaaacctgcaacagagacaacagttaataaatcagcaaaacaacccagcaaatatacatcaacaattgggaaataatggccctgggttacagcagcaacatttgcttggacatgaatctggcaatgctgacatgcaaacaagtcatcactctgcacacatgttgcaacaaccaaaggttccaatgcagcaacaatcacaacaaagtacatcaaatttgttgttacctcattcacagcagtcacaaccactgggttcacaacagcaattaatgccacagattcacactcagtctgcacagttgcaacagcaattgggtttgccgcagcagctaaatccctcacaaagagatatgcagcanagaattcaagcgtcagggtccttacttcaacaacaaaatgttcttgatcaacagaagcagttgtatcagactcaaaggactcttccagaaacatcagcaacttctctggattctgacacacagactgcacaactaagtggggctgattg

SEQ ID NO: 50941 - DNA, 583 bp, Glycine max
  Clone ID: PAT_MRT3847_17010C.1
aaaaaaaaaatcacttttattttggaaacacatttggggggggggttagccccccttttcccaaaaaaggggacccaaaaccaaaattttgcaaccagaattgccccaaaaaatagccccgaggaacgggggcccccctgtttaaaaaacctaaatataaattttcgggggaaaacccccagccccacaaattaagggtttaaaaagcccccttggggggaaaagtttcactcccacttgaaggaaacggttttttttttaaatccagggcaatgtttttgtagcccccccactcctttgggtaatccacgtccttttttagttcccctggggaataaacaaactgaaatttgttgggagcaaaaccataacatgacagttgccaaaagggctttcgggggattttcaacccaaaaacaaggggggccaaaattaacaggtggagccccggcttcaataaaaaaaccaattttttttaaaggaaaacccccttcgggcccatttatgataaacccatttttttctttttccaacgatgccattgccctaaaaacaggagtggccttcccatttgcaacaaaaa

SEQ ID NO: 50942 - DNA, 521 bp, Glycine max
  Clone ID: PAT_MRT3847_17011C.1
gttgaaactttggatccacaagttaggcagtttagtgatttgtcctcttggatagatgacaatggggagcggttgaaaggaaaaaatatactcatgtattgtactggtggaatcaggtgtgaaatggcatcggcatatattaggtcaaaaggtgctgggtttgagaatgtgtttcagttatttggtggcatacaacggtatttggagcaattcccagatggtgggtttttcaaaggaaaaaattttgtttttgatcaccggatatcagttggaagttcagatgctaatgttattgggacctgtcttatttgtcaatgttcatttgatgattactcttctcgctgccggtgtgcttactgccgaatgcttgttttggtttgtggtagttgccagaatgaatctacacagtacgtttgtgagctatgtcagaaacagggaaaggccgttaggtcaacacaattaattgaaaatggtgaatcaaaaacatcattgccaggtgttgaattccagaatttttcttc

SEQ ID NO: 50943 - DNA, 376 bp, Glycine max
  Clone ID: PAT_MRT3847_17012C.1
cttatcgtttgttctttcttttttttttaatcagcctatggcggcttcaacatacttaactgttgtttaccaaagctcaaagctcgtcatcatcagcaaccagtaggatcatgaaagacctgtcttcgggaacaggcatagcgctgacggatcaacatgaccggtgtaaccgacagtagagccggtggatcattcgggccataccaccgcgacattgagacagagtctataatagagacccgattctgctaacgaagaaccgttggctgacacaaaacgacggatcacatatccagtggctatgggcgagcatcatgtcagatgttactgccggtgtaacatacacgacatgatcatacctggcaccgtgatcttt

SEQ ID NO: 50944 - DNA, 381 bp, Glycine max
  Clone ID: PAT_MRT3847_17013C.1
gttgagtagcatatgtgatttggatccatggcatgttggagatagctccgctatttcttgcgaacttaacctaggtgtttgtggagcgctgtatgacaattttatgcctcaaagcaagtactacatggtatccattatcaatttcaacatggataaaagactattaccaagcttagtcccactatcgtctagctgcatagaggctgcaatatacatgataagtggttgcgttacttatgtgaaaagctcctaatgagacaagacatcatattggatcgctctgacgctgctcttaacgggatcaacccaatctccggatgtagtcaggctagtgtgccactagcagtactggggccaagatgttatgatcgagatttgatc

SEQ ID NO: 50945 - DNA, 614 bp, Glycine max
  unsure (1)..(614): unsure at all n locations
  Clone ID: PAT_MRT3847_17014C.1
ttttgttttttttttttttntggcacctctttttatttttttttttgttgtttttttttttttttttttttttgttttttttttgggcccccccccggattttttttcaacccccaacgtccaaaaattttgggaaaaggggccaaaatttaaaaattccccgcccccgggggcccccccggaaattcggaccgggccctggcggggtcccaaatttcccctttgggggggccttaaaaccttggggcaaacaagggaaaaagcggttcccgggggaaaatgtttatccgccccaaatccacccaaaataccccccggaagcctaaaagggaaaaccggggggccccaaagggggggccaaccccccttaaacggcgggcccccccccccccctttccaaggaggaaacccgtggggcccccctattaaaaaaaccccccccccccccggaggggggcttcctctcttttgcccccccggggggtttttttttttcccccgggggggcgggcccacccccttggttggccccctcatccccccctggggccccttaaaaaaggagtgtgaaaataaagggggggcccacccaccctggggggtgtgcccccccc

SEQ ID NO: 50946 - DNA, 1840 bp, Glycine max
  unsure (1)..(1840): unsure at all n locations
  Clone ID: PAT_MRT3847_17015C.1
acgagcgtccgctgaaattgggtaatcaattaaccccccttcctctgttactgtgcaagggacacagaatttggtattttcaaaatccctttcttcttcttctcccacacaaaatcccttcaatgctgcacttttctacggtccacaattcaattcccatcttctaggtactgtatctccccaatttcttcattctcttcctccattttttttcaattcaacctccaccgctcataattcccttagagaagaaactcacacttcaagattcactttttctgagctcaatctagatttttcagatcttgggttttacctcaaacttatcgtgaatcttgaattccaatgaaataatcttttttttttttattctaggaattctgacgaaccaaatggagatttccgatggaggggaaccccccatcagcacatgtgactatttgagaaaagagggatccgagggaaccccttttcagcacatggaactctctgatcgtgatcgcaattatcaaatccaatcgatgaacgctttggaaattctgacagaaaccgtcaggattcttaggttcaattcgtggggtttcatggcaatcgccacgcgtccgatttgtcctgtttctgctgtgcttttatctaatgtaatagtggatgagtctattgtcaagaatctgtccatcagacttatgttggttgcacagactagtggtctccctctcagaccaatcatcaaacagtcttgtcagcggttcgcggagaccgtggtttcatcggccatgtgctttcctttctatgctacgttgttgttgttgtcaaaggctgcggtcgtctactccgtagattgtacttattcgaggaagaagttcgatgcttccaagttttgtgtgattgttgccaagttttggaggaagatcctgttcacatatatgtggggtgtgtacggntatagtttgctgcattacattgttctgtgttttccttgttgcgttctgcagtgctttggctgttcttgggtttttaccagatgttgttgtgtattgtgcaatgctggttgggctggttttctcggttgtctttgccaatgccataatcatctgcaacattgcgatggtgatctcggtgttggaggatgtttcaggagcgcaggcgatgcttcggtcgagtattttgatcaagggtcagacgcaggtgggtctgctgatatttcttggatcaacaataggaatggcctttgtggagggcttgtttgagcacagagtaaagacactgagctatggtgatggatcttcgagagtgtgggaagggccgctcttggtggtaatgtattcatttgtggtgcttatagattccatgatgagtgcagttttctatttcagttgtagatcttctaacatggagatctcagatgttgaaggcaagtcaattttagaaactatggccatttctgctgaatcaatgggcattcaatgacattgccggcatgatattgactgtatgccgattgaatgaataagatgcagagggacgctgtaagagattgttcccagaaaattgtgttgccattgaggatccttgcaagttgcaacagttcttcttctgagcattgaataggagagctatgtagattgaatgactttggatggcttttaccttgatgagcttgctcatttcagcgtacggaaattgcttcttttagttatattacaaacacggagaaacattaagcgggatagtcaatgtatttgtttttggagtgtcagtggaaaagctaatattttatagacaaatggaagaaattaatttaaattgaaccacatttctattgttcccttgtcttgttctc

SEQ ID NO: 50947 - DNA, 465 bp, Glycine max
  Clone ID: PAT_MRT3847_17016C.1
gaggtcgaaaatgggtgtttggagggacaacgttccgggaatggtgacgtggcatgtttgagtgggagagattacagtttcttgagttacaacaactgttgtctaattttgttattcacggtggtgtaagggactactactgggtctggggcgaagaggtcttcggggatttttaccgtgagtgagttcagcttagtcagctctattacaagatattgttgagtcacaacaggttcttccataggctctagaaagtgaaagcacaaccaaaggcaggttatttgatctggagaatggcactgaatacaatgccaatgatggataacctcaagatcataagcattattgagaatccgattgattgtgtcttccattttttgctcctaagtggaagaatcagttagccattggctttttacgtgtggaatttatgatggttacattctatccattccctattttccg

SEQ ID NO: 50948 - DNA, 483 bp, Glycine max
  Clone ID: PAT_MRT3847_17017C.1
actcaccacttcgctgcccgtcaattcgctcgtctctttggtcatttggttttgttgccttctctacgcttccattcgcacttcttcatacacggcactgggcaaaattggtggggcgatcagtgaaggaaatgccgaaggtcaggacatccctctgagtaaggcgaaagtgaacggtggcggcaaaggaggaggaagagaaaggacattagcaaccgaaggggggggggctggaagacttatggtccatttgagcgaacaatttcatttgttcaggcgaagcttcaatgtccgtcgaggagggcgaccgtgggacgacggggcgcaatgtttacgacaacgaaaagggggaccgtggcctattcctactacgtcttccacttcagttttgcgcttgcttctctctatgtgatgatgaccctacttcgtggtacaccccgagcgatgatttgcgctatttgaacgacaacatggcatctcttt

SEQ ID NO: 50949 - DNA, 386 bp, Glycine max
  Clone ID: PAT_MRT3847_17018C.1
attggaaaaccctttgaaaatcctttttttttttaatggatcattttttttttttggggcggttaaaatttccgaccttttccgttccaattttaatttcctggaccaaacccaacccttaccctttttttttggtttgatcccggattcccccccaggggcgtagttttggggtcgtttggtaaattttttcggtggttaaggttagattttttggggaggtttttggggtttggattcggtgggttgattcccaccaccaccattggggcggggtcccttcccggattggggttgggtggcgggggtttaattccaaacctgggccagaccccgggcctgaaccagaacccgaacttgaaccagaataattacccgttccaggt

SEQ ID NO: 50950 - DNA, 402 bp, Glycine max
  unsure (1)..(402): unsure at all n locations
  Clone ID: PAT_MRT3847_17019C.1
ttaatgatanaggttatctctctcccacagatagagtcatattcattcctcatcgtcacacccaaagggataaaagaaaaaacttaatattccatgggagttgatgatgaacaatatacggaggaggaggaggaggagtttatagacggagtgagaaacaaccctaagcaggctcctccttctctcttccctattagtgggagaaaggggtttagcgctgaaagagtgtacagagatgagtggagtgaatgggcagtgtcaaccctacttgaggcctatgaggccaaatgggtgctaaaaaacagatcccctctcaagggccttgactgggaggacttggccctgctcgtgtcgtcacgtgcccactgcaccaagtcacccaatactttgacgccttgttag

SEQ ID NO: 50951 - DNA, 382 bp, Glycine max
  Clone ID: PAT_MRT3847_1701C.1
atgaaagctggtttccttgtcgaaatacctaacttggagggcattgacaaagactataatattatgttacaacaaaatacaaaaaacatacaagttgtcgcgcgacacctaaaaggctctacaaagcctaacttgatctctttctagactaatcaagagctatttaataaccacttataaataagcccatcatcaatattttttcaggaaaagtgcacctgaggccattcgtcgtacagcttagaagtaccttaaaggctgtgaactggagcgcttcactcatatccgcagtgatcctcatgattattgaatcagattattacagattgacctgtgtgtggcatggctatacccacatatggtacatggcttgatgacgtta

SEQ ID NO: 50952 - DNA, 687 bp, Glycine max
  Clone ID: PAT_MRT3847_17020C.1
gcagtgagagacgaaaccctaggttttagtgagtggcgaaaatggcggtgattttttcaagtgcaataccaggaggggcagcaccagcagcaatcgagcaagtgcagtgcttcgggcggaagaagacggcggtggcagtgacctactgcaagcgcggccgaggcctcattaagatcaacggctgcccgatcgagctggtggagccggagatcctccgcttcaaggccttcgagccaatcctcctcctcggtcgccaccgcttcgccggcgtggacatgcgcatccgcgtgaagggcggcggtcacacctcccagatatacgccatcaggcagagcatagccaaggctctcgtcgcttactaccagaagtacgtcgacgagcagtccaagaaggagatcaaggacatcctcgtcaggtacgaccgcaccctcctcgtcgccgatccccgccgctgcgagcccaagaagttcggtggtcgcggtgctcgcgccaggtttcagaagtcctaccgttgatttcctcctttttttttaagctattcatcataagttgttaaagtactttctctgttttattggttctgcgctgagttaagatcaatcgaattctgaatacagttatataatggttaagtttaagttatgtcgttattaaatataattgcttgaatgctgcttttatcttgtt

SEQ ID NO: 50953 - DNA, 316 bp, Glycine max
  Clone ID: PAT_MRT3847_17021C.1
attgagtggtttttttttggggttgttcttcagcttttgttcccttttttgtgggttaaaaagaacaaaaccccaaccccggggaccggggttttctctccgaaattaatttccccccacaacccggcggttcatattttcaaaaaaaataaagccccgcccctggcctgcctgaggggggaaaattttaacttccccaaaaatagctaaatgtccggggaacaatgaaaaatctgccctgtggggagcaacattcacttgaacaacaatttgatatagggggggtgcataaggaacaactggggggggcctcaaa

SEQ ID NO: 50954 - DNA, 244 bp, Glycine max
  Clone ID: PAT_MRT3847_17022C.1
caagagagagagagttgggtatgaaatcacaactgaactgaaggcccatccgcggtgcttttattgaggacggttgcgtaggataacataacaggacagagattataccatgcttttcattaaaacctcatcaatacgccacactcccttttccaccgctggatgccatccaacgcactggatggaagcaaaacgatgtcggagagagtaattgacagcacgataaccgaggcgggacaggcga

SEQ ID NO: 50955 - DNA, 956 bp, Glycine max
  Clone ID: PAT_MRT3847_17023C.1
cgaaagggaatcgggttaaaattcctgaaccgggacgtggcggctgaggcatccatcggcagttagagacagagagagagagaaacaaaaccctaattggtgagtggcgaaaatggcgcagccggcggcggcagcagcagcaacaggagcagcagtaatcgagcaagtgcagtgcttcgggcggaagaagacagcggtggcagtgacctactgcaagcgtggtcgaggcctcatcaagatcaatggctgcccgatcgagctggtggagccggagatcctccgtttcaaggccttcgagccaatcctcctcctcggccgccaccgcttcgccggcgtggacatgcgcatcagagtcaagggcggcggtcacacctcccagatctacgccatcaggcagagcatagccaaggccctcgttgcttactaccagaagtacgtagacgagcagtccaagaaggagatcaaggacatcctcgtcaggtacgaccgcaccctcctcgtcgccgatccccgccgctgcgagcccaagaagttcggcggtcgcggtgctcgcgccaggttccagaagtcctaccgttgatttccccccttttttcatgttattcttcataacttgttaaagtactttctccctgtcttatttgttttgcgctgagttaagttcaatcggattttgcatacagctatataattatgctttagttaagtttgattgcttctgcttttgtcttaatttttgttattggaattagtttaatgtgtttggtttagtgcttctattgcggtgaagcacttcgtgcttctatacaatgaagcaatctggtgctttgattattgtgacgctgctcagaaccatggtcgtggatgcaacatattaggacaatatttgttgcagtggtcagggttaggttaattcgattcaatctgattacaattttttgctaaaaaaaaaaaaa

SEQ ID NO: 50956 - DNA, 279 bp, Glycine max
  Clone ID: PAT_MRT3847_17024C.1
cggaaaacactgaagggtggcacggttcatattacctggcgctacagaacacccgtcttaaccctcgagtttccattctcaatctgacagtctctccatcgtcggggcggatttccacatcaagttttggcaaatataagcagctgggtcagcgatgaatcttcctgtggtttcctatcttactaaactctcatatcatatctctgcaattaatgtgattcgcatcgcgtcatccggggaattgctaccctctggagctgatagatgtgacttgataat

SEQ ID NO: 50957 - DNA, 467 bp, Glycine max
  Clone ID: PAT_MRT3847_17025C.1
ccacgcgtccgcaagaaccggaagctgcctcaatgggcgttgttgaccccccaaatgagagcatgtccgaagcctgtttcttttatccaccgcggatgaggatctaaacctgaacaatgtcactcagaatactcttgactgaaacgttagtgctgattttgatattaacagctggtcaacccagaataatacggtgtggtggttactttgtatgctgacgatagcattatggcgagctcgtacatacagattcgtatgaggagtgacgtcgcaatcgagaggaaactgcctcattggttattggtgcactgcacacactccccatgatagagtatggaactttgaaggtgatatggtcttatataaatgtaacccaagtatgtccttatttagtcataaatactataaagcgcgtgagctcatttttggcgcatatgcatatactgcggccattgtcatatgaacag

SEQ ID NO: 50958 - DNA, 437 bp, Glycine max
  Clone ID: PAT_MRT3847_17026C.1
acatactcattggacatactctttataataaaacaagggggactactccacaaaaactgttcgtatcctaaaaatatcgagggtgacagttgggccaacgaaaataaaagaggcactatgcatatcaaatgtgcaaaaaatcggcctaaacaaccacttaggatccgcacccactcgcttattaggggcaaaaacacgcgattattttcttgtgagacagtggaactactacgtggaactggagcatgatgactagccaccagacataggagcaatgaatactttaccatctgctaaaatttaaacggctacaaactgcgagcgtcgtcaggagatgacgccagcatgctatggcatttgtgacatctacagacagatctgcttaaattagctcaggttactgcattctccaatttgcgtaaactatgagctgttac

SEQ ID NO: 50959 - DNA, 412 bp, Glycine max
  Clone ID: PAT_MRT3847_17027C.1
accattcattgggaaccaacacgttgattccttttgatccaccaagttaagtttctaaccccaaagataccccatggagaaagggacaagacaatatgactttggccgtgtgcctataaattattttgacagaagccaacgttatacttgaggttggcactcaagaaatgctatagggtaaaaggaacgagttcctattttgaaatgaggcaactggtggactgtctttaggttcaaggctaatcagatctttcatgaactctgatatcaagaacatatagtgcttgattgatcatcaattagaccacgggcgccctttcaatatgaccatgcaaatagcgtgaattagaattcatcctgtacatgcttgaccactaggacttgatttcctggagctcttcccttcgttact

SEQ ID NO: 50960 - DNA, 364 bp, Glycine max
  Clone ID: PAT_MRT3847_17028C.1
gggactttcacacttcgcgccttaggatggaaactcttctgtgcatatactcgacaattgcttgctcactcatatccgatcgttttttacacatgctgctacaagcagtgcactgatatatatagctgcacttcaggagactaccattgtatatttgtacaccctgagactcgtactcatcgagactcctctcatcggacaatcgagcacggacacgaagattggcagcgcaactggaacactctcttatccagaacagcctggacacatactcatataaggattacacttgcgtatgcatgtgtggtctgtacggcattgcaaatgtcatagttcactgtatggcgtactagtatacctgtgt

SEQ ID NO: 50961 - DNA, 569 bp, Glycine max
  Clone ID: PAT_MRT3847_17029C.1
gtcgcatgcacgcgtacgtaagctcggaattcggctcgaggatgccctgtgtgtcatccggaacctcatccgtgataaccgtgttgtgtatggaggaggggcagctgaaatatcctgcgccctggcagtcagccaagaggcagacaagtgccccactctggaacagtacgccatgagagctttcgcagacgccttggaggtcatccccatggccctttcagaaaacagtggcatgaatcccatccagaccatgactgaagtccgagctagacaagtgaaggagtctaaccctgccctggggattgactgtctgcacaagggcagtaatgatatgcagtatcagcatgtcatagaaaccttgattggtaaaaagcagcagatctctcttgccacacagatggttaggatgattctgaagattgatgacatccgtaagcctggagaatctgaagaataaactgtaccattaccactgtgattaaataaagggtgtgtagtactgcgtctgcagttactgctcgtcctctcacagcctgtagatgctggaataaaagcagctgtttggtaaa

SEQ ID NO: 50962 - DNA, 301 bp, Glycine max
  Clone ID: PAT_MRT3847_1702C.1
ttgttttactttttttttttgctttttttcttttttttaaaaaaaaccggggactttttcttttcatgtaaggataaaaaaaaatagggatacatgcctcacaaaaattttggggaaaaggacaaaagaagagtttattcttgggggccacgtttacatttggggcgggcaagcttttattaaaatttacaggtccatggacagatcggaactcaacctaatgggtttgggggataaaagggtgcttggaaaactaaaaaagggattgggaaaaacttccgtgctttaaaaaatcctggat

SEQ ID NO: 50963 - DNA, 258 bp, Glycine max
  Clone ID: PAT_MRT3847_17030C.1
ggggaaaggaggtctcactgagcaccgtcccagcatccggacaccacagcggcccttcgctccacgcagaaaaccacacttctcaaaccttcactcaacacttccttccccaaagccagaagatgcacaaggaggaacatgaggtggctgtgctgggggcacccccagcaccatccttccaaggtccaccgtgatcaacatccacagcgagacctccgtgcccgaccatgtcgtctggtccctgttcaacaccctctt

SEQ ID NO: 50964 - DNA, 283 bp, Glycine max
  unsure (1)..(283): unsure at all n locations
  Clone ID: PAT_MRT3847_17031C.1
cgtacgcccacacntacatatcaacggttcatatatgctatgcatacaagtctctccaccgggtgctagtaaaaattttgaaactcgttcctaccttccacaccttgataatccacaattggcaaaagaagtagaattccttcatatgaagggatggattccttgcttgtaattcaagtaacagcactgtttcatgtaccatgatcacaacaattcaccaccatactacgatggacgctactgcaccatgtggaacctgcctatgtttggttgcactgatgct

SEQ ID NO: 50965 - DNA, 414 bp, Glycine max
  Clone ID: PAT_MRT3847_17032C.1
gaaaaaaaaaaaggggaaaaaaaaaaaaaaaaaaaaaaaaaaaagacagaaagacaaataaaaaaaataaaaaaccgagaaaataatgaatgcaccgatagctgtatgcagaccagcattcggtcttgacagagagatggaaatcagggaggcttaatgaatattggttgtccgctgcgtgaattagatatctttccaccctgaaacactacataccaaccgccgggatgcatagtgagtcctgtttggcctagtgattgagttagctaacttaaattgtttgcagctggctgcctggttgagatacatgcaacaatgcacatgccccctcgctcaatgaatggatcaatccgcgtggggcgccggggtggttttttttttgaccgcgcggacggttttttttttgattagact

SEQ ID NO: 50966 - DNA, 384 bp, Glycine max
  Clone ID: PAT_MRT3847_17033C.1
gtccttgttagtttattgttttgtctttctggaaaaaaaaaacccccttttgggacataggaaggggctttttttaagggaaaaaaattttaccttctatttcacaaagggaaaagggcccttttcaccccaattttggggactttttcggtcctcaaaaagacccgcaaacataggggtaggggggctaaaactcaaaattttttttttaacgccaaaaaaaacaccgaataaagctcctgaaaaagggtcaacttttgtaaaaaaaaaaattttttttcttttccaaggggggggggaaatttttttttttgtgtctggggagcgcttgttaattggaaaattaaaccaagcggggggggggaaaacaccccctcccccccc

SEQ ID NO: 50967 - DNA, 215 bp, Glycine max
  unsure (1)..(215): unsure at all n locations
  Clone ID: PAT_MRT3847_17034C.1
gcgcgggattcggctcgagctnctttgtgtgtgcgtgtccgatcgagccagttgggtgcccatggctacgatcgnacacagcagtctcagtgccaaagtggttctgctcggggacatgggtcctgggggatccaggctcgtgttgcgcttggtcagggcgcaatttctcgaatttcatngatcaacaataggcgcagcgttcttttcacagacgc

SEQ ID NO: 50968 - DNA, 244 bp, Glycine max
  Clone ID: PAT_MRT3847_17035C.1
actcgagcgccagttcaatatcctagtacaccgtattatagaatttacgatgtcctatgatgagatcgtggttcccattactgttgctgggagttgttttcctggcatcagtttctgtctcatttggcattgcgtattgggataagcagaaccccaatcataacaagtgcctccgaagttagcatagcgagaaagactccgacagggaccaagcatgccatgctcgttgcaacctccttagggt

SEQ ID NO: 50969 - DNA, 524 bp, Glycine max
  unsure (1)..(524): unsure at all n locations
  Clone ID: PAT_MRT3847_17036C.1
ccggtccggaattaccgcttcgacccacgcgtccggaagaacttgtttagtttgctcctaaaatatttgtctgaggatgtggtgcanaaatcctttacccttgcttctttattaaagcttatagcatctgcaatcattaatttcttattccttcaaagtggcgatcacactatcattcagctgattttgaagattttgtggcaggcataaaacctgcaatgagatggctttcttcccagcaaatttcatgctccaaactcctcaccatgatgatcatcatcatcaacctccaccatccctcacctcaattctaccaacgtgtgcacctcaagaatatcatgggggagtgacctttctaggaaagaganccatgtcattttcatcagggattgagcatggaaaanaagtcaatgccgaggaaaaattgtctgatgatggatcacaagcacgggagaagaagacgangctcaacatggagcaagtggaaacacttgacaananctntgagttggggaacaagcttg

SEQ ID NO: 50970 - DNA, 271 bp, Glycine max
  Clone ID: PAT_MRT3847_17037C.1
tatattatgcagtatgttctatctgtcctttctgatagtagaagtagcagaaactgtctgcactgagtttcattttttactacgtcagtatgaaaattttgccgaccacgaccacccaggcgggtccagccatggtgttctttaaaattcttgggaagttcctgtcaaaaaaaaaaaacaaaatgactgaccttataaaataaaataaaataatcaaaaactaaaagttaagtattgtataactattttaaaaaaggggcggccgttttaa

SEQ ID NO: 50971 - DNA, 1082 bp, Glycine max
  Clone ID: PAT_MRT3847_17038C.1
tttatttccaacctttgatgaaccatttttctttctcacacctcactcactcatttcatggctcctctcacaaacttgcatggagcagtctccaagaccttaattcccatcacatgccaccttccaaatgcacacaaaagcataacaaagagaggacaagtgattggatttcttggaagcaaaacacaaaaggatgcatcagagtgtcaagttcaggccacaagaagagcagcagcattaggccttgccactgtagtgcttacttggcaattcaatgacaaggtttcattggctaaagataatggtttctggtatgaggatcatcctctccctggaccaactgtcactaacaatattgcaaatgagaaaacgggaacacgttcttttcttaagagggggctttacatagcaaacattggagtgaaaggaagtgtgtttaggataaagaaatatgcctttgatcttctggcaatggcggatttgatagcagaagacacactcaactatgtgaggaagtacctaagactcaagtccacattcatgtactatgattttgacaaggttatctctgccattccagtggatgataagcagcaactaactgatatggctaacaaattgtttgataattttgaaaggcttgaagaagcttcaaggaagaaaagtctacctgaaacaaaatcatgctatcaggaaactgaagttatgcttaaagaggtcatggacaagatggatataatgtacaaatcaatttgacattatcttaatcaagttgtgttattatttctcttataaaaatcaattttacttttttggtatgccatgctgattccaagtccaagagaagggtaccatcaagaatataggaaagtgttatttaataggtgagtttcagcaaaattgcagatgtgtatgatagtgccaattattatattttcaattattgatggatatcaggatatgtaccaccaccctggcgaaaatgtttcatgcctaagaactggcatatccaaatcctctaagaagtaaaaagctgctatgctgacatccctatgcatgcacatgctcaggagtttggacca

SEQ ID NO: 50972 - DNA, 244 bp, Glycine max
  Clone ID: PAT_MRT3847_17039C.1
aaaaagaaaggtatttttcaagggaaatgccgacacgaaattttaaatacacaacatgcccacaaaattaataactaagcaaccactacctaccccctacccctatacatggcaaatttgattcattgattcatggaaaccccttttattacaatgaatgaaaggaaaccagtttttgagagaacagcaaattcgtactttggtaaaatctctaacctagaggggggttccaacaactctaaaa

SEQ ID NO: 50973 - DNA, 400 bp, Glycine max
  Clone ID: PAT_MRT3847_1703C.1
tacggctgcgagaagacgacagaaggggagggaaataagaagaagaagaaggaatctggcgtggaagtaaccaatcgagggtggtaacagaaataacaataaccatttggttaacaaaaacccttaagtggggaaatatttttgtttactgtgttccggcatcagattccgaagcctttgacttgggttcactctggtattctcgcaatgggggttcagattcccaattacactgttttccacatgcctttacttcttccaggttgggtcgaccaccctttgttcttgcccctgcttaatctattggtttcgttggacatctggttacttatggggccaggtcagcggcccccaaatttgactgaaatggatcgaaggtttcttttaaaacacctttttg

SEQ ID NO: 50974 - DNA, 267 bp, Glycine max
  Clone ID: PAT_MRT3847_17040C.1
ttttaaaaacaattttacacttaatcttttccaattctaaattcttcaataactttcctaactcacactatttctccatcaaaatcctttaccttaaacatttccttcccctcaactttatttaacatctcattaaataaatatcaaccattaattttattaatcaccccatcttttttacaatactttattatattatttttccatccatacaaatatttacactttttctttatttttttatttattacaactattttacaaaat

SEQ ID NO: 50975 - DNA, 963 bp, Glycine max
  Clone ID: PAT_MRT3847_17041C.1
gggcgaggatggcgtcaagcagcaggcatacagcaaggcagcactgtgtttggaaatgtgcatcttttcttgggcccaaatgcaataattgttgtcctgttttctaccgttgaggcttctttctatcagctaagctaagcagtccaaagggcacaacacaacagagaaagaaaagagtaagagtatgggaggctcatggtcatggcagctcacatgtgccctcttgctactcttctccgccgtagtcaccgccactgaccacattgtgggtgcgaatcgtggctggaaccctggctttaactacactctttgggccaacaaccacactttctatgttggcgatcttatctcattcaggtaccaaaagaaccaatacaatgtgtttgaggtgaaccaaactgggtatgacaactgcactacagaaggggcagtggggaattggagcagtgggaaggatttcataccccttaacaaggccaagagatattacttcatttgtggcaatggccaatgcttcagtggaatgaaggtttccgttgtggttcatcctcttcctcctcctcccacctctgcagttgctgctcaacattcatcgccaaagtctgcttctcctgtgctcttaaaacgaggatttcgctcactgttggtgtctactgtttcagcttgctttggaattgtttggatttatcacttgtagagcttagtggctcattctttttccccttgttgtttgtatctttcatgtttgtttcggattcttgcctttcaaaagcttgcttgttggtgctgaattgtttctccctgtggctgtgtctaggttcccctttataattcagcctataattgtgttcctgagtcttgttagatgcaaaacaaaggaaatgggaattttcaggacttttgtactgatatatttctgagtaaaatatgcttgtagtcttaaacaatgttaattattacgtc

SEQ ID NO: 50976 - DNA, 164 bp, Glycine max
  Clone ID: PAT_MRT3847_17042C.1
tagggttctaccaccgattgtagccccaacaatcgataaagcaggtctttggtcaaagtgattgaccagcgctttgttcttctgaagatgcttgaaagcttctgcctagagatccgcttggaacggcttgaatgcctctccttactgctaccccgctggacata

SEQ ID NO: 50977 - DNA, 396 bp, Glycine max
  unsure (1)..(396): unsure at all n locations
  Clone ID: PAT_MRT3847_17043C.1
aacttcgaagtctttgatttatgaagtacgggatcatcaaatgtacattaaggttatgatctggaaaaaacaaaagcttaatttctaacacgactgtagtcctgtacctttacaacattttttccaaaaattgccatggctacatttgtatgttctggtttttcttttttttggttggtactatatttttacgtactgcagaaggcaaaaaaacaccataaaatgaagctaatttggattgtaactgcagtgcaaaccaattcctattcgcaactatatgtaatcggacgattcaagcgatatgaatcaaaatgcangacaaaatagttaccagttcaaaccaatggctaaatctagcagagcttctacttggcgtattgtttgttgcttctcctg

SEQ ID NO: 50978 - DNA, 386 bp, Glycine max
  Clone ID: PAT_MRT3847_17044C.1
cccttgcactatcggatcgatactggagataccttagccaaggttgtaatcctgaacggtacaagtgaacaaaacttttgcatgtacagttagcgatcgttggaaattacatatgattacagtccgcggatagagcagtagtctcgtgaacaggatctgccttgtgcgacaagccgcctactactgtccttgtagtggtgctcgctcgagatctttagagcaccctacccttgacctgcttccttttcctggggtcaatagcccgccagatcgcgacggctgggaagccaaaagcggtgattgcggtggcagaaatgagcatgatcctttgggagttgccgtatgcgttctggatgccaattttagtcgggctgccgataggatag

SEQ ID NO: 50979 - DNA, 829 bp, Glycine max
  Clone ID: PAT_MRT3847_17045C.1
gtccggaattcccgcggtcgacccacgcgtccgattggcctgtgataccctatactgatgttcatctggagtttgtaagaagagttaccattgaccatgtggaaacatatacagtgttgttatctggtatttttgatggacctgatgaaggtgttactggtcttcttcacttggcaagtttgaagtttgttacattgaggccagttcttggggctaggctttctgaggaaatttcctccctccggataagggttgaggtattaaagagtgcctttgatgcatgcgagtcgcttcttgatagttctagacaactatggaaaaagagtatggtgaatgtaatgtcttggctacgtccagaaataatgacttcggaagttaggtatgggtttggtacctgtatgaaaatggaagttgatccgcagatagagatggcagatgacacttgcaaggcaaggaaacatgcaaggttcgatcctgcaggtttctgtgaagccattaagccttcaaaatcagagccaatgctcaaagatgacataccagagttacttcctaaattgaggccatatcaacggcgtgcagctttctggatggtagaacgggagaaagcagtggaagaaagtcggggtgaaagagaaaggaatctgtttcattctccattatgtatacctgtggattttctggacaccagttctcaaatcagtcaaatgtttttcaatccattcagtggaagtatttcattgtgcccagagacttcttcaccttatgtatttggaggcattcttgctgatgagatggggtttgggaaaaactgttgaattgcttgcttgcg

SEQ ID NO: 50980 - DNA, 861 bp, Glycine max
  Clone ID: PAT_MRT3847_17046C.1
ggttcaccttagaaaaagccacttgacaccatggcccttcaaggccatatcaacccattgttcaaattagcaaagctgcttcatctgagaggctttctcataaccttcatctgagatgagtaactctacagagagaaagccacatgcactgttgacaccatatccacttcaaggccatatcaacccattgttgagattagcaaagctgcttcatctgagaggctttcacataacctttgtccacactgaatacaacattaaacgcttgctcaactcaaggggtcctaaagcccttgatggccttcaagactttcattttgagaccataccagatagtcttccccccacatatggtgatggtgatgtcactgaagacgcagtgtctcttgctaaatcagtgagagagaagatgctcgtaccctttcgcgatcttcttgctcgtcttcatgattcttccactgctggccttgtacctccagttacttgcttggtttctgattgttggatgctttttactatacaagctgctgaagaactttcacttcctattgctctattttcaccgatcagtgcttgttccttaatgtctattttgcactaccgttctctttttgataagggtctcataccactcaaagataagagttatttgacaaatgggtatttggacacaaaagtggactggataccaggaatgaaaaactttaaactgaaggacctgcctgcctttatatggaccatagatccaaatgacttcatgttaaaatttctcattgaagaaggagataatatgcaaagaagttctgctattattttaaaatacttttgctgaacttgagagtgatgtactgaatgctctca

SEQ ID NO: 50981 - DNA, 192 bp, Glycine max
  Clone ID: PAT_MRT3847_17047C.1
ctctcgctcttgcaataggtcctcttacacattacgtacctaaactctttggttctgacatgtacactggttgaaagatcaagaagggcgccgtgagatgaaagggcaggcgtgccaaagaagactcctgtttcaaggttcgtaaaggcctgtctccaattccgtgtcggaagaggtggccgatatttgtac

SEQ ID NO: 50982 - DNA, 512 bp, Glycine max
  Clone ID: PAT_MRT3847_17048C.1
attctttttttttcaaaggctattgaatagtatgtagaactctgatatttgggatcagctttggaacaatgcgtgctatactaaatgggacacttcttttttgatttatgaacggggacaagaatcgctcagatatgcaagctctccgttgaaatctccaggctcgcactggataacattgcaactgaccttgatgcagaatctggttgtgtatgtagggaacactcatattatggttttggacattctcacatggtatggactttcataatcctagatagctcattaagctttggaccctctaggatgactaaatgccaaaccttgcggatgtccatagcccttatgttattgctacttactgccacaaccactgtctgcatcaaggacaattgcgtggtatgcatgttcactcctggagatttattgaagagcctgcataaccgagcgagaactagccttgaagacctggcctacgagaagggtctcatcttacttggcactcattgtac

SEQ ID NO: 50983 - DNA, 2295 bp, Glycine max
  Clone ID: PAT_MRT3847_17049C.1
ggtacaccacaagaaaaagccacttgacaccatatccacttcaaggccatatcaacctaatgaccaaaatctgagatgagtaactctacagagagaaagccacatgcactgttgacaccattaccacttcaaggccatatcaacccattgttgagattagcaaagctgcttcatctgagaggctttcacataacctttgtccacactgaatacaacattaaacgcttgctcaactcaagggcacacaaaacactacatgaaccttcagcacttccattggggtcctaaagcccttgatggccttcaagacttttattttgagaccataccagatagtcttccccccacatatggtgatggtgatgtcactgaagacgcagtgtctcttgctaaatcagtgagagagaagatgctcgtaccctttcgcgatcttcttgctcgtcttcaggattcttccactgctggccttgtacctccagttacttgcttggtttctgattgttccatgctttttactatacaagctgctgaagaactttcacttcctattgctctattttcaccggtcagtgcttgtgccttaatgtctattttgcactaccgttctctttttgataagggtctcataccactcaaaggtatccatttaatctctccctctctataattaagtatatgtgaaataagtaatcatatataatccataacgatgaatcgatattatatgttaatgcataacaacttatgcgtgtgttggaatattgaccattgattttcccatcacagactaagctttacctaatttatagaaatcaaatccaagaaattctaccgtgaatcacagtatccattaggtaagagcaatcgaatgcttaatatacatcgaaataataattgaaggcatcaaagtccttgttaatgttattttgatgttttcgatcttaatgttatatctagttgttgttaccaatggatacatggtaatgcagaaattgctggtttgtatattacgtatgtgtatgatatatggaacttaattggagcaattgtattttgtaattatgactgcagataagagttatttgacaaatgggtatttggacacaaaagtggactggataccaggaatgaaaaactttaaactgaaggacctgcctacctttatatggaccacagatccaaatgacttcttgttaaaatttctcattgaagaaggagataatatgcaaagaagctctgctattattttaaatacttttgctgaacttgagagtgatgtactgaatgctctcacctctatgttcccttctctttaccccattggccctctcccttcatttttaaaccaaagtccacagaaccacttggcttctctaggttccaatctttggaaggaagatactgagtatcttgaatggcttaaatccaaggaaccaaagtctgttgtttatgtgaactttggtagcatcacagttatgtctccagagcaacttttggagtttgcttggggtttggccaacagcaagagaccctttttgtggatcattaggcctgaccttgtcgtgggtggctcaatgattttatcatctgagtttgtcaatgaaactttagatagaggcctaatagcaagctggtgtccacaagaggaagtgctgaaccacccttcaattggtggattcttgactcattgtggatggaactcaacaattgaaggcatttgtgctggcgtgccaatgctgtgttggccattttttgctgatcagccaataaactgtagacacatttgcaaagaatggggcattgggattgaaattaacaccaatgcgaagagagaggaggtggagaaacaggtcaatgaattgatggagggagagaaaggaaagaagatgaggcaaaaggtcatggagttgaagaagaaggcagaggagggcaccaaactaggtggtctttcacacattaacttggacaaagtgatttgggaagtgctgcttaaaaaaaattagattaaagtgctatttttcccccgccaagaagtactgtgatagttcattgattttcttctcttgaatttgttgctttgttaagcaaaaaatatgtttccgttggaagtggttgttatattttaaacatatataagttatctattgcattgtgtttatgttcatgcaatgatgcagcttatgatatctgtatattggatatctatattgcaaaccaggttgagaccaaaggtatgtaaaaatatacatatactgatctaaacatgcaaatcaatttaaatgacatatttagatc

SEQ ID NO: 50984 - DNA, 276 bp, Glycine max
  Clone ID: PAT_MRT3847_1704C.1
attgccgggtcgccccactccttttttttgctagaagacgacaacagggggggaccgtcattattataacgcaaacttcaacttgttagcaagggagagtgaaaatttcaagcaccaaaaatggtggttatgaaagtggtgagcctaggacgcggtgttgccggtgccaacctttcaaaaactattcaacgtcaagccaaaaggaatggatagatccgaatgaatattttaacataaaacattcgaaaattacgggattggttgagccaactttga

SEQ ID NO: 50985 - DNA, 614 bp, Glycine max
  Clone ID: PAT_MRT3847_17050C.1
agatgaactgtttttcaagaatattatattcattacacatgcgagacatcagacatatgctaacaaatgagatgaaaggaatatctttgtagtgaatgagaccaaacatgctccattaacagggaaggaaagtcattaactgtttgtttcatattcttagaacattcagacatgagaggcactgttaatgaagataccagcataattgtcttacttaaaaagaaaattttcaacaaataaatgtattactattaacgatcaaataaatttttagtcaatcactctactgatatgttaagaacaggagggagagcaggggatcaggactcaggagttcatataggtagcaggggtgctgtgaacactggggatcagggatataacagccggacaaagatctagccgaatctcttccaaagatttattcctcttctgatgtattaccaagaacccgatggcttgtcgtatataattcagctcatgccaggatgtccctgcatactcctctgttgcattgactatccatttctccagttccgctacaccagacttcacatattcaccatttgagaaagtgcaacactcccgacgcaaaagactaaaaattaatatta

SEQ ID NO: 50986 - DNA, 338 bp, Glycine max
  Clone ID: PAT_MRT3847_17051C.1
caattacttgttactcgcgtagagcacgggcagcttaaactgtctccatgctgatcaacgactccttacttaaacaacaacggtgtcagacaaacggtgccggatgttggtgccgccacgctattacgctaatctgatacatcaccctcataaaaacccatcctttctcttaatatataaaccctaattcagaagaaaaaagtcaccttctccagaatttgcgcggtaataggaatattctttagactcatggatgaaagaatatattgtagctgtgaaacttgctgatgatatcactggcatgattttctgtatcgtaattcatttcctgcatttgg

SEQ ID NO: 50987 - DNA, 264 bp, Glycine max
  unsure (1)..(264): unsure at all n locations
  Clone ID: PAT_MRT3847_17052C.1
ctctgctgcttacgtataggactaagcaagttggtatgctacggnngccttggatnngacgccacgcaggccggtcgtgctttctattctagcttttgcggtgcctcnttgaaaagagctctaagagactcgactgtggatgcctgatgcctgtgtgacaagcttgtgaacctggnngtggggtggttctccttaccttcttttgtttgacaaccgatttggatgtgggccgccgagggtgtactcggtggtcacaagtggggg

SEQ ID NO: 50988 - DNA, 246 bp, Glycine max
  Clone ID: PAT_MRT3847_17053C.1
agttaatgaaaaccggactactttcatggcccaagcacccatacatagttgcaaatcatggaaaagataatacgacaaaaacatgaaaaattctacgacttaattactagacaaaagcatacgttggattaaaaatttacatagctatcatactcgtagccgtatcaaggaataattgaatatacagatgaaacaaaaaacaccatcatacgaaattcaatgttaactaatacaattaagacctcg

SEQ ID NO: 50989 - DNA, 251 bp, Glycine max
  Clone ID: PAT_MRT3847_17054C.1
cggaaccctgggacatccatctttttttctaacactacaaaccacatacttgggtacgctgcactcacacttacggcctttagactcttttctttatgcctggcctctcggcctaaggtctgtttcactcatgcctgaccaacctctcagcctcagactttcagaaggtgaccggagatgaaccccgagggtgacaagttgacttgtcctataggtggctatgatctctgtaccagctgaatgctctgcat

SEQ ID NO: 50990 - DNA, 277 bp, Glycine max
  Clone ID: PAT_MRT3847_17055C.1
acggctgcgagaagacgacagaagggtcacattatcaatgttattcgttgcatttaaggaaggaaaaagaacacaagaaaaattgaaaaaccaacatgagaaattgtgtttcaagttcaagataaatgaataagattagtatggtataatatgattgatgcataatcatgatctttaattattattatactcttaaataaattttttatatataaaacaatggatatgtgactctcgactatccaaataagggggaaagtgctcatgaagggtgcta

SEQ ID NO: 50991 - DNA, 227 bp, Glycine max
  unsure (1)..(227): unsure at all n locations
  Clone ID: PAT_MRT3847_17056C.1
gaattcggcacgagagaatattacatacttgccgtttggcatgcttatatgtacagtcaaggtataatagcctaacaggacaattgatcatgcaatttttttgggtactagattcccctaggggctaggacccagggaggaagaataaaaattcaatgtttcatcgttgggtgttgaaccctactgcgaagcaagaactcggaaacttgatcaattttctcnnnnnt

SEQ ID NO: 50992 - DNA, 185 bp, Glycine max
  Clone ID: PAT_MRT3847_17057C.1
ttcaaactgtcagcaagcataaccctagctgctcctgctgtctttgttcgtgtatttcagggggaggtagtctcatgtgaagcacgcactttttctcatagttattggccgaactggatccacagcacaagtgacccaggacagagtgaagttcatggatgatcataaccgatacatcatcagtt

SEQ ID NO: 50993 - DNA, 220 bp, Glycine max
  Clone ID: PAT_MRT3847_17058C.1
cacagttcctaattatctggaacgcgaaattacttaaaagcttcttcttcttggaattcaaggatcttgcactagcactatatttaaacaagccaagtttttgtattggaaccaattttctgattaaaaacttcaagattttaaattgaatatccaaaataaccagtataaatatcctagtattttacttgattgaaaaaaaccccttgaaaaagaagct

SEQ ID NO: 50994 - DNA, 296 bp, Glycine max
  Clone ID: PAT_MRT3847_17059C.1
gtaactactgcgcaaattagggtgctttcattctggacctaagagatcaccaacgtgcctggttgtcctcaggttcccttagtaaacttacggttttttgcttgtcgaggatggggcggggtcaagccctgggaggatgtgctcatactccacatggctacatgctctcgttcaaggatcaattccatgcttgtcctcggcaggatgcagcacattattagcactggaaatgcgagtattacagaaattcgtgactactcaaagactaccagttcactcttgcatattactcgtgg

SEQ ID NO: 50995 - DNA, 330 bp, Glycine max
  unsure (1)..(330): unsure at all n locations
  Clone ID: PAT_MRT3847_1705C.1
acgaggaactagtctcgagtttttttttttttttttttattgttaggccattaacttattaaattaatatatttattgttattaagcaacttgtccattgttgggggaagttacacgtacacttccccatattaaactaaacgttccctgagaaatgctacttcgtgaaagccaagaagttgaacaattgttccacccacttttggnttttccctgtgcagtccaaagaaaagggtgcccttaagttataacccatgtgcaacgtgactcacacacacacacactcttccctttgtatctccacagaagaaaaaaagagaaacaggggca

SEQ ID NO: 50996 - DNA, 1269 bp, Glycine max
  Clone ID: PAT_MRT3847_17060C.1
caataagaatgcaaagaaattaccacctggtccaaaagggttgccaattttgggaagccttcacaagttgggaccaaatcctcatcgtgacctgcacaaactagcccaaaaatatggacctgtcatgcacttacgtttaggttttgtgccgaccatagttgtttcttcacccaaatctgctgaattgttcctcaagacccatgaccttgtctttgctagtagaccacgtttcgtggcggatcaatacatctcttgggggcagaggaacttaggctttgctgaatatggttcttattggcgcaacatgcgcaagatgtgcacattggaattgctaagccaatccaaaattaactccttcagacgcatgagggaagaggagcttgaccttttgatcaagcttgtaagagaggcagccaatgatggagctgctgttgatctcagtgtcaaggttgcaacactcattgcagacatgtcttgtagaatgattttaggaaagaagtacatggaccaggacatgtgtgggagagggttcaaggctgtgattcaagaagcaatgcgtttattagcaactcctaacgtaggagattacattccttacattggtgcaattgaccttcaaggcctaacgaagcgcttcaaggtactttacgaaatcttcgatgacttcttcgagaaagttattgatgagcacatggaatcagagaagggagaagacaagaccaaggattttgtggatgtcatgttgggctttttaggtactgaagaatctgaataccgcattgaacggtccaatatcaaagctatattgctggatatgttggctggttcaatggatacttcagctacagcaattgagtggacactttcagagctactaaaaaatccaagggaaggtgggggaatcggacctggacaagttgaagtatttggagatggttgtaaaggaaagcatgaggctccatccagtggtaccattgctaataccacaccaatccacggaagattgcataagaagttctggccagagagatttgaaggaagcaacatagatgtgagagggcgtgacttcgagctgataccatttgggtctggcagaagggcctgtccaggattgcaattgggcctaataacggttcgtcaaacagtggcccaacttgtgcattgctttgattggaagctgcccaataacatgtttccagatgatttggacatgacagaggcgttcggcctcacaatgcccagggccaatcatctgcatgccattcctac

SEQ ID NO: 50997 - DNA, 447 bp, Glycine max
  unsure (1)..(447): unsure at all n locations
  Clone ID: PAT_MRT3847_17061C.1
ttacaacaaaaccacggtttctcacaaacactagttctgtgtaagcccagttgtttttctccgaaattgctaggatgatttggatagcagcttttttagtttctcttgcttttctgtggttatggataagcaacaagaatgcaaagaaattaccacctggtcccatagggttgccaattttgggaagccttcacaagttgggtgcaaatcctcatcgtggcctgcaccaactagcccaaaaatatggacctatcatgcacttacgcttaggttttgtgcccaccatagttatttcttccccccaagctgctgaactgttcctcaagacccatgaccttgtctttgctagtagaccaccccatgaagctataaagtacattgctttggagcagaggaactngggatttgctgaatatggttcttactggcgcaacatgcgcaagatgt

SEQ ID NO: 50998 - DNA, 685 bp, Glycine max
  unsure (1)..(685): unsure at all n locations
  Clone ID: PAT_MRT3847_17062C.1
actctaattctaatatttttcttttatttccatttttccccatcatttcaaccaaacacaacattaaagataaggaaggaaaaaggtaatttattttctaataaatcttactgaaatcaacctaaacacataccatgaaactgtttcaccaaattatatttggacaacacttaaagtacacaaatactccattaaaactcgttatctgaatgtctacatgttgtacatgcataattttcctttccctaataatccctttaattggaaagccgatacgtaggaatggcatgcagatgattggccctgggcattgtgaggccgaacgcctctgtcatgtccaaatcatctggaaacatgttattgggcagcttccaatcaaagcaatgcacaagttgggccactgtttgacgaaccgttattaggcccaattgcaatcctggacaggcccttctgccagacccaaatggtatcagctcgaagtcacgccctctcacatctatgttgcttccttcaaatctctctggccagaacttctctgcctcaacccatgcacttgggtctctcataattgcccatgcatttattatgacccttgattntttgggtatgaaaaaatctccgactatgcaatcttccgtggattggtgtgggattagcaatggtaccactggatggagcctcatgc

SEQ ID NO: 50999 - DNA, 733 bp, Glycine max
  unsure (1)..(733): unsure at all n locations
  Clone ID: PAT_MRT3847_17063C.1
cggaattcccgggtcgacccacgcgtccgagaacccaattttgatgcataatgcaatttactctccccactggagcttctaatggccttttttgcacatgtctaaatcaaattaatcaattttctatcatccattcctcaatagttgtcacactaatatttccttgtatacaattattttgtatcttggcttttcttgtgtggtcattcatctatcttagtgttctcatttctattactctcacttttttcttgtgttatccctttgaagcccaacagtcactactatatagntatagttggttgtataatagtacaataaaactcccatttgagcttggttagtactttgcaaatttctattacaaataacccccaatgctttttcattgtaaccacctaancttgcatcttgtgtgtgacatcttcattaatttccacantttttttttacttagaaacnttgttgtgtggcatctcctatttttaccttcaaagcatttntccttttgttntcttggtaaaattgcaatgctatacccatcttactcccactaaagcgaaaatccttttattcctaagtatgtctccaagcttaagtttagagttaacaatttttgattttaaaatttgaactatatcatccgcaagtagcatgtattcgaggataatctttttgctgtngtctctggtaacacatnccatatttaattaaataggaccaaagctaccct

SEQ ID NO: 51000 - DNA, 4236 bp, Glycine max
  Clone ID: PAT_MRT3847_17064C.1
tccacttttccatccaacattagcatggtttcaaacttaatctagttctgtgtaaacccggttgtttttctccgaaataggtagaaggataggtatagcatcttttttagtttctctttttgggctgtggttatggataagcaacaagaatgcaaagaaattaccacctggtcccatagggttgccaattatgggaagccttcacaagtggggttcaaatccttaacgtggcctgcaccaactagcccaaaggaaggaacgtcagacactcttaatcttaggtttagtgcccacaaatagcttggatgatttggatagcactttttttagtttcactggctttcctgcggttatggagaagcaataaaaatgcaaagagattaccacctggtccaaaagggttgccaattttgggaagccttcacaagttgggaccaaatcctcatcgtgacctgcacaaactagcccaaaaatatggacctgtcatgcacttacgtttaggttttgtgccgaccatagttgtttcttcacccaaatctgctgaattgttcctcaagacccatgaccttgtctttgctagtagaccacgtttcgtggcggatcaatacatctcttgggggcagaggaacttaggctttgctgaatatggttcttattggcgcaacatgcgcaagatgtgcacattggaattgctaagccaatccaaaattaactccttcagacgcatgagggaagaggagcttgaccttttgatcaagcttgtaagagaggcagccaatgatggagctgctgttgatctcagtgtcaaggttgcaacactcattgcagacatgtcttgtagaatgattttaggaaagaagtacatggaccaggacatgtgtgggagagggttcaaggctgtgattcaagaagcaatgcgtttattagcaactcctaacgtaggagattacattccttacattggtgcaattgaccttcaaggcctaacgaagcgcttcaaggtactttacgaaatcttcgatgacttcttcgagaaagttattgatgagcacatggaatcagagaagggagaagacaagaccaaggattttgtggatgtcatgttgggctttttaggtactgaagaatctgaataccgcattgaacggtccaatatcaaagctatattgctgggtgatgaagaaactccaaatggaattggaaactgtggtgggtatgaagaggaaggtgggggaatcggacctggacaagttgaagtatttggagatggttgtaaaggaaagcatgaggctccatccagtgacccaagtgcatgggttgaggcagagaagttctggccagagagatttgaaggaagcaacatagatgtgagagggcgtgacttcgagctgataccatttggcaagaaaaagggaaagagattaccacctggtccaaaagggttgccaattttgggaaaccttcacaagttggggtcaaatcctcatcgtgatctgcatgaactagcccagaaatatggacctgtcatgtacttgcgcttaggatttgtgccagccataattgtttcttcaccccaagcagctgaactgttcctcaagacccatgatcttgtctttgctggtagaccacctcatgaagctgcaaagtatatggcttgggagcagaagaacttggcttttggtgaatatggttcttactggcgcaacgtgcgcaagatgtgcacattggagttgctaagccaaaccaaaattaactccttcagacccatgagggaagaggaacttgacctattgatcaagaatctaagaggggcatccaatgatggagctgttgttgatctcagtgccaaggttgcaacactcagtgcagacatgtcttgtagaatgattttagggaagaagtacatggaccaggacttggatcagaaggggttcaaggctgtgatgcaagaggtgttgcacttagcagcagctcctaacataggggattacattccttacattggtaaacttgaccttcaagggctaatcaggcgtatgaagacactgcgcagaatctttgatgaattctttgacaaaattattgatgagcatattcaatcagacaagggagaagtcaataaggggaaggattttgtggatgccatgttggacttcgttggtaccgaagaatctgaataccgcattgaacgccccaatatcaaagccatattgctggatatgttagttggttcaatagatacttcagctacagcaattgagtggacaatttcagagctactcaagaatccaagggtgatgaagaaactccaaagggaattggaaactgtggtgggtatgaagaggaaggtgggggaatcagacctggacaagttgaagtatttggagatggttgtaaaggaaggcttgaggctccatccagtggcaccgttactattaccacaccactcgagggaagattgcatggttggagaatatttcatacctaaaaattcaagggtgatagtaaatgcatggacaattatgagagacccaagtgcttgggatgaggcagagaagttctggccagagagatttgagggaagcaacatagatgtgagagggaaagacttccggttcttaccttttggcaacaagaatgcaaagaaattaccacctggtcccatagggttgccaattttgggaagccttcacaagttgggtgcaaatcctcatcgtggcctgcaccaactagcccaaaaatatggacctatcatgcacttacgcttaggttttgtgcccaccatagttatttcttccccccaagctgctgaactgttcctcaagacccatgaccttgtctttgctagtagaccaccccatgaagctataaagtacattgcttgggagcagaggaacttgggatttgctgaatatggttcttactggcgcaacatgcgcaagatgtgcacattggaattgcttagccaaaccaaaattaactccttcagaatcgtgagagaagaagaacttgacctatccatcaagcttctaagagaggcatccaatgatggagctgctgctgttgatatcagtgccaaggttgcaagaatcagtgcagacgtggcttgtagaatggtcttgggaaagaagtacatggaccaggacttggatgagaaggggtttaaggctgtggtgcaagaggtaatgcacttactagcaactcctaacataggtgattacattccttacattggtaaacttgaccttcaagggctaatcaagcgtatgaaggcggttcgcaaaatctttgatgaattctttgacaaaattattgatgagcatattcaatcagacaagggacaagacaataaggtgaaggattttgtggatgtcatgttgggctttgttggtagcgaggaatatgaataccgtattgaacggcccaatatcaaagctatattgctggatatgctgttgggttcaatggatacttcggctacagtaattgagtggacactttcagagctcctaaagaatccacgggtgatgaagaaagtccaaatggagttggaaactgtggtgggtatgcagaggaaggtgaaggaatcagacttggacaagttggagtatttggatatggttataaaggaaaacatgaggctccatccagtggcaccgttactaataccacaccaatcgagggaagattgcatggttggagattttttcataccaagaaaatcaagagtggtaataaatgcatgggcaattatgagagactcaagtgtatggagtgaggcagagaagttctggccagagagatttgaaggaagcaacatagatgtgagagggcatgacttccagtttataccattcgggtctggcagaagggcctgtccaggaatgcaaatgggtctaacaatggttcgactaacagtggcacaacttgtgcattgttttcattggaaactgccgagtgacatgttgccagatcacttggacatgacagaagagttcggcctcactatgccaagggccaatcatctacttgccgttccaacttatcggcttcacactgcaagtgattaggagaaagaaaaaaggtggtagcaacattgtatgttatgtttgctggggtggatttggataagattcacaagaaaataaactacaccttcccttttttttttttttttttctgaaataagctcatttcatttgtgtgtaactaaaatcttgaatacaaggtgatatg

SEQ ID NO: 51001 - DNA, 209 bp, Glycine max
  unsure (1)..(209): unsure at all n locations
  Clone ID: PAT_MRT3847_17065C.1
agaganctagtacaatgctggatacataggaagaagtttttttatacatttataggacagaatgtctcttttggtgatgagaggaaacagtgccgacatggctaggcacgtaatgtgtccatcccctaacagaagggtcagcatcaccttcttcagagtgaggtcagacttcaaccaatgccaatcttcaacttctactacgatgacaa

SEQ ID NO: 51002 - DNA, 682 bp, Glycine max
  unsure (1)..(682): unsure at all n locations
  Clone ID: PAT_MRT3847_17066C.1
accacgcgtacggtcatatcaatggtagtggaacatgcccaaaaatcatacatcatcagacgaccaaaaacgtagcaggagtcgccaactgacatcagcgacgacgaagatctctaatagggggagatccacgaccacggtgaccacggcgccttcgtcacatgaaagcctacgtacgacctcgtacgcatcccccaccctctggagaattcctggaccttgtgtttcgacaacccttccatcaagtacaaacaagctgaatggggcatctccatccaacccatatacactttggccacctgcgaagagttttggagcatttacaataacattcaccacccgagcaagttggatgtggggtctgactttcattgcttcaagcacatgattgagcccaagtgggaggatcctatctgagctaatggtggaaagtggactatgaccttccataggagaaaatgtgataccacatgcatatatacgttgttggcaatgattggagaacagttcgatcacagacatgaaatatgcggagctgttgtgaatgctataagtaggcatgaaaaaactgctatttggactaagaacgctctaaatgaatctgctcaagtgagcattggaaagcagtgtaaggagantctagatcacaatgacacaattgctctatatttcatgaggatgc

SEQ ID NO: 51003 - DNA, 363 bp, Glycine max
  Clone ID: PAT_MRT3847_17067C.1
acaaaccaaactgggggccattccaaaaaaaaaaaaaaaaggcgtggggggtaaggcccaattaaacgaactaggacctacaaggtttaaaaaaggggggaaaataaaacacgaggccttaacgggtaaagggcctaaaccttcgaggttataaccggtcgaggcaaaaataaaaagaggggagaaccgttgcgcgaagacatcttattttgtggagtgggcataggaaaaaattagctttacaaaaggaccagaaccaatttaaccttagggggaaggggggggctaaaaacaaattttttttttcccaccttggaaaaagcgaaagcctgggtgttttttactcgggaaattttccaaacc

SEQ ID NO: 51004 - DNA, 571 bp, Glycine max
  Clone ID: PAT_MRT3847_17068C.1
taaagggtagaaattataacagaatttttgaccagaggacataacagcgcaatctatacatatatgctcttttggaagaaaaagaggattgattgcaacaccttagatagccgcagcagcactgacgatgctctacattggctggagaccagatgccaaaaaattatttttaaaacacgcgagaaattggggtatgagttatttcaaccttattgaaatgtcaacaccgctatgatcgcaaataaatctcttaactgagatgcaatcaaccctaacaaggtacaaggaacagaatatccccagtagcaccatgctccaccacacagggcttattgacgatcgtactaacgcattaaagggctaagaggaagaggatccatattgcataaaaagcagaagtcacatggggagctccatagcgttgtgccgtaccttccacagcaattatgccctataaagtaaaggtcaccgaagagcaatacaccgaaaaatagataccaaaagaatctgactgcgcatgcggcaaatgctaacacggcataaacaattaacccgtatgaaacacctagag

SEQ ID NO: 51005 - DNA, 245 bp, Glycine max
  Clone ID: PAT_MRT3847_17069C.1
gcgcatgctagatctctgttttcaacactttattcctgattatatgctctaacaattaagggatgtgattgcttcctctgctcaggaatagttgaattagaatgttgtctgttattgttggtcaaagttcaaatccaatactagatatgattgattggttctttcttatttgctaacaattttcagattatggcgtggtgttgttcttttttgttactattactaggtatagaggatctgtctga

SEQ ID NO: 51006 - DNA, 393 bp, Glycine max
  Clone ID: PAT_MRT3847_1706C.1
aaggaacgcgacgtgcctagatgtattgccacaaaattgatggaagaatggatgctagatttgagcctatgagaatggagatgctgcgttctgagggtctgtctttcacagacgaggctctgtggaactatcaaataagctgctctgtgccactatgttatactctatgataggtatgaggtcacggatcgttctggtggtggcactggaaggtcttatgtattaattgctagaagctggtgcttaagaagatccatgtcagagcagattgcatattgcaagaatgaatacaaacagcgggattttgtaggggtagaggaccatgtttatcattccggccagtgaaaccagatgatacagtggtagatacttttcttggacatactttgaaaa

SEQ ID NO: 51007 - DNA, 257 bp, Glycine max
  Clone ID: PAT_MRT3847_17070C.1
tttttgtcttaatttaaaagaaatgaacttgaattattgataagaattcaaattacatccagttaacaaaaatttgggtacacattttagaaaaaagggtaaccagagaaagagaagaaggaagcttaaaaaatcaattgggaggcttaaaatcacttatggattcacccatttacggggtgggaaagaaagaacctgggggaattttgaagttttccaatggaaaaaaatggctggcttttgtagaaccctttttt

SEQ ID NO: 51008 - DNA, 327 bp, Glycine max
  Clone ID: PAT_MRT3847_17071C.1
ttggtctgacgcgcaagcacaaagagccgaaagacactccgactacggccctgcggaggccgatagccaagagggagaagctcacaccggcgaagagaaaacaggagccacacgatccacagcctacaaaaaccaatctggaggaaacccccaaggaaaggcaacaggacctaccttgaaacaaaagacctagtgactcgaccacaactagagggacacggcgaggcaaagaacaagagggaaaagaaccataagctggcggaaccaaaaaacatgccacccccaaggaaccaccagacgaaaaaaaccctcccaaggaagcacaag

SEQ ID NO: 51009 - DNA, 199 bp, Glycine max
  unsure (1)..(199): unsure at all n locations
  Clone ID: PAT_MRT3847_17072C.1
attcagtgttcagtttgggttccttcccttctcaacactaacactaacactaacaccattcactttctttcacttaaaccaaactctattactttctcttcttccttttcttctnccctcaccagaatcagaatcagagcctcctcttcctccccaaccgttgaagaagccgctatgagcatcgacaacctccgacgtt

SEQ ID NO: 51010 - DNA, 273 bp, Glycine max
  unsure (1)..(273): unsure at all n locations
  Clone ID: PAT_MRT3847_17073C.1
annccaaannananncnaaacanccaaacaaanaanaccaccaanccngancnanaacnacaancagaacacncnnaccaagcacacaaaaaacaancnanccacagncgacnaancancngcaccnccnaaacaaccaaaacacnngaanacnacacacgannnccaaganaangaaacccaccacacnacaacacaanaccacancagnngngcaaancnanaacacnaaganangnnaacganaacangcancaanancannnnnacacn

SEQ ID NO: 51011 - DNA, 320 bp, Glycine max
  Clone ID: PAT_MRT3847_17074C.1
taagcaaggaacgcgggtcgagtaacaaaaaaacactaaaaattttacgttttttgttcatgaagcaactagtaacattacgactctttgtcagatacttggccttaatagtcaaataaattaacatactatccaaaaataccacaaagaggctactgacaaaagttgagaaagcttatatatggcttatataatggacacaaatgttgaatagaggttaaaggtaaaaacagttgaaatttgaagagcacattgtgagacttaaactactaggtttactatttaggatgcacactctcacaaaaatttttttaccaaca

SEQ ID NO: 51012 - DNA, 500 bp, Glycine max
  Clone ID: PAT_MRT3847_17075C.1
aaacggatgtttaggccgagcatcgccgcctcaatacgggcgacagtgcgccgttcgcgatcccaggactttgccttgtggcgggtctcggtatagccacgcagaaccggcaggttctcgatggcgcgtcgggtgcggatgtcgtcggcgacctcgtcgacttttctggcgagaggcttggtgccggacagaccgaagatgtagtcgatgccgttggtctcgcaccacgccattgcctccggccgggcatagtgcccgtcgccacggaacgtaatttgcgtgttgtgccatcgcgtgcggatatgccgtaccaggcggcgcagatgggcacgcacctcgacgccgcccggcgtcttgccgggccgcagcacgacggccacgggccggctcttatccgtgtcgtagacgtggatcgaccgccatcgaatgagaactagataatgctaatgaaatggaaaagaaaaaaaaaaaggagtgaataaaaaaaaaaaaaaaaaaac

SEQ ID NO: 51013 - DNA, 298 bp, Glycine max
  Clone ID: PAT_MRT3847_17076C.1
agctggtccccctgcaggatccgggccttaacccacgggtcgttccacgcgtctgttgacgcatgggcggacgcgtgagttgaggcggtgacagtcatcacattcagatgcctaatgaacaggctcaggcaacatgaggacgatagcaatatgctggtaggtacccttacgataccgcaggacaatgaggatgcccttgaagtaggacttctactgcagccttggcgtttgacattgtaacttatatatggaaacaatggccaccattgccatgccccaagggctccattcacatatg

SEQ ID NO: 51014 - DNA, 261 bp, Glycine max
  Clone ID: PAT_MRT3847_17077C.1
ttatagtgtcacctaccttccactcactggccgatgtttcacatatatgtgctcggatcgtgactggcgcaatcgtgcacttactgtccttgttacggatgataaaaggcgaaagaaaatggcagctctttgacatgagatgtttaataatgaggcattaaaaccaggcacatcttgttaacgaggcactgttggtttttttcttgtcatttttactttatgaagtgggcatggctctattctatactttagagctttctt

SEQ ID NO: 51015 - DNA, 320 bp, Glycine max
  Clone ID: PAT_MRT3847_17078C.1
gctatcacacaactttctgggacccaaataagaaaaaaatcacacaactacttgaccaatatggctagtattatccttacaaaagttttatctaaacattaatggattatattaaaccactccttacacaagttttgtctaagacttgaaaaattttaaacacaatccttcccattataacatagatatgctgatatgcaccctttgaaatagtggctatgtatgtggtaaaaagtaaaaagaatgatttgtgtgtcacaaaagtcacatttaacattgtaaaatctttattaaatttggttagcctagtctgtcttttt

SEQ ID NO: 51016 - DNA, 208 bp, Glycine max
  Clone ID: PAT_MRT3847_17079C.1
tacggctgcgagaagacgacagaagggcaagcttgtggtggatgatgcttgttcataatgaaatcaaaatatggttgtagcctatgattttgattttcctaaagcaccttaagtctcgttaagtatccaaagaataataaagaagtatcaaatgcgattaataatgtatgaaatgagttttgtatagcctattaaaaaatctttttat

SEQ ID NO: 51017 - DNA, 647 bp, Glycine max
  Clone ID: PAT_MRT3847_1707C.1
cggccgctcagcggcgggcggattctctaactggattcaccattgtttcgtctccgtcgccgcttcagccttcgctgagatctgattcttcccgacaacaaccgaaaacagatcatgcaatacctcttcagagaaggagtgtgatattgccaccaaagacttcaatctgccatacccccaccatcattgatgtgcccaatcgtgcacgcgataaacgtgatgcacagtttctcatccacagactatgcgaccaacacatttgctcggatgccccattactgctctctcaccaacgatgatattgagttcctcaggacatacctctagcttccttcccaaattggcactgccactctcaaaaaatcggcccagaccgcgttaagatcattcgtaggaccacccagggatcgccccagctgaccacctctgtttgacttggagacggtattgttcggtgaccgtgatgcatacgtggagtccacacggacctggtgaagatttcgatcacaatgtgggatgtcctgctgaatacagaccttctttggtcgggggttctctgatggtaaggtgctggcctttatatagtgaatgcctagagattgacattgcatgacgtatagccccttaacatttggaaatagttatgt

SEQ ID NO: 51018 - DNA, 737 bp, Glycine max
  Clone ID: PAT_MRT3847_17080C.1
aagaattgtacttttacacttttatgtttttgctatctgacctcttctttgacctgcaggtgaactcagaagcagaagtgataacagttggggcactagacaacttgcaacaaatggacaaattcagcacaagagcagttacccttgaaggttattatggcacacagcagagcgtgcaagggatgttgaacttaatgggaccaacacgtgatgattattatgggaatcaacagacacttcaggggctgggaccaataagttcgataccaacaagtcacgatggttattatggtacacatcagggcatgcctggtctggcacaactagattttttgcgaactggtttcacatatggcattcgggatgatactaacgtgagagcaacacagttgcatgaggatccatctagacatgcatgagtgtcattatccttcataacaaggctggggaagcgaaagctataagctaattatctggcgttgaaaatggaatacctgcccatttgaggttataatggaaaacctccaaatccagtatttgtaatataatactgttatattaataatataatataggattactgctattaaagtctattataaatattaatagatgttgcaaggctttagcattcaacctcttttggagattgttgtattatatatacttattctttaggctacttgagaaattgtaattatgaaatattagtaatgaagtattcgtattatcatttc

SEQ ID NO: 51019 - DNA, 1493 bp, Glycine max
  Clone ID: PAT_MRT3847_17081C.1
ctaccatccagcgatctgaaagtgtaaattccttctttgacaaatatgttcataagaagacctctgtccaagattttgtcaaacagtatgaagcaatcttgcaagacaggtatgaagaggaagcaaaagcagattctgatacatggaataaagtggcaaccttaaaaactccttctcctttggagaagagtgttgcagggattttcacacatgctgtattcaagaagattcaagctgaggttattggtgcagttgcttgtcatcctaaagctgacaggcatgacgatacaaccattgttcacagggttcatgatatggagacaaataaagacttctttgttgtggtgaatcaagtaaaatctgagttgtcctgtatatgtcggttatttgaatacagaggttatctttgtagacatgcattgattgttcttcaatattctggccagtcagtgttcccctctcaatatattttgaaacggtggacaaaagatgcaaaggtcaggaatataataggagaagaatcagaacacgtgctgactagggtgcaacggtacaatgatttatgtcagcgagcactaaaacttattgaagagggatcattgtctcaagagagttatggtattgcattccatgcgctacatgaagcacacaaaagttgtgtgagtgttaacaattctagcaagagtcctacagaagctggtacatcaggggctcatggtcagctttccactgaagacgatacccaaagtagaaatatgagcaagtcaaacaaaaagaagaatccaaccaaaaagaaaaaggttgcgaactggtttcacatatggcattcgggatgatccaaacgtgagagcaacacagttgcatgaggatccaactagacatgcatgagtgtcactatcccttataacgagggctgcacaaacgagagctataaacggattatctggcgttgagattggaataccacgtgcccgtttgaggttacaatggaaaactaagttcaataccaactagtcacgatggttattatggtacacatcagggcatgccgggtctggcacaactagattttttgcgaactggtttcacatatggcattcgggatgatcctaacgtgagagcaacacagttgcatgaggatccatctagacatgcatgagtgtcattatcctttataacgagggctggggaaacgagagctataagctgattatctggcgttgagaatggaatacctcgtgcccgtttgaggttacaatggaaaacctccaaaatccagtatttgtaatataatactgttatattaataatattatataggattactgcaattaacctctattataaatattaatagatgttgtaaggctttagcgttcaacctcttttggagattgttgtattatatattttattctttaggctacttgagaaattgtaattatgaaatattagtgatgaagtattcgtatgctcatttccattagtgcaat

SEQ ID NO: 51020 - DNA, 449 bp, Glycine max
  unsure (1)..(449): unsure at all n locations
  Clone ID: PAT_MRT3847_17082C.1
aaaaattcctatattttaccccttctaccactctttctacntntactataaaaanttnnctatancanccacatttctatnaacatttattatnncanctaccttnnaaacactctnttattnnntaanttttcatcacttttanncctcaanatttttaattcttantacaacaattattcattatcantcaatntctatttcaattatnttatntatcttattaatnactataatacantntatncaatctaacttttatttctaaaaaaaaaaaaaaaattctcttcctcccactattaatcttctttacccttaaattaattcctaacccntacctncattcttaccatctttccctatantnaatcnaattaaatctttcttaatcattttcattactttttcctttaataaatttttttcttttcacaattccacacaacata

SEQ ID NO: 51021 - DNA, 714 bp, Glycine max
  Clone ID: PAT_MRT3847_17083C.1
cttgtagccatggtgagtgcgaatattataagcacgctcttcattttataataatgttattgtcatttttaatgatgaaaatgataattttcttttttgtgttaagtgtgttcttgtgtattagagtcgtttgaaactaacaacaatgtcatttaatcagagaaattaaaatgtcagtagttctgaaaaaaaaaaaaaaaaaaaaaaaaaaaaaaaaaaaaaaaaaaaaaaaaaaaaaaaaaaaaaaaaaaaaaaaaaaaaaaaaaaaatttaaaaaaaaaaaaaaaagggggcccttaacccccatttttttttccttttaaggggggtaaattgcccccttgggaaaaaaatggccaaaactttttcctggggaaaatttttttcccctcaaaattcccaaaaaaataaaacccgaaaaaaaaaaggtaaaacccggggggccctaagggggggcccccccccatttttttgggggggcccccctgcccctttttaaagggaaaaaccttggggccccattttttttaaaaatccccccacccccggggaaagggggttttgattttggggctttttccctttttttgttaaataaaccggtggcccgggactttggggtgggggaaggggttttcctttttttaagggggggaattcggttttcccaaaaatcgggggataccccagaaaaaaaatttgggccaaaaggcc

SEQ ID NO: 51022 - DNA, 312 bp, Glycine max
  Clone ID: PAT_MRT3847_17084C.1
ggagtgtgagtgaggaccagcgatgacgacggaggatggaggaccaacaactatgaggaccgcaagtgagggccagcgatgacgacgcgagtgagggctttcaaagcagaactcgaacaaggtgagtagctcaacttcagcacaacacagagtcgcgagtaagtgagtagttcagcttcagcacgacgccgttttgaattttcgtaaatccatagacacgtagcagactcgcgagtctacctaaacttgtctgagtctgtgctaaatcggacaagtctactccgattttaattctacttttgatttaactcg

SEQ ID NO: 51023 - DNA, 214 bp, Glycine max
  unsure (1)..(214): unsure at all n locations
  Clone ID: PAT_MRT3847_17085C.1
nagaanangtcgcatgcacgcntacgtaagctcggaattcggctcgagcncnaagtnccggcgatgcnttcttnggcaatttcanagatggangnngncatgnccagnttcttnnaattactgacgaatgggacaaggnacactgnantttggggaaatggngttctngtagatngcaagtatttagacagatgaccatggtggacaaatgcgg

SEQ ID NO: 51024 - DNA, 403 bp, Glycine max
  Clone ID: PAT_MRT3847_17086C.1
tcgtacgaagcaaaccgctcgtaagtgcacaggaggaaaggctcctaggaagcagcttgcaaccaaggctgcacgtaagtctgcgccaactactggtggtgtgaagaagccccaccgttatcggcctgagaccgaagctcttcgtgaaaggaggaggtaccagaggactaccgagcttttgatccggaagctccccttccagaggctggttcgggaaattgctcacgacttcaagactgatctacgatgccagagccgcgccgtgcttgcattgcaagaagctgctgaggcataccttgtggggctctgtgacgacactaacctgtgtgccgtgaacgccaagcgggtgaccattatgcccaaggatagcgagctggcaagagagattccgggtgagcgtgct

SEQ ID NO: 51025 - DNA, 189 bp, Glycine max
  Clone ID: PAT_MRT3847_17087C.1
ggggtcgtatcgtatagcactttcgtggcttccaataaaacagaccagtgacctaactaacctgaatctgtgaatcgctagcgatacttcatctatcccatggccatgggtaacaaacgaaggcggaggaccttcaacctagagccgatcagatcagtacatgccacattgacagagccactatactgt

SEQ ID NO: 51026 - DNA, 534 bp, Glycine max
  Clone ID: PAT_MRT3847_17088C.1
taaggtcggaatttttttctagctttatatttagttattgacatcaacaaattcatggaggaagttaatgtggttgaaaccaagaggggaactgtttcagtagcttctgcgtttgctggccataaggaagctatacagcaaagggaccacaaatttttaagaattgctgttgaagaagcgtataaaggggtagactgtgaagatgggggtccctttggtgctattatagtttgtaatgatgaaattgttgctagatgtcacaacatggttctgaggaacacagaccccactgctcatgcagaagtcactgtaataagagagggtttgacaaggcaaatatattatgcatatggtatcaattcaggacatacttcagggtattagaatcaattggagttttaatatctagtctttcgtgaaaagtttacttcacaacaaccacaaattattaatttcttgccttactcttctgagctatgggttttggcccactttataacacttttaaattccttaaaacacaaccgattttac

SEQ ID NO: 51027 - DNA, 202 bp, Glycine max
  unsure (1)..(202): unsure at all n locations
  Clone ID: PAT_MRT3847_17089C.1
tcctagggtttttccttcaaccgtgggaaacggctcccaaaccgcctagtacaggtctgattanaagactgaacagagcctcacaacgtcaccaacaaggaattgcccccacgcccctcaaatcgtaaggggaaaacaaccattagggtgcactttgtaaatatcctcataagacaggctgcaaaaaatgcaccctatgaaa

SEQ ID NO: 51028 - DNA, 998 bp, Glycine max
  unsure (1)..(998): unsure at all n locations
  Clone ID: PAT_MRT3847_1708C.1
atcccaatataggaagagaaacaccccaacaaagcgcccaagtgatcacgaaaaataccgccactccccgaatgaccaggtgagcccctagttagtccatcagtattgcatttgatggttccatgccacggaggacccaatcaacccgcttgatgagggaaggcttaggaggatggacattcacagcaaaggacttcaatagggtgaattccagaatagagtgtcccaagtggcccttagagagcgttccaacaagagaggtagttgcagaaatagagagagtagcactatgcaaattaatatgcttgttatgaaaatttacctccaaaggtattgataatgagagcaagaatgacatggtgggcttggcctctccactttctgtttagaacattaaggaccgttcggcaccaggagaaatctacagggcagtacaacttctgttgcagccttgaaacaaagtcacagttaagaaagaggtgagttgagctttcctcacacttttcacaacccaggacgcttaagcttatcatcagttggcatcttatgagaagaagcctccaaagtaagaaagactttgagggatcagattttttttgcccaatgaacatccccaagagggcttcagatggggaagtcaagttgatactcgtgacatatactaatgtttttaggagtctgattattctttttaattaattatgattttattatttttttagttattttaataattaatttataatttaataaattatctccccagcttttaaaaaaaaaaaaaaaaaaaaaaaaaaaaaaaaaaaaaaaactcgagggggggcccggtacccaattcgccctatagtgagtcgtattacgcgcgctcactggccgtcgttntacaacgtcgtgactgggaaaaccctggcgttacccaacttaatcgccttgcagcacatccccctttcgccagctggcgtaatagcgaagaggcccgcaccgatcgcccttcccac

SEQ ID NO: 51029 - DNA, 347 bp, Glycine max
  Clone ID: PAT_MRT3847_17091C.1
cccacgcgtccgcccacgcgtccgttttttttttcacagtagccaaaattaataaataaatagaagaactaaaattcaaactcgtcatctggacgtcgccgagagacgggacacgtttccggttctaaatacagcccagttccgtgttgtttccgtggatgatggttggcaaccagcaagacagaagaagatggcgtacacgcgccacggcaggaatggctggttacatgccaaggattcaacgagactcgagggggaccgtgaagaccgacgtgagtataatgcggggtcagggaaggcagcacttagcagaggttcagggcacatcgtacaagctggatgatgaa

SEQ ID NO: 51030 - DNA, 606 bp, Glycine max
  unsure (1)..(606): unsure at all n locations
  Clone ID: PAT_MRT3847_17092C.1
tacggctgcgagaagacgacagaagggtacggctgcgagaagacgacagaagggatcactttcaataaagaacgataatcggcatcaggatgcaaatcagtactatatatgcagcgtacatatttacaacgctatggtggttaaggatagggatatattgttgatcaacaaattaacgtgagttgtgaagtataataattattaggaaataatcgatttagaactttaactgtgagtgtgataaatgatttaatgagagcaatgaaagtgattgacacaggagtattaattagtggggctgcagaatgctaaatatatgcttgagaatatagcgacgcatcaaaagaattgctcattggaatttagaaagttgcaattaaccacactactctaacaataacctttacatgcaattgtttacaaatatatcagtggccggcgagcaaataaaggaagtttatttgatttacatattgtttgttatatttgcccgtgacttctcatcaaaggttggcatggctgatattattcttattctgaataaataagtgatagtattagtactatgatttcttcaaaaannnnnnnnnnnnnnnnnnnnnnnna

SEQ ID NO: 51031 - DNA, 285 bp, Glycine max
  unsure (1)..(285): unsure at all n locations
  Clone ID: PAT_MRT3847_17093C.1
tttttcttttttaatttttnnnggatatttaagaggggggtttcttaaattggaacttttttccacacatgctttatggatatctaacctaaaccgtttatttttacatcttttcagcgcccaaaaaaggggggccccaacaaaaaaaatagggggggggccccaaatacaaaaagcccccccctggattttacaaggcaaaaacacaggcgagttaccaaatccccccccaaaaaaaaaaaggcagcggcaccccacgcccaaaggagaaaaacaaaacccttt

SEQ ID NO: 51032 - DNA, 571 bp, Glycine max
  unsure (1)..(571): unsure at all n locations
  Clone ID: PAT_MRT3847_17094C.1
ctgccgcaggtcccggggggacgccacgcctngccacgaccttcagtggtgcacggttgcactactcaagagggagtttnatgaaggagctgccanatacagatgagggggtggctgaatggggtgcagatatatttgtgggcaagggggctttnttagacaaacactatgggtgaggggacttttantgagcaagagctgcgggagactgggccagcaataaagtgtcttctggganttatatcttgggcgtgtcntggtntgncggggtctntgaaaggcctgcgatgggcttcnttactctcttcctgggggggggtggcgttttcagcttttgngttnngagtggttactgcgcttatgcgaattctgagtcaattctcacaggcagagcgtgcaaacccggccaaaagcgtgcctgcgaagtcaaaaaacaaggggtgttnagttattgtgggaacttaaaggtgcgtttatgtgtgaggagtgagtcatgtgatactcattattttgcgttcaacatcttatcatgaggtgcgtctattctatatatgggctattatgaatgcgt

SEQ ID NO: 51033 - DNA, 1024 bp, Glycine max
  unsure (1)..(1024): unsure at all n locations
  Clone ID: PAT_MRT3847_17095C.1
cttgtttgtcatattgctcagcacttttatatatgaagggctaccagtctttgcaagtatatcgagtagctcatgctttgtggggccagggacgcaaagttttggcctcagctttgcaaagtcgagttagtgaggtagtgtttgcacttggtaaaaaaaatggagaaatatttcgtaagggtattatttttgttgctgatgatccaaccctttattttctctactgcaggtttttggagttgatatacatccagggtgtaacttttggcggcacgggtaaggaaacaggtgatcggcatcccaaaatttctgaaggtgttctaattggagcacatgcaactatacttgggaatataacaattggtgaatgtgtgatgatagctgctggctcccttgtgttacaagaggttcctcctcacagcattgtggctggtgtaccagcaaaggttattggaagagtacatgagcattatccatccttaaccatgcagcaagatgaaaataagcatctatcggaggagtttttctatagcaaagatgaaaccacagaaaattactacataaattgaggtgctgaaaaaaaatagaggcaagtgaagagaattgcaaatagaaatcccgggttgaagtaccttagatttttcactgaaaatttcaagcttcaacaagagcttggtacattgagaattttggagcacaatctcagtcatggaaagtattattcttagcannngagtctctcaacaggggatttctcagcctttgcattctaaaaggatacataaccctataaataaaatttcagcaaagaaaaggtgtttgaagtttgaactctcaaactcaaatagtaggagttgagtacaataagtagaaataagtaggcccacttaagcccaaaaccagagaacaattgatagataaaatgatcgaatgatgaagctcaaaagatgtcatgtagatgtttcatcagttgtaaatttgtaatatacctcnnnnagtatttgtatcaaatgcaaaaacaaga

SEQ ID NO: 51034 - DNA, 302 bp, Glycine max
  unsure (1)..(302): unsure at all n locations
  Clone ID: PAT_MRT3847_17096C.1
ttttggtttttttctttcttttcttttttggtccttttatcatactatatttataataataattaatttgccaaatctattgctctttggctttccatattctttagaatgaccgtttaacatttgtaatcattggggattttattatataattaatatttcccgaacccaaataagaaaggaaaaaagaaggaaaaataattgaggccaagtctacgccaaacaagatcgcggactggggngtgttcttcccatccaaccaaagcaattcctnccgttctctttttttacggggggtcccc

SEQ ID NO: 51035 - DNA, 1914 bp, Glycine max
  Clone ID: PAT_MRT3847_17097C.1
tgaaaagatataaccttacagcttactgcaaataatttcctttgtgttctttatactgaactagttgttggctttgctatcaccataatgcctgtgacattgttatcttacaaggtgccttccagtgtttgtacaaaacttttttttattttatttttggataaataaataaacttctgttagattttctgtcaaaggtccactgacaacattacagtactttattttgtatcccttagtgtagcatccggaatattccagcttatacagtctcttccattggtctctgatgctgaaattctctgtgggacagaagattcacgcttatggtgttctatccactttgaactttgtagaagtcctcataagtcataaatatgaaatttttttcttgaaaatggaagaaattctctttccagtcattgtgaaagtgataaaatcatttcaagccttaatatcagtatcagttaaggaatacaactgttttccctttgctgccttcttggtgtgtcaatgtgtgtttgtgtcgtgtcagtcagtctgcctgcctgccctatgtgcatgtatttactggcatagaaccataaccccttgttacgagaagacgacagaaggggaggatgagtttgataactccaatgatacggtgagtttttcccaaccgttaattccaaatcaatggtgcatatttatttccattggagaaaaatgttattgaagcaggtgggtgttatttccgtggtctaaagcaaagtgaattagacttagattctgattctgggattggatggagctaggcctcatggataagaatccaacgaagctggaacactttgatgacatgtggaggctcgaatccactgccacactattatctcacttgaagggggatgatggtcgacatgtcttgacattggatcgtacaatattctatccgcaaggtggtggtcaacctgcggatactggctttgtactcattcatggctttgataacaacaaatttctggtttctgatgttcggtccaaagatggaattgtttttcactatggtttctttgagaacctgggcggggaatttgagcctacactcgagaaagggaaggaggtttcactctttgttgatcagcccaggcgaaaactcaactccagattgcattcagcaggacatttgcttgatatttgtttgccaagaataggattgggaaatttagagcctagcaaagcctaccattttcctgatgggccttgggttgaatacaaaggtacaatttcacaaaatgaaatgcagagtaagcaaaaggatttagagctggaggccaatgcattaatttccatgggaggaaaagtttctgttgatatattaccatatgatgaagctgctaagctttgtggtgggtgtcttcctgattatgttcccaaggaaagcacacctcgcattgtgaggataagagataatcctggctgcccctgtggtggtactcacgttgctgacatttcagacatcaaacaaattaaggtttctcaaattcgctcaaagaaggggctgacaaaagtctattactatgttgaatcctagttatatgtggctgagtctggtgccatgaaactgctatttgagctccatactgatgactactcttaaataaacatcacaagaaactagctgaatcagtattttgtatataggtctcagttggataaatttctctataaatacttacagaagaagataagaatataaaataaattgagtttctcttctgagttctgagtttttactgtttgaaaaaagttttatgattcatttaagttgtttttctcctacaagaaaagtttaattcattttaccaccttttttgtttcactttttatggaaaaatttatcaaaacaattagacaattctattcaaaaaa

SEQ ID NO: 51036 - DNA, 223 bp, Glycine max
  unsure (1)..(223): unsure at all n locations
  Clone ID: PAT_MRT3847_17098C.1
cttcaatttcccgtttcgtctccacgtctntctctctctctctctcttcgctttgaagagggttcaagtcttctcttccgctgcttccacatctcgcagcagccatttggatcctactcaagctcctgctcactcttcactcttccactctccatccacgaattcaattcgccgggtgcagatccgattcttcgattttcacttcctcgattcaagccactat

SEQ ID NO: 51037 - DNA, 235 bp, Glycine max
  unsure (1)..(235): unsure at all n locations
  Clone ID: PAT_MRT3847_17099C.1
gatccatacgcccagaanccgagaccaacccgggccccgaaggccaggggaaacccccggccaccccagacaccagaaagggcgncagccacagccacagccaagcccaagcncgacaaccagggcgaccaaaccgggggcaaaaccagcacaaacacgcgccacaagaacgacaaacccgacaacacccaacaggccacaaccgggaccgaccccccaacaaaaaccacgcacc

SEQ ID NO: 51038 - DNA, 855 bp, Glycine max
  Clone ID: PAT_MRT3847_1709C.1
gcaccagcgtcggtgacttgttcgcctcacactaaacaaaaacaaaaaaggaaaaggccaaaaacactcaaatccaaatttcccaccaagaaaacaaaccgttcccaagaaaaagtcctattgatccatgatcatgcatgttatctttgatttgattggaaatgatttgcaaaatcaagtcatgacatatctatggttcagaattaggataaaatacttacctgtgtgagattgatacactttgagtgattttctcctatctttgttggacccagtgtttcctctaaatggtcgtttagaaacgaaatgctaacatccaaaatctcatttacggttatgagaagatttcatcagcatactctccttccccgatagacactttgtttttcatccaaaagcatatgttgctctgatcagttggaagttttgtctctttactaaagcatgttcgcattttggtgaagaaaacaccgagactatttttagtctcacagttatcaagaactacgtaggtctgagttcctcatcacaaattgaggatacgtaggagcaaaagccctgcttttgtcaaccaccccaccttctattaccgtgtcccaagagaccggtggcatgcggagccacatgaccgtgggatccccagattcatgtttcttttatgtttcatcctttatcatttacatgacttgagggactaacatttgttttttgatgtcgcgattgtcatttgttttgtgcatatattttgtttggactattgcgttagtgcttacttcgttgttgtcaatagtgtttgttgaaattccggaaccgtgtagagtttttcatttaggaacgtcgtcctaaaatactcgt

SEQ ID NO: 51039 - DNA, 278 bp, Glycine max
  Clone ID: PAT_MRT3847_170C.1
acagtctaaagagtgggtatcagaagaattttaccatttacgctcataggaatactaaaccaaacccaatcagaccaaactccaaagcccattgtgtttacaagtctgcctcttttgtgtgatagcaagtcagtcctttaaagcagaaccccatttactaaccctacatcccaagtaagcaggcctgtatcagaaccaaacagctgtcctcttacatcagaaaatctaagtgatctgaaagacaattcatcacaagtgtttccaattttcttctgaga

SEQ ID NO: 51040 - DNA, 415 bp, Glycine max
  Clone ID: PAT_MRT3847_17100C.1
ccaagatatacaagaaggtcacgatgggaatcaagcctgaggccttgagcaaagtcacagatcctgaggtgaaggaattcattgagaagtgcatagcacagccaagggcaagaccttcagccacagatctccttaaggatcctttcttttatgaactcaacaatgatgaagaatcaacgccaatcaattgaataacttcattcacacgtattcagagttcattgtttgacccttttgtccaactactttttacttccaagtatattcgtatcacaaaggccacacaactaactgttggtcagtacttgcatttccactccattttcactacaagtgatgtacataacttctgtagtggactgaactatagatgacactctttggagaaaatgccaaatccactagtagattttcc

SEQ ID NO: 51041 - DNA, 125 bp, Glycine max
  Clone ID: PAT_MRT3847_17101C.1
gttttcatcttgattcaccaggttaaaaacaaactagataaattgctatactttaaccctttatgcataaaatgttaaagtatagcaatttatctagtttgttttcatcttgattcaccaggtta

SEQ ID NO: 51042 - DNA, 448 bp, Glycine max
  Clone ID: PAT_MRT3847_17102C.1
tgctgatgatgcacctagaactattcctcagcagggttcttctgaacaagtaaatgctgtgcccagtcgtccttctggtcgtattgttggcattataaagagaaactggcattcgtattgtggatctttggagccaatgcctatgcctgcagggagtggtggtattgcccatgccttgtttgtctccaaagatcgcagaattcccaagattcgaatccaaacccgtcaagttgagaaccttttggataagaggattattgtggatgttgattcttgggattgtcagtctcgatatccatcaggccattgtgtgcgaactataggggagataggtgatagagatactgaaagcgaggtatggaatattggattttgtacgatttctctctttgtatcaatagtgggaaaaattagtataatcatcagtcactagagcaagtcattagga

SEQ ID NO: 51043 - DNA, 475 bp, Glycine max
  Clone ID: PAT_MRT3847_17103C.1
attttatacatacactaacaactactgctcttgcttcttctgcatcatcatgtctgaaacagttcctcccctcagaagagcgaaaatcgctcgctacttcaaacaaatgcctctcacagacgaccaagaacacatcctcgcgttaagtggcctctggaaaatcgccataactaaccccaatgatccagagtttccttcccttggtatcttcagatgcatggccaaactgattcaaaaaggagtgaatcacaaagattggcttcttaggggtcagaacatgtatatcccttattatgcagcgcatatcattggttcttacaccatgaacaaagccaagttcgctgataaagctgttaagttcaacgttggacaagaaatcatgcaaactctcttacaggattaccacaaagtcaagtttggtgagctgaagttgaagagtgaaaaaaccaagagagcattagaagagttatgggac

SEQ ID NO: 51044 - DNA, 408 bp, Glycine max
  unsure (1)..(408): unsure at all n locations
  Clone ID: PAT_MRT3847_17104C.1
ggtgcggtttttttttttttttttttttttttttttttnggccccccttttatcctaaatattgccaaaatctgctaatccaatatctttctatatctatccccccacaaacatagtttttttttgggaatttttaaaacctttggtcttatcctacctgggggggggaaacattctttgaatcctccgtttttttatcccatttttggagggggggaattttcaattcacaatcccaaataaaacggaaaagccttgttttttaatccctttcgaaatttacaggagaaccggggcaattttagatttacaaaattacctattttaaataatattaagggataagggtagttcaaatataaccagttcatattagaaatcctttcacataaacgggggttccttcta

SEQ ID NO: 51045 - DNA, 753 bp, Glycine max
  Clone ID: PAT_MRT3847_17105C.1
caaacttatacatttctccagataaaagttcagctgcctctgcttcagtgcttctaatcagttctagtgaggaactaggtgtacctattaccatccatcagactatcttgcctcttgttcactgctttgggaaaggactatgttcggatggcattgatgtgctggtggcatttttggggaattgtttatcgtcaaacagatggtacctttactgaaaaatgttgtccgttccttcattgatgtgtcatgcatgaataagcctgatcctgtccagagttggagtgctttagcactaattgtttatcgtcaaacagatgatggccttgtagctttcttgacagaagaggtcattgtaaaagagcttcttgaagacctaagttgcatacacattggggttcttatgcagaaacatatggaaattgcagtgcttcaggttcttcaaattatccattggtggctgcttctactctttttggaatttgtcagcggattggagcagatttgacagcattgcatattcttccaaaacttaaagaactatttgatgagcttgctttctcccaggaaatttctaaaggttcaactactgttggcagaaacttgaaggttggcaaaataaaaattggaggggacttgcatattgaaagtcgtatggatctagtgttggttctctatccttcctttgcatctcttcttgggatagagaaacttctcagtgtgtgctacatgttgattcttgacaatatcttctac

SEQ ID NO: 51046 - DNA, 281 bp, Glycine max
  Clone ID: PAT_MRT3847_17106C.1
caaagtgaaattatatctcaaccatatcctgaagcaaagaatataatggtgaccggagaaaaacaaagatgttgaaatatccatgtgacaagataattaccaaaacgaacgttttaaaaataaattaaacgcctcattggcacggtcttcaacatacaaatccattcttcagggaagcacatactaactttgtgccaaaactaaaaaacacgattcgcatctgaaaacactataacgcttaacctaataaacgtcaatagactatactttgacaaaaccat

SEQ ID NO: 51047 - DNA, 671 bp, Glycine max
  Clone ID: PAT_MRT3847_17107C.1
ttcacgcgtccgaacgaactctattatttcaccatcatgtcgaatcaacccattgacccctatcaatacctccaaatcttccgcaaccccgacggcaccttcactcgcctaaacgacgccgttccatgcaccccaccctcttccgaccccactctctccgttctcaccaaagacataaccatcaaccaacaaaacaacacctggctccgtctattcctaccccgaacagcactatcctcaaattccaatcccaagaagctacctctcatcgttttctttcacggtagcggcttcgtgcgactcagcgcggcttccacaatgttccacgatttttgcgtcgaaatggcgaacaccgcggaggccttcgtggcctccgttgactaccgcctcgcaccggagcaccggcttccggcggcgtacgacgatgccgtggaggcgctgcggtggatcgcgtgcagcgaagaggagtggttgacgcaatatgcggattatagtaagtgttatcttatggggaatagtgctggggccactattgcttaccacacaggtctacgtgtgtgtgaagtggcgaatgatctcgagccactgaagatccaggcttgatattgcgtcaaccattctttggtggaactaaaagaaacgagtcagagttaaggcttgagaataacccg

SEQ ID NO: 51048 - DNA, 178 bp, Glycine max
  Clone ID: PAT_MRT3847_17108C.1
ttggaagcagggcctaatgacccccgttggtttggtggtattggtggagatcctgcttttcctggaggattgccgtaagttgtttacatctcctttttattatttccgagtgatcagtgtgggggaaggcagtgcaacctacaaagcatgccttaggtgctaaggcgggggaagggaa

SEQ ID NO: 51049 - DNA, 305 bp, Glycine max
  Clone ID: PAT_MRT3847_17109C.1
tttttttttgtgtggttttttaataatttttcgcttttttaaaaaccctaatttaaaaaaaaaaaaaaaataaatacacccccgaaaaaaaaggcccatctatcccgattcaaaaacaaaaaggcaataactaaaaaaaaaaacccgagcccctaaatactctgaagccttggttgctccaacaaaaccattgcctcaggcggtgcaaaaccacaaaaaaatatttttttttggcttataaaatcacaactcaataaaccccctttaaatttcaaattctagaatggtgaaaatgggttcacatc

SEQ ID NO: 51050 - DNA, 237 bp, Glycine max
  Clone ID: PAT_MRT3847_1710C.1
aaaccaaaaaaatgggacattttccccactaataataataataatgtaaggattattttttgttggattataataaggccactgaaactgggcctgtttttacagccttattgtttttggaatttggatgggcctttgatggcctaacacccttttgggaaaaaagcttccaacttttttcctttgcctaataaatctttatttgctcctgtctgcactttttgctacaaaatggtg

SEQ ID NO: 51051 - DNA, 263 bp, Glycine max
  Clone ID: PAT_MRT3847_17110C.1
cgctgaaactcgcgaaacaaaaagttttatctggtaacgcgaatgattagaggacttgggaaacacactttctcgacctattctcaaactttaaatggctaagattgcgttctcactttggtgtttggagagtgcaaaagaatttgagtttttagtgggccatttttggtaagcagaactggcgatgcgggatgaaccgatcgtgtcgttaaagagcccgagtggatgctcatgtagaacccataaacggtgttgtcgcatta

SEQ ID NO: 51052 - DNA, 306 bp, Glycine max
  Clone ID: PAT_MRT3847_17111C.1
ggggggaaaaacaaggcgtctcccggggaaggagagtctgctgaaaaaatcccccaaacccaaaaaggaaatttgggacgttagcatttcgtttttaaaccaccttttaaaggaaaccccgggttcgacaaaaataaaaaaaaccccctcaaaggggttcaatcccccacagggaagggttttatcctaattccaaaccataaatagggcaggacttaactttgcaaattatttcctatcaaaaaaaaaattacatgggggaccatggacaaaaaggacttcccttggaaatgggcggacccgtgg

SEQ ID NO: 51053 - DNA, 1894 bp, Glycine max
  Clone ID: PAT_MRT3847_17112C.1
ggtgcttttgttgtcggaattttttttccaaatgatggaccgtttgccagtgctctagtggagaaagtagaggatctagtgtctggtctatttcttcctctttattttgtttcaagtggattgaagactaatgtagccaccatcaagggggcgcaatcatggggtcttctggcttttgttatatttacagcttcgtttgggaagattcttgggactctttttgtttcacttttctgtaaagttccttttaatgaagctttggtgttggggttcttgatgaattgcaagggcttggttgaattaatagtcctcaacatcggtaaagatagaaaggttttgaatgatcagacctttgccattatggttcttatggctgtctttactaccttcatcaccactcctctcgtgactgctgtgtataagcctgcaagaaagggaaaaataacaaattacaaatatagaacaattggaaggaaaaatgcaaatagccaactgaggattcttgcctgcttccatggtgcaagaaatattccatcgatgataaatttgattgaggcttcaagaggaatacagaagcgtgatgcactttgtgtgtatgcaatgcaccttaaagaattctctgagaggtcctcatcaatgttaatggtacacaaggcaagaagaaatgggttgccattctggaacaaaggccatcatgcagattctaaccatgttattgtggcatttgaggcttacaggcaactaagccaagtgtctattcggccaatgattgcaatctcatctatgaacaacatacatgaagacatttgtgcaaccgctgagaggaagggagccgcagtcattattcttccatttcataagcatcaaagattggatggttcactaaatatcaccagaaatgattttcgatgggttaacaaaagggtactagagcatgcaccatgctcagttggaatctttgttgatcgtgggcttggtggtacatcccatgtctccgcaagtaatgtttcttatcgtgttacagtgcttttctttggtggtggtgatgatcatgaagcccttgcttatggagctcgtatggctgagcaccctggcatcagattgctggttattcgctttgtaggggaaccaatgaatggagagattgtaagagttgatgtgggtgactccactagcaccaaattaatctcacaggatgaggaattcctcgatgaaattaagacgaaaatagccaatgatgactccatcatctatgaagagaaagtagtaaaagatggtgcagaaacagttgctattatctgtgagttgaaaagctgcaatctgtttcttgtgggttcaaggccagccagtgaagttgccagtgctatgaaaagaagtgaatgccctgaacttggacctgttggtggtttgttggcatcacaagattaccccacaactgcatccgttttggtgatgcaacaatttcaaaatggggcgccaataaattttactatctcggactcagaaatggaggaacacgtacctgatcgggattcagaatctgcttaacggttctctaggatcgcaccaacttgtttgggcttttctgaactccatgcagctttgctttacagtagtacttaatagttcaaaattttattttccttagaattggaattgatttagaattggaatttttattataggactgagttgtgcaaagatttatggtgtaaaattaggattctagcatcaattccaattctattttgtagttgtaaaatctataatagtaataaaggtatatcccagtatattttccactataaaaaaaaaaaaaaaaaaaaaaaaaaaagcgttggtcgacccgggcgttccctctcgaggcctccaggcgtaccacctttgcctatag

SEQ ID NO: 51054 - DNA, 852 bp, Glycine max
  Clone ID: PAT_MRT3847_17113C.1
cttactgtccgcccacgcgtccgcaaaatcatttttgtttttcctgaagagcaaatgggggcgtatagagctgatgaggattacgattatctgttcaaggttgtgctgattggggactctggtgtgggaaaatcgaaccttttgtctaggttcaccaagaacgaattcagccttgaatccaagtccaccattggggttgagtttgccaccagaagcattagggttgatgaaaaggtactcaaggctcagatttgggacactgctggccaggaaaggtaccgagcaatcactagtgcatattatcgaggagccgttggtgctttattagtctatgatgttacccgccatgttacatttgaaaatatggagagatggttgaaggagctcagagatcacacagatgccaacattgtggttatgcttgttgggaacaaagcagacttgcgtcatctgcgagcagtttccaccgaagaaactacaaattttgcggaacgggagaaaacgtttttcatggaaacatccgctctcgagtccctgaacgttgaaagtgccttcacagaagtgctgacacagatctatcatgttgtaagcaagaaggcccttgaaattggtgatgatccagcagcattaccaaaaggacagacgataaatgttgggtctcgtgatgatgcatcggctgtgaagaaagatggatgttgttctgcttgatcatgcagtaatgtatatgttctgtttatatccatgtagagtttcacccttaaagcatgaaaatgattgtctagacctttacaatctcaactttctgctttggtatgcagagaaatctgttcaatttaagtcaaatttttaggg

SEQ ID NO: 51055 - DNA, 298 bp, Glycine max
  unsure (1)..(298): unsure at all n locations
  Clone ID: PAT_MRT3847_17114C.1
gggcgcgcgccaccgtcgagaaatggggcttcaccaagtttaccgtctgattatctaagtcaagtcagagaatagaattgtgcccgatggggaatgctaacttttggtgcatggaccattgtcaacctccctcctgaaggggtttgnggaactgctactggntcttagataatgctatttggagggctggactttggatactttgttttgcagagtgaatttgagtattgcagaacattccaattacttaattgttgcgaacctcttcaatttgggtatttaatgtatattttgtatg

SEQ ID NO: 51056 - DNA, 474 bp, Glycine max
  Clone ID: PAT_MRT3847_17115C.1
gagtccatgaacgttgaaaatgccttcacagaagtgctgacacagatctatcatgttgtaagcaagaaggcccttgaaagtgcggatgatccggcagcattccacgcgtccgagacgataaatgttgggtctcgtgatgacgtatcggctgttaagaaagatggatgttgttctgcttgagcatgcagtaaaaacctctgtatatgttctgtttatatccatgtagagtttcacccttaaagcatgaaaatgattgtctagagagcattacaatctcaactttctgctttgctatgcagagaaatctgttcaattcaagtcaatttttcaggaagcatgcacttccattttgctatttggttgttgtttcatgaagctgttaatttatcgaatttgtcttaggcttctttattctttttgttctttttcatgcatgcagattcatgctatccaaatttattttgacatgttctg

SEQ ID NO: 51057 - DNA, 139 bp, Glycine max
  Clone ID: PAT_MRT3847_17116C.1
cagccatggttctgttatcaaaggatggaatgaaggtgtgcttgacatgcatattgctgaacatgttcgtctccggtgctctacggattttgctaatggagctggaggctatccttattggtggatacatcccaactca

SEQ ID NO: 51058 - DNA, 871 bp, Glycine max
  Clone ID: PAT_MRT3847_17117C.1
aaataccttttcggctcctagactacatcatcacctaatacccagaccatctcgccgcacacagcgcactgcagcgttgtgtcttcgcactccgccgtcgacgtcttccgccaccgtcacatctcgccggagcgtcgcgtttccgtcagggctaagtgccaagtgttgctgctgatattgtgacttgttgataaagatgagacttataacacataacatgctgtcatcgaacataaagggtgtggtgaatggatttcctttgcgcattgaagcagagaaagtgatggaaaagaccatggaaatgaacagtgagtttctggaaaagatgtttgagaaggttgattggaaggcttttgttgatgcatcgcgggcaatgggatatactgaactacctgaggaggccaactcttccatgctagattctgatgaatttctgaacaggtttcaccatgctctcttggaactcgaccttgaagaaggtgcccttgtttgccctgagactggacgacgttttccagtcagcaagggcattccgaatatgcttcttcatgaggacgaagtctgagttgtgtttttaatcatcaccttcaactgtttagtggcactaggttttttgacactatttaagaatgctggtaatggaactgcaattaaaatttatagttgtgggtgtcaattttacccttctttttgttgacaaatgttgtatcctttggccgggctattcttggatagttttgccgagatcattcctcagctgacaaagcatgtgctggattttatgtgtagaagttagttcccattgactgtgggtagtgtgttactcggttattattgcacttgaattgatatgtttccttggttctgtttt

SEQ ID NO: 51059 - DNA, 229 bp, Glycine max
  Clone ID: PAT_MRT3847_17118C.1
aaagtacgcccccgagaagacgacagaaggggggggggatccttggacaagagccccgaagaaaccccccgcggaggccacaagcacccgaccagacacaacagcagaaacaaagcggaacaaagccaccacattgatgcacacggcaaccgaacacacggagaaccgggtcagccaagtccacaaccggggaccaccactggcactaaaggggccccaccaaggcgaa

SEQ ID NO: 51060 - DNA, 321 bp, Glycine max
  Clone ID: PAT_MRT3847_17119C.1
aacatggccccacacccaacaacttcacttccagtttctccaaaaccaaaccaaattggttgaagtgtagcacgctggcgaaggttgccgtgaatttgtctgagtggagcgatgttaggcctgggctggattgtgaggttcacccgtgtgcccttcgtggtaatttgccccagccaatggggcacttttatgtgatttctgggttctttgtggtgtatcggtttttcaatttgactgctgaggccacgcttgaggatgtgttggagaaggtggcggaggttctgcgataagagatgggatgatgctaggacgagtgttgaa

SEQ ID NO: 51061 - DNA, 129 bp, Glycine max
  Clone ID: PAT_MRT3847_1711C.1
ggatcgagaagtctggatagttgatgtacatcttttgtgcatcagagacagctagtaattatgcgatggagacctggcagcttacaaatggtccaatatgcacgagagcgcatatatcttgattggtag

SEQ ID NO: 51062 - DNA, 448 bp, Glycine max
  unsure (1)..(448): unsure at all n locations
  Clone ID: PAT_MRT3847_17120C.1
ccaaggataggtttcccgatcatcactgtatgacgtgctccatctttgggggggggggggggggaggctaaaataaagctgtggcggggagggagagggcaggagggcatgggcctaggttgttgcctaaaaggcgttagctaacccactgaggttctaaaataataagggttcgataccatataaggttatgaagacgcccaccgctataagcttaaatagtcagtagcgtaggggatcgaccatacgcgaacgtataatgggcgccattgagagaggtaagccgcgtangataggagacagaacctttgcaaccgcaaagtagcccgtacccaagggacaacagacataggtagtgatcatggtagtaatacgaaccaaaatttatgcgttggttcaggggagttataaaagcgcttatgggcagtggcgcaagtatgacttattg

SEQ ID NO: 51063 - DNA, 165 bp, Glycine max
  Clone ID: PAT_MRT3847_17121C.1
cgcgtccgcccgggcatcacacaatcactcaactaacgtacccaccctaatctctataatctagggtaagatatacattacacatgctctgtctctaaaccaaaccaattcaaataacaatcgaatattccgatacaaacaaaccaaacccaatacaataaaatt

SEQ ID NO: 51064 - DNA, 384 bp, Glycine max
  Clone ID: PAT_MRT3847_17122C.1
ccacgcgtccgattgaattggagcaagaactacattactggtaaaatcaaataaagatgaaggtcatcactttcattttgattgttctggttgttctttccattggaattgaaaatgaaggaccattaaaagtaatagaagcaagaatatgtgaagacacattgtaccagttgcaatgtaacgatttcaagtgtaatactgcttgtcgcaagaagtatggaaaactagcaagcggtatgtgcaatgttgtagatgattgcacatgtcatttcccatgttaattagtgtttgactttttatccaactttgtctccatatgaatgtaagtttacatacaacaggcaatgctggaatgaagaaaataaaattactcttttgatgtta

SEQ ID NO: 51065 - DNA, 271 bp, Glycine max
  Clone ID: PAT_MRT3847_17123C.1
atatggagcacactgcggcccacaaactgtaaggatcaagatcggcactctgctccctgatgggggtacgatgaactactttgccaaacccatccccatcaatataattgtggatgatatagacgacaccggccccgtggcaggcccacactactacacaactattaatggcctgaactttaaacacacacttcaccccggaggtccacacgaaccataggggcccgcaaacgcgcacaccacagctgcactgtctaaggccgcggaaatc

SEQ ID NO: 51066 - DNA, 250 bp, Glycine max
  Clone ID: PAT_MRT3847_17124C.1
aagattttgtccaattgaacttgtaaaaatgactgggataaacttaagaatccaattattgaaattgaataagtaaacaatttaattggattggtccaatggtatcaaaaaaatggagtactaactcccatttgttatttattattgagttaaccgatcagcttgctttgttgtcgaacatgtctttttgatttcagagattttccggaaaaaatttgaatctatggctatatgcgaatcaatcctacta

SEQ ID NO: 51067 - DNA, 456 bp, Glycine max
  Clone ID: PAT_MRT3847_17125C.1
cactacaaattaatgcatataacaatggctacaagaataaacaacagaggggtcctaacaaatccctaaattatttatcaaaagcaattttgcacagaaattaaattatgattaatctgattatgtttaggtaaggtggtagggcagctgctaaatgctaatgttaattaaggtaagaattgtaggatcagcctacaaaggaaaagattaaaggttaccaatatcatgctatagtagcatgtatagtcgaatcatgtttcacacgagtgtatgatctatatgccaaagttaagagggaaaataattcatccattttaaaatataagtaatttaaatttatttcataaatattaagaaaaataattaattttttgaattttataaaaaaaatattagtgattttttaatatatacttttatctctaattaaatagtacttttacttatttactccca

SEQ ID NO: 51068 - DNA, 319 bp, Glycine max
  unsure (1)..(319): unsure at all n locations
  Clone ID: PAT_MRT3847_17126C.1
atgaagtctatgtaaaccatggtatgttttagttatactttagaaaaaataataataattagcttgcatatgttaacactcaacaataacaaaaaaaaacctcattcatggttcaagtttctcaagtatccagtgagcacaaggcaatgtgggcgggctgagtaatgctcatattcagtattcaggtttaataggtttggctctgcaacaagattgatgtattcgtgtttaaattcacaagtagttttgttttcctcatcacttagaaacgtaanatttttttcaacttcattatgttaggaaatcctnaatatttttt

SEQ ID NO: 51069 - DNA, 201 bp, Glycine max
  Clone ID: PAT_MRT3847_17127C.1
aacagattcacaccaaccatcacatataattgagattcatagtctttcaaccatctaatatccattacaatctggacaaacgtctcgtgcgttaggggggccaaaaccaacaactaattcaaacccatcgaacacaccactaatacgtaagttatattctgcaatctcccttacagtttgctaaacataacttatcaatca

SEQ ID NO: 51070 - DNA, 242 bp, Glycine max
  Clone ID: PAT_MRT3847_17128C.1
tttttaaaccttcattttttttattggggggtaaaacccaacttctgggttagtttaactattgttgtgcttatatgtcaaggcaagtatgaaacagtcccaacacggtttaatactacttcatacttttcttcaggatcatgaacaccattctctgaattggcaattcagaacctaatccaagttgaatagccattattcactacgcttttcgcttgggggcttgaaactcttgttactac

SEQ ID NO: 51071 - DNA, 341 bp, Glycine max
  Clone ID: PAT_MRT3847_17129C.1
acccactcatccaaccacacatcccatttattctataattttagtctatgttataccaatcttaattccggaatgtttattataaaattactgtcaaaacaagttccaataccataaatttcttaattcttttttcataattttttttactctactctagacccattctaagtttctcttctattcctagcttacttctatgtccttttcattgctttaattgctgaataatcctttaaaaatcttcttcttaaaactccattcctttagctttcatttcatttttttttactctttccttattacttttctcttatattccttccttttaaatttccaca

SEQ ID NO: 51072 - DNA, 1386 bp, Glycine max
  Clone ID: PAT_MRT3847_1712C.1
ggctcgagggaattaagtgcttccactctagtactttaccctgcatcacagccaccacaagagcctaaaaatgagaacaatgggggcatagtttttgactcaaaaaatttgcagcaaatgcaaggggaaatgcccaaagagttcctttggccttctagggacttggttgacaccacccaagaggagctaaaggaaccccttgtggacctagcaatctttaagaatggtgacgagaaagctatttccaatgcagcagagcttgtgagaaaagcatgcttgaagcatgggtttttccaagtgataaaccatggtgtggacccagatctcattgatgctgcatatcatgaaattgactccatttttaagctcccattgagcaaaaagatgggtgctaagagaaaacctggtggtgtctcagggtactctggtgctcatgcagatcgttattcgtccaagttgccatggaaagagacgttttctttcctctatgatcaccaaagcttctccaactcccagattgttgactacttcaagtctgtgttaggggaggatcttcaacacacagggagggtatatcaaaagtactgcgaggcaatgaaggatttatctttagtaattatggagctattgggtattagtttgggtgtggatcgtgagcattatcgaagattttttcaagatggtgactcaataatgaggtgcaactattatccaccttgcaacagagcgaacctcaccttaggcactggccctcacactgatccaacctcactaaccattcttcatcaagaccaagttggaggtttagaagtttttgtagataacaaatggctcgctgttcgccctcgatctgaagccttagtcataaacataggtgatactttcatggcattgtcaaatgggagatacaagagttgtctacacagggcattggtgaacacatacagggagagaaggtcccttgtttattttgtgtgtccaagagaagacaaaatagtgaggcccccagacaatttgttatgcagaaatgaggaaaggaagtaccctgatttcacatggtccaatttgtttgaattcacacagaagcactatagggctgatgttgctaccctccaaagcttcattgagtggcagcaatgctctaattccaacccttccaacttctagtttactttatttaccctttggctgcttattattattgcttttgcctgtgcctggctgcctaatgtcaccactactactactccctttggctaatcattattcattttccttttcttttgaaataccctgtacggagtttgagtacagctcatcctgcacttacaaaccacatagtgatatcatgtacggtcgtatttgaatcaagttccattttctgtt

SEQ ID NO: 51073 - DNA, 363 bp, Glycine max
  Clone ID: PAT_MRT3847_17130C.1
ggctcgagggaaaaacaaaacgaatggtaagccaacttactggagcttgtggacggacgaaatcttctgagttgaggatgaatgcttgtgacacatatgacattagtgctgcctcttcccaatacggaccaacgtacacaggtactttgctgcgcacattcacatacgcggaaggatgaaaagctctctgtgctgctactatgcaggacatatgttattataccaaacgcttggctcataatacaatacataatggttgtatagaaactcactcttacaatcactcatgaaatgtaagtgactacacccttgatgaacatactgtgttgctcagggtggatactagggaccccaagattagat

SEQ ID NO: 51074 - DNA, 323 bp, Glycine max
  Clone ID: PAT_MRT3847_17131C.1
gttaaaaaaaaaaaaaaaaacccccccccttgaaaatgattgcttttgattaaaaaaaaaccccgctttttaaaaaccatttccagacccccggaggggacctggcctttccaggcattaaaaccctgggcccggccttaaatttattttttttaagaaccccatggcttgggggccccaacattttttttgccccaaccggtaacccttattgtttttattccccttaccgggaaaaggtccccccctttttaaacttaaatccccccaccggaaaaagccaaaaaaattttttccgccgaaacctttttggggggggccta

SEQ ID NO: 51075 - DNA, 692 bp, Glycine max
  Clone ID: PAT_MRT3847_17132C.1
gcaacattaggtaaaggactgagatacatatagggcatatccatgtgagaactcttcttattatgaatagtcagaactacaaatccataccgtccaaccatatataaattatcaaaattataagttccactaaaaaatgttgtgctttctttttaaaaatcttaacattcaaatatgatctagcagtctatattcatagtttcatttctgacaataagaagagttttctcatttgatatgctccctatatatatattcatagtctctctccattggccttttgttagcatgtagaaatgaatatcagtatgatcttgaatgcaatgcttaagatcattgtaaagtcagactcaatgggggaagaagatggatgcaaccggggaagaaataatttgaactctgactaattagcctcaatattattaggaaaaatatcttgttaagtttaaggtccatttcccttcattagttgactatgttctgaaaaaagagtcaggagggagtgaaggagagattaataacatttgtgaaagaaaaggggaggagaaaggaaatgaaaaaaaaaatccaaaaaaactatacttgtttgtatgtagtgctctctcttcctctctctctttaacacttgtacattggatattgataggaatttgtaacaacattttgtgagccaaggaattagatatataata

SEQ ID NO: 51076 - DNA, 419 bp, Glycine max
  Clone ID: PAT_MRT3847_17133C.1
ctcctggcgggcccggcggctctcactatccaggtccctggtgctgaaccgcctgcgtccagttgccagcgggggtgggaaagcccaaccgggctccccttggtggcggagcaaaggctaccgctgcatcggaggggtcctctacaaagtatctgccaacaagctctccaagaccttcggccatcccagtgatgcgggcagcaggcccctcctgcgcacaggccggctggatcctgcatgcagctgtagccgttccctggccagccgggcagtgcagcgcagcctggccatcatccggcaggcgcggcagcgcacggagaagaggaaggagtactgcatgtactacaaccgcttcggcaggtgcaaccgtggcgagcgctgcccctacatgcacgatcccgagaaggtggccgtgtgca

SEQ ID NO: 51077 - DNA, 176 bp, Glycine max
  Clone ID: PAT_MRT3847_17134C.1
ggctcgagattttgtgctggtgtaaaatcataattttataatgatccaagggaaagaaatcaaaccagaagcagaaacataagctacatgtttgatttctttcacttggatcattattagattatgattttgtgctggtgtaaaatgggtgtgaatgttgtttttcttgcttttct

SEQ ID NO: 51078 - DNA, 222 bp, Glycine max
  unsure (1)..(222): unsure at all n locations
  Clone ID: PAT_MRT3847_17135C.1
ttttctccttattttntcntttctttttttattattaaaccttctattttgtatgtaaattatgtaatgtaatgtaatattatgagtatgattatggtggtgcgcgtgtgttgttgcctaaggngccaaggtttcctctacttttagttgnaagatggcatgcgtggatgtattgtgatcatctatcaaataaaaagaacgtctctttttttggctatctgc

SEQ ID NO: 51079 - DNA, 280 bp, Glycine max
  Clone ID: PAT_MRT3847_17136C.1
cctacgccttccttgcgtttaaactgtatttgctgcatcttttagttatttggtattgttattgttaccaatagcattttttgtgattgtcacaatgtctcgtatatgtagaagctattctctcatggaacttcttgattttgtggatgaccaattttagcttgaacttctttttttatggtttacttagatgaataattggagcttgggctttgtgaggactttgaatgaaacaattttgaaaaaagttaaacctttttgacatgtagagaattggtat

SEQ ID NO: 51080 - DNA, 333 bp, Glycine max
  Clone ID: PAT_MRT3847_17137C.1
cccttcctccttcccccacttctacaatactatcaaccttcataaaatactccttcttttcctctcacaccacacacactacctatcaatcaaacaccacctactcaaactactccccataaacaaataagccaaagaccataccatttacccaccaagaaaccgttcaccttatacgcacctaccactaaaaatatatttcaacgtatgctatactcaacttcaatgacaataccttctaaatcagtatacctttatttcgatccaagaaagctaatttaacaacaacctatgagttatactcaaccatacacaaacaaactccttacttat

SEQ ID NO: 51081 - DNA, 457 bp, Glycine max
  Clone ID: PAT_MRT3847_17138C.1
ggattttgcttgcatgtctttaaattcttccagtcgtgttctgtaagtattacactgaactgtttctagctttgattataaaattaactggagcaagttttattatagatttttttagtcaagactgttagcgaccattctacatatgttgtgacttttttattcttaaaaacatttttggaacttcctttgtcatattctgtatttgtattgggtatcggtacttcacctgcatccatgcaacttagttttgatctgacctccaaagtacaatttagctgcttaacactgacaattgtggatttcttcccactttatttttccttttgtctttaaacatgtcgaaccacatcttgtggtaactttgtctttttagccctttgtttttgtcaaatgaaattgaaaaatcttcaggttgcagcagacttgccatcctaaaataagatgaatgattagc

SEQ ID NO: 51082 - DNA, 113 bp, Glycine max
  unsure (1)..(113): unsure at all n locations
  Clone ID: PAT_MRT3847_17139C.1
tttntaatcacctggtttganttttnaagganatccaatccanntgcattnaatgctgatcacctganattccgccagatctctccctctaccacgctcntgataaactcgat

SEQ ID NO: 51083 - DNA, 472 bp, Glycine max
  unsure (1)..(472): unsure at all n locations
  Clone ID: PAT_MRT3847_1713C.1
gccgccactagctgaatcggtcgggaaagctgatggngatttatcagggggaatggttatttgttatggtggaaccagaggttatgccttatagggtttttatatgccggtttataatgcctgatttgagcctataagtcacttcaagaatgcaaccgatccttcattgacttctactttcagattaatgaattcatttgccaatagtatagttatttttttcttgtaagattaattctgacctgttatttatttatttatttatgtgttatactatacatttatgtctatgacattttctccactttctatttaacctcattgcagaatctgagctactagtgcaccagtaatacatgatcaaagcaccacctttttttggtgaatactttcaatttttttctggttaaattaaaatctcattgcttgaactgtgttttgctatcagggttgtattagtcatggacagagc

SEQ ID NO: 51084 - DNA, 545 bp, Glycine max
  unsure (1)..(545): unsure at all n locations
  Clone ID: PAT_MRT3847_17140C.1
aagctctcccaaatcgacgccggcctcgccttctccgacggcaactccaccttccgcatcagctccctcggatttttgcattatacgacagttcaaatagggacaccgggagtgaagttcatggtggcacttgatacgggaagtgacctgttctgggtaccctgtgattgcacaagatgtgctgctactgatagcacatcctttgcttcagccttggctactgattttgaccttaatgtatacaatcctaatggatcttcaacaagcaagaaggttacttgtaacaacagtttgtgtacgcaccgcagccaatgcctcgggacgttcagtaattgcccctacatgatctcttatgtctctgctgaaacgtctacatcgggaatactagtggaagatgttctgcacttaacacaagaagataatcaccatgaccttgttgaggcaaatgtcatattntggatgtggacaaattcagagtggagtcattcttagatgttgcntgctccccaatagggtttgtttgggcctaaggctatgggaggaaa

SEQ ID NO: 51085 - DNA, 232 bp, Glycine max
  Clone ID: PAT_MRT3847_17141C.1
agaacctctgtccagcttagttggcaccaatgcctattcttctcgatgttccatgaaagctgactggatgcctggccacactaaaccccactaccttgatggatcagcacctgtggactttggatacgaccctcttcgacttgcagaattaccaaagaatattgagaggttcaaatagtcaaaactcatgcactggatatgagccgatcttgctgatcaaggaatattggtc

SEQ ID NO: 51086 - DNA, 214 bp, Glycine max
  Clone ID: PAT_MRT3847_17142C.1
acgggggatgaggggcccaagagagctacttggaaggggtccctggacctaaatagggagaaaaccgcccttattattggtgctatctgaccaaaggatcgaaatgtaaaaagtcctgccagcgaagaaataattatattcctactttcatacataatgaatgacaagatcaacaacattgtaatacatcctcggggggttgaaatagtaaaac

SEQ ID NO: 51087 - DNA, 291 bp, Glycine max
  unsure (1)..(291): unsure at all n locations
  Clone ID: PAT_MRT3847_17143C.1
gnncttcttttttttttttttttggaaaaaaattcaataaatacgcgaatagggtttttttgggacacgaaaaacaaccctttaaactttccatctttacatgatggattaacaagggttgtgggggagactttctaaaaaacaaaaacaagatgccgggggggacctttttctgtttttgcccctctgccccacattttggaaacactttttttttttagtgagaccaaacgtttaaaatgaactttgggccgctttggggaaccgaggttttcttttattattggcaaa

SEQ ID NO: 51088 - DNA, 137 bp, Glycine max
  Clone ID: PAT_MRT3847_17144C.1
gaggtaggtgggacgcatcttttttggttatgaaggagcaccttggacaataatgacatgccatagcacgcaccagtcttcaatcaatgaatcctactttaaatgacaccaaacggactatggaaactgtatgaagg

SEQ ID NO: 51089 - DNA, 361 bp, Glycine max
  Clone ID: PAT_MRT3847_17145C.1
cgggccggaactgccccggagacccaggcgtgcgccacgccttccgatggggatggtttccaatggggggaccagtccatcaaatagtcccttagcaagagatggcttggtaactcatttttaaaaaatgggttatctacttgagatttgaaggagttgttgggacaaaatagctgttaaagaaattgcactatatttcaacttttatctatattaaatgactgggaaccttcacctgttttccccgtatgtgaaataaaattgcgccaacttgatttttttggtgattgtgtccttaacttttgaaaaaagaatggggtgccgttttaaaggatccaaatttattttccctggctgggca

SEQ ID NO: 51090 - DNA, 495 bp, Glycine max
  Clone ID: PAT_MRT3847_17146C.1
tgcagctcaagaaacaaacccactgctagcatttaaattggtcatgctgctccaaagagtgtccaaaacctctactgctttctctaatccaatagcaattccagtagtaccagctttgcccaagcgtaaactcacctctgagacctaggcttgttcggcaaggagtcctcggggtagcgcgggattccgtcgtataactcatcgtccgcagtggtagaagccttcccgttggttctagaaggttctcgaagattcctcaccatcctttggggcgcggcggtgaaaacagcggagtcgtcgtcgtagctgccaggcttattctgatgagcagaatcggcggcgttgacaaacactcggtcatccctcggcggagcgagagcagagacgtcccaccacttgcggcaaaagctccccgaattccatcagagtacgttgcaacttaactttctcttcttgcagaggatggatgaaactaaatccaaggaagaagagaaa

SEQ ID NO: 51091 - DNA, 416 bp, Glycine max
  Clone ID: PAT_MRT3847_17147C.1
tacggctgcgagaagactacagaagggcctaggacacccatgggggttccattgaaaaggcttagcttttggatttagatttgactttgggttggttttgggtatggataatgctcttgtagtgtgaagtgctagtggagttgaggaaagcttcctccatagacccaatgttcccccttttcttttttcctcttcacaaagttatattttgatgtttgaataggtaatggaagctttagccttttctatgcttaggttgctttggattggtttaaatgttgcttgaaaatgaatcatgtgtaaatataaaaagcttcagcatttgaggttttgagttttgaaattggggtttttggttattggatgaatattgaccaaaagttctttatctgaaagggttttgagtttattttgtt

SEQ ID NO: 51092 - DNA, 349 bp, Glycine max
  Clone ID: PAT_MRT3847_17148C.1
ggctcgagaaaaaaacaacataaaaaattaggaactcaaaccatgaatgaaacaaggaaccaactatgatagaagcaactagaccaaaaaaaagagcccaaaaagccctatgacaagccggtggggctcccccttaaggatgcgtacacccgggaaagtattggaactgtgcccctgggacgaggccgagaccccttttttgaagcctgtaatggtgctgacttttgcaccaactggactgtcaactgagggaaagtctgtggagatgccccatgaatcgcattaccaaggcacatacctgagacaataagggctggggtgcttagaatgttgctgatcaagattttgt

SEQ ID NO: 51093 - DNA, 235 bp, Glycine max
  Clone ID: PAT_MRT3847_17149C.1
aaaaaaaaaaaaaaaaaaaaaacaaaaaaaagaaaacaataacaaaaaacaataacttaaaaaaggaaaagtggttataataaacgtggacaggaaaccacttctagcaagtgaaccataaccagtcattgataatcaagggataccctctgcatccaatagtaaggtactacgtgtgtacacttaataactgttgaaggaggcctaacactagttatatatcaaaacccgactt

SEQ ID NO: 51094 - DNA, 207 bp, Glycine max
  Clone ID: PAT_MRT3847_1714C.1
gtccgccacacccgtccgacaatttagggtttaggattttatccaaaccccttttccatggaagaggaggcggccctggaggtggtggatccaaacaccgccgttgccgccgccgccggggccatggccgtcaggatggccagggccggcgtaaacggtcccttgcctaacaagaacctcgccaggggggaaggggccccccaggcg

SEQ ID NO: 51095 - DNA, 197 bp, Glycine max
  Clone ID: PAT_MRT3847_17150C.1
catccaagaacaacaagaggaacactaacaatctttttttcttcagaagaccaatcttcctagggacggcttcattaaaaagcttggcgatcatttttacaatcctgcccttgaaaacgatgagtccaatactctctcgtcgttgaatactactcgtggtcacaaatttcttaataatgctcaacttactaacaaaa

SEQ ID NO: 51096 - DNA, 535 bp, Glycine max
  unsure (1)..(535): unsure at all n locations
  Clone ID: PAT_MRT3847_17151C.1
ttgccgtgctacatgtgtgtagtgccgccttcttgggggggggggggggaagaagatacactactaataaagcgaaagggagaggagagtttataccgaaaaagataatcagggtttaaagtagatagcagggagcaagatatcatactgacaaacatattatagtaagttgtggtagtggggcggggtgataggtgagcaaattacaccatggaaatgcacaggggaggttatgggggaatatagctgaatgggaccgtggaccataaatagcaagtataaaataagccttcccgcgggagacagagtaacggctaataaagcaagcagatacaacatatggccgggaaggtgtatagagtaattaacgttaaagccgccgcttgaaaaaacgagcattattactctttacagcccagaaattaatacaacgaggagcttaagccaagggcagagcttcgcactgggacgcaaacacgggtgcaaattattagcactttcaagcgcggtggctactanagaatagctaagcagc

SEQ ID NO: 51097 - DNA, 216 bp, Glycine max
  Clone ID: PAT_MRT3847_17152C.1
acgcttccttgcctgcaacttgactttagaagatcccttcagggaacaacaatatcatattttcaagtaaataatgaggcaatggtggacacttatcaattggagcgcttagatttcttactagaactatatttgcacaatccataataagctcggcaactctcaaggaaagctctttcctcattttcaagacttcaggaagcataaatgcctacc

SEQ ID NO: 51098 - DNA, 313 bp, Glycine max
  Clone ID: PAT_MRT3847_17153C.1
gaattcggcacgaggggtactatgtttttcccaaagactgaaatgtgctattttgctctgtagttggttcttgttgacttgttatgaatatttatattgattatctgaataaggtgatgtgattctctgtataaagtggaacaagcacactgttcagactgcagattcagcttattctaagtccattctataggttaagtgtgtacttagttacttagacaatgcatgttgctgtcagattcgggaaaattaagaatgtacaggctgaagaggggtaaggtagaatacgtaatgctttcgactgcgggtgtct

SEQ ID NO: 51099 - DNA, 4450 bp, Glycine max
  unsure (1)..(4450): unsure at all n locations
  Clone ID: PAT_MRT3847_17154C.1
ggaaaanccggggcgccgccacgcgtccgctttatctagagatgcgaccaaagccaaggcccgttccgacagacaagagcgacagaattttaattgattgcaaaatagaaaaaaaagaaagtgaagcgtgttagttagttagtagttggtgcgctgcgttgtgagttcgaaagtgaatctaggagaagaaggagtaaacaacacaaccaacaaacatcttcgatcttattctagggtttcaattgtgatgtgaatctaatgaatgtaacgggaaaagactgtagatagatgagctccagcaatttgacggggtttgtgttggccgtgctttccagcgctttcattggctccagcttcatcatcaagaaaaagggtctccaactcgccagtgccaatggcccacgtgccagtgttggtggctatggctacttgcttcaacctctctggtgggtcggaatgattaccatgattgttggagagattgctaattttgtagcctacatttatgcccctgctgttcttgttactccactcggtgctttgagcattattgttagtgctgtcttggcacattttctcttgaaggagaagctgcagaaaatgggcatgttgggggtgtcttctgtgcattngtgggatcaactgttatttgtgttgcatgcacccgaagagaaatctcttagtcgccacgccgtccgtacggcttgcgaagaagacagaaggggtcaacctgcattcctctcatacactgcctcaacaattgccgtgacattgttcttggttttgtattgtgctccccgttatggccagactaatattttggtttatactggaatatgctcgatagttgggtccttgacagtatgtggtcccagtggtcgctggtatctggcagacagtgggtctgtgcctggagatcttttacttataataggaaaggcacttacccatgctactgttggcctatgtcctgctgcatcatatagagcttctcctgattattttttgagtcctaatggtggaggaaggacttctcttgcatatagactcatgccacagggcaatgctatattagattgttccctaattgcagcagctggccatgttattccccaaagttatgttcgaatatctgtaagccaatttatggatgaccttgttgtcgaagaactgataggcaatagatgggtttataaaaacaatggataccttatggtctcgtgcaatggaggactcaaccagatgagagctgcgatatgtgacatggtggctattgctcgatatttaaatgtcacacttatagttcctgaactggataaaacatccttttgggctgatcccagtgacttccaagacatatttgatgtggatcattttatcacgtccttgagagatgaagtgcggatattgaaagagttgcctcccagactcaagatgaaagtggaacgcggctttctttacaccatgccacctattagttggtctgatatatcttactataaggaccagattctacccttgatacaaaagtacaaagttgttcacttaaatagaactgatgctcggttggccaataatggtcaaccgatagagattcagaagctgcgttgccgggtcaattttagtggtctgagatttacttccgtccgatagaggttgggcaaaagggtgatcaggcttctcaggcaaaatggcccatttttggtacttcatctgaggtatgagatggacatgctggcattttctggctgtacacaaggttgcaacagtgatgaagtggaagaattgacaaggatgagatatgcttatccttggtggaaagaaaaaataattaactctgatttgaaaagaaaagatggtttgtgtcctttaacacctgaggagactgcccttacacttagggcccttgacatcggtcaaagcattcaaatctacattgcagctggggaaatatatggtggggacaagagaatggcaagtcttgcgaagaactatccaaaattggtcagaaaggaaacactgttggaaccatctgatcttcagttcttccaaaatcattcctctcagatggcggctttggattacctcgtctcctctccaaccccaacaagtaagagtaaaggcaaagaacaaaacaaaacatggacgaatggcgcgccaccatcaaaatggatcacagaacccaacgaacttagaaaacctaaccgagtcctccatcagtcatattcccaacgaccgttcagaatgattgatggtagcgatcatgcaacagcagcagcagcaatcaacagcaacagcagaacccctctgcactggtgccacctcagctcaagaatccccaatcctccaccacaaccaccaccgccgacaccactccccttaggtcaccctccgcccagtcgccgctctccgtcgtccaacccatccggcaacccccacccccatctcatccgatggtgccggttacgacggtgaagcccggtctgacggcgctgctgacgtgtcctctggtcagagttctgctctaggacattgccccctatgaaggggcaacagggggaccctatctgagagcagtacaggcattgtttctggtcactattgaggcaaaatgatgccatgcgcatggggagccaaacaaatacggttcttatacaattcaacttgtaagaagggggatatttcttaacatgtctcgtagagtttttgtatcgattggcatacaaattgtgggagttgggcagagcttgtcgagggtcattggatatggattattttcacgctgccattattgatgaactgagggccttgagttagtttcctcgatcaatcacatgttagattgatgaactggtacgaattctcttcggctgtaaaggaagttcatgctaatcgcatgggtggtgcaactaagagattggtgatccctgacaggcccaaagaagaggattatttctatgccaatccagaagaatgtttagaactatcagatgttatgttgagtagtacgtgagtgatacgatttggaatataagagaatttacttgtgccctctcctagtgcgtgcacttggtcttctaccacagatacttaagatgggtctctacgcagtttagcaaagatgatgacagcttttttgtatcacagaggcagtcatatagtgactgttagaatggggaagggggaatgggcttttcatgaaagctcgagaaggtagccgacggatactttatatataaaatatgcaaataatccatcatcaccacattcatgtatagaagccacaccctgccattacaggatgagagcagatcaaactgcattgtacacggaggggttcatatacaaatttggattctggaactgcagttcgtggaagctttgttcctttggtacctttcattttttccttctcgacaaatataaatatatatcataaattgttttttttttttccgatgccatctttttatttaacacgaattcttttattgtgctcatgctgggagagtcattgaaacgtcaaaatgtactctctgcaatgtagaaattgaaactggttctttgatccctaatcatgctcttagagctgcagcagctgctgtcaagcatgaggatgatcggaggttatttcgtaatgccgctctccgaaagcggcggaaagaaatgggtgaccaaatggattcaatgagaagagtgaatagggaaaatggagattttaatgctaccgatggacttcagcggggcgtacaatatccattttcggtaaatgagaaagttgttattaagggcaacaggagaacaccagaaaaatttgttgggaaagaagctgtgattacatctcagtgtctcaatggctggtatttgctcaagattattgaaactggagagaatgtccgcctgcagtaccgttctcttaggaagctcttaaactcaccagcggaccagtgcccctcccagccaattcaaaatagcagctcttaaaatagatttattgtaggttttccttctttcttttttcctccaccagaaaaaggaaacttttgtagtcttgatcctttgaagcaaagaattgactcatctagtcttgatctatgattgtaaagaattacattgactggtccggctccttatagcatgtgatagaggtttataatgtatcaacgaggttatttgtgtagatgccaatgctaggtcggcttataattattgtaaagaagaaagcaggcaaagataaattagatagcatgtaaattgtagcttgcacttactgaaatggatcatatgtttaattttatttattttcagttttcattgtttgaggatttgtaaaatctgtttgttcatgattacaaatttcttattagtttttattattagagggtaatggtaggttggacttttctttccacatacgatggaaatatggcccaagtagtcgagggtcatc

SEQ ID NO: 51100 - DNA, 591 bp, Glycine max
  Clone ID: PAT_MRT3847_17155C.1
ccgtggtcgcgtgggattgcacttcccaatatcacagttggaggaaccattcttcgtattgatctatgggcaaattttttgacatagggctcttttagagcaagtgttgatttgcagcgcactcattgtattaaaggaatgattaaaatggtggccactgtttggtttcctgagaatacaggtttatcattggcctgtgctttgaatagttcttatagggggcgtgccagtttttgatatttacaccatctgctctcaagactgagaattatggaattctgcttgcacaaaagcattgactatgttatttaatccaaatccgtgttctgatgcatggagtttggaattatcgaacgcgtacctgttctcattgtgatatcatttgtgtcactggatggactgccaccccaatgcaggatgttcaaggttccattggatgggtttattcctcttaagaaaggggtccccaggacctattgtgttcaaaatccccaaaatcctttggggttaaatagggggatggggaaaactgctttttccccagggctctttcccaaattgttaaaagaatgccttttttcttatggggga

SEQ ID NO: 51101 - DNA, 777 bp, Glycine max
  Clone ID: PAT_MRT3847_17156C.1
aatcacgagacaaatctcgctatgacagagaacgaaaagatggaagagattagaaatagacgcattccagcagacgatcttgcgaagcaagctcatgaattggagcaccaggcagtgcatgaaagtctcaaggatcaaattcctgctgatgacaagttgaattctactaaggttaataagtttgcaaaaattatgaaccttagacaaagtgttgttggtgatcttaaacttcttactgatgggaagttgtatgagggtaagcatattcctgtatctaacattagtgcaggggaaaatcatgtagttcaaatacccctaatggcacaggaggaaattctgtcttctagtgcaagcgatttcagaactgcaatggtgagtaaaaatagtaagcctcaagctactgctatgcatgtgggagctatggaaattatcattgatcgtttcgaaagtcccgactgcaacataattggtgcaatgctttaggttgatacttatcataccaatcctgaaaatgcacttcctacaatttctgatgcgcctttaacaggcagaaggcccattctggtggttacatgtcccaataccattgtgcagattgctccaaacatgaattgaaggtttcagattttgagtgccactaccaatggtgattttgttcaaggaaaagatcttgcaatggttaaagtgaatgtagcatgaagctgctgttggctagacatcaagttacactccaactgcattgttggaatttggttcgcaaaagacagacggttaatt

SEQ ID NO: 51102 - DNA, 841 bp, Glycine max
  Clone ID: PAT_MRT3847_17157C.1
ctctcaatgtggagatattttgctggagatctcgtctttgaagtttctaagatgactgctccctacattaaatgtacagtctctttcttcatagcatttgcaaattcggctgatgataccatcaattctgaggctgttccccacacagctggtgcagtttgtagagattcaagaaacagttgtatcgaaattttcacaagaggaatttcttacagcttgggcaactcaggtgcagtactgcaacaactctgctggctgatgggtgtccatatttgtatgcaatggtgcatgatagttcagagtctacaataccaggtgattttgtcattggcgtcaagttgacaaccataaacaatatgtgtgcatatgggctcaatcctgctatttcaggatctcgtcttttgggcaccattcctcagtccatttcacagcaaactgtttggaatcacatggcatcagtgagaacaccattgaattgtgattctagcaagcagagcttttgtcagttttctattgaccttcttgggggaggaatcttaatggacaaaactggagattggatcacacttatacaaaaatctcccattattaacttgttgagagatgctgcttggaaaaaaggctgtttaatgggcaagattgtgatggctgggaatgcagcaatcaaaaggagtgaatgggcctcattggtaccagtgtttttaacaaacaggaacactacccaacatttttgatgcatgttagtggacaaaaatacaacccctctctcggggaatgatctttccaccaaaagtatgtgggcccaaataagggttttaaaatgtggaggtctcaatgggcc

SEQ ID NO: 51103 - DNA, 760 bp, Glycine max
  Clone ID: PAT_MRT3847_17158C.1
tcccgtcgacgcgtgggcggacgcatgggctagattggttaaatgtttcctctactccagcaccatttgctagtggtaaaaccttcaaatatgatatcattggtgctggttcacattcttcagaagattttcctgaaaaagaagatcatgaatgacccaacaagattgatgccagattgagacaaagaatagatcctcaatacaatgaggttcatgctcagatggatacaaatttgtttaaatagtctctagatgatgttgaaacttctaaaggttccatgttggatcttaaaatatctcaatctaaaattgcacttgccaaaaacacagttggaggaaccattctgcgtagggatctattggcaaattttttgacagagggcaattttagagcaagtgttgatttgcaactccactcatctttattaaagggatgattaaaatggaggtcacagttggtattcctgagaatacaggtatagcattggcctgtgctatgaatagtttttttatggggcgcgccagttctgatatttacaccatttgctctcaagactgtgaattatggaatcctgtttgcacaaaagcaatgactatgttattcaattcaaacccgtgttctgatgcattggagtttggaatttctgaagcgtaccggatttaactgtgattttatttgtgtcattggatggactgtcactccatgcaggatgttcaagttcaatttgattgggtttttccttttaagaatgtgtttcca

SEQ ID NO: 51104 - DNA, 898 bp, Glycine max
  Clone ID: PAT_MRT3847_17159C.1
ccttcgcgttcgcggacgcgtgggatggaaacaaatttgcttaaattgtctcttgatgatgttgcaactcctaatggatccatggtggatcttaaaatttctcaatctaaaagtgcacttcccaataacacagatggaggaaccattctgcgtggtgacctattggcaaattttttgacagagggcattttcagagcaagggttgactctctgcgcactcatcgtattaaaggaatgattcaaatgctggccacagctggtattcctgagaatacaggtatagcattggcccgtgctatgaataggtcttttagggggcgcgccagttctgatatttacaccatctgctctcacgactgtgaagtatggaatcctgcttgcacataagcaatgactatgccatttaatccaaacccgtgttctgatgcatggagactggaatttctgaagcagaccggatttcattgagatatcatttgagacactggatggactgccaccccaatgcaggatgatcaggctacaatggattggcattatttcctctcaggagtgtgttcccaggacctattgtgttttaaatccacaaaatccttttgtgttaaataggtggatggggaaactgactttcccccagggcacttcccgaagtgttaaaagaatgcccctttctatagggggaggagctggtgcaaagaatgctattctcatgactatgccaaatgctgctctttcaatgtggagatattttgttggagatctcgtctttgcagtttctaagatgacttctacttacattaaacgtacagtctctttgttcatagcattaggaaatgtggctgatgacaccatgatattgaggcttttcccacacgctgcgcagattgagagatcagga

SEQ ID NO: 51105 - DNA, 160 bp, Glycine max
  Clone ID: PAT_MRT3847_1715C.1
ctatcttttttttttgcctttaaatttactgcattttccatgaattttgcatctaaaggcatatcagttacacaaaccgggtctaccactctcatagaccaaaagcttgaatacacacccatgacgtgagggtccaaggataacacatactacacaaaga

SEQ ID NO: 51106 - DNA, 815 bp, Glycine max
  Clone ID: PAT_MRT3847_17160C.1
ttgcgtgcgattttcctgccgttgacaagttgtattctactaaggttaataagtttgcaaaaattatgaaccttacacaaagtgttgttggtgatcttaaacttcttactgatgggaagcacgctgagggcaagcatacatctgtatctaatattagcgcaggggaaaatcatgtagttcaaatacccctaatggcacaggaggaaattctgtcttctagtgcaagtgatttcagaactgctatggtgagtaaaaatagcaggccataagctactgcaatgcatgtgggagctatacaacttatcattgatagtttagcaagtactgactgcaacataaatggtgcaatgcttttggttgatacttatcataccaatgctgaaaatgcagttcgtagtatttttgttgcgcctttcagaggcggaaggcccattcgggtggttacatttccgaataccattgtgcagattgaaccagacatgaattcaaggtttcagcttttgagtaccactaccaatggtgattttgtttaagggaaagatctctcaatggttaaagttaatgtagcaagtgctgctgttggcttgacatcaagttacacttcaacttcatcgttggaatctggattgcaaaaagacagagggttaattgtggattatattggaaggatgtcttactctgtcattactttatatattcctaagagaaagatttgtcgttgggaaatttttctttgatataaatcttattttgattggaaaagtttcttttcataacacactttgtatgtgaaaaaccttcaatttattatattg

SEQ ID NO: 51107 - DNA, 1893 bp, Glycine max
  Clone ID: PAT_MRT3847_17161C.1
gataatattaatggattatcagttacgctgtaacacgacggcccgagagggggggtgagacgacacacactcgggctacttggttgtcgggtttttaattcaactcaacaagaggaataaattccactaatattcaactcaacgaggggaataaatttcattaatattataagttcatacacggcaacaatttagttgatgtctttttaacaaaatccaaatacagcagtcttctaatgtaggattctctattataatatataagatgagcacagattgccacaagctgcagcttcttgccttagtggacaactagctgctcatttaggatttcacggtagttgaatcttcttcctgctgctttgcaggaactggaagggggcctttctcctgcaggctcttcactgtttcatatagacactgactcactggagtgaattccaatcccaaatctttcagcttttgatttgaaaaagtgtagggttttgctctcggattcttttcatctgaactcttggtgggaactcttggcgagaatttcaactaattctccattgtagctaattctttccgcaggagggagctttcggcacataggaatctaccagaagcagaaggcttctcataaacaagtatgtgggccaatgccacatccctaacatgcacataagcctgtgtggcatttgcataagtcttagcagagccagtgaggtacttgaggatgtgaattgtactagcattgatggtgggatgcagtaatggtccaagaaccaaaactgggttcactacaaccaagtccaccccattctcttttgctgtgtcccatgctgcttgttcagccacagccttcccatagcaataccaattcttggtgttcttgcaatattccaaatcactccaacaggactcgtcaaccaccaaatcgatgctcctactggggtccatatagacggcaccaatggatgaggtgaacaccacacgtctaactttagcctctgcagcagctatgatcacattcttagctccactcaccgctggctccaccatttcttcggggttatcggtgacgggagaagcagtgtgaaagacaccatggcaaccgttaataactgatctaacggagtcaagatgaaggaggtcaaccttatgcagagttaacctctcggaggctccttcaaactccttcaagtgcccgttcttgggatcatctggatttctgagggttcctcggacagtgtagcctttttccaagaggagtttgaccatccaagaggcgatgaagccaccagcgccggtgacacaaatggtttcggaggaagcttctgcagaaggcatcttcttgttgttgttgggaagggaaagtagaacggaacaaagaaagaggttggtgagtgagatcagagctgctcggtacggttcccacatcatcacgacaattaaaagaggtgtggaaattttcagataggcagagcatactcaacaagagggtcatgcctaatttcctttattgaattaaacaaacgaacaagcgaaagaaaacacgaattccagatcatgcagaggattccgcattttcagaaaatctggcagtagcctgtggaacaaaaaaagctggcttaagaatattaccagcaatttcaaaaacttgagaaattccccaaaaaatatcaaaaaccggggacctgttgggattggccataaagaaactcaaaatgccttgaagtttgatttgcccccttcaaaaatccccattttaaaaccacttttaaggaccacctacctccttttgcgaaaaataattccccacgattggggttctcgattttggccccttacatgccatcaaaaagctctggactgatggcggggggtaaaaaaacttgtccaatgggg

SEQ ID NO: 51108 - DNA, 272 bp, Glycine max
  Clone ID: PAT_MRT3847_17162C.1
aaaaaaaaaaaaaaaaaaaaaaataaaaaaaaaaaaaaaaaaaaaaaaaaaaaaaaggaaactacaaaagggcggtcttccacgtcgagggttttgacccccggcattttttccctgaccgttccctgctgctttatcgggttcccctacattgagggtgtctcacctcttgtttttgacatgcccatacctgtcccctgtcttaacctgttccctgctgggctttcctcacctcttgcagctccttggcatattgtgtttcgcctggggcg

SEQ ID NO: 51109 - DNA, 614 bp, Glycine max
  Clone ID: PAT_MRT3847_17163C.1
tcggattttatcactgatagtttcgcaagccccgactgcaacatatttggagcaatgcttttggttgatacttatcataccaatcctgaaaatgcagctcgtagtattttcgtcgcgcctttcacaggtggaaggcccattcgggtggaacatttgcgaataccattgagcagattgaaccagacatgaattcaaggtttcagcttttgagtaccactaccaatggtgattttgttcaaggaaaagatctcgcaatggttaatgttcatgtagcatgtgctgctgttggcttgacatcaagttacacttcaacttcattgttggaaactggcttgcaaaaagacagagggttaattgtggaatattatggaaggatgttttacgttgctcataacggtgatcagacccaagtgaaagatttgatggagggaaatgtttcctatgatattaaatctcgctctagattggaaaaagtttcactctactaaagcacaatttgttagtggaaaaacctttaaatttgattaattggtgctggttcacatttttcagaagattttcctggaaaagaatatcctgaaaaacctcatgtgattgctgtcggattgagacaa

SEQ ID NO: 51110 - DNA, 810 bp, Glycine max
  unsure (1)..(810): unsure at all n locations
  Clone ID: PAT_MRT3847_17164C.1
accaggtgcatatgggctcaatcctggtatttcaggttctcgtcttttgggcaccattcctcattctatttcacagcaaactgtttggaatcaaatggcaacagtgagaacaccattgaatttcgattctagcaagcaaagcttttgtcaattttctattgaccttctcagtggaggaattttaatggacaaaactggaaattggatcacacttatacaaaattctccaattaataacttgttgagagttgctgcttggaaaaaaggctgtttaatggttaaaattgtaatgtctgggaatgcancantcaaaaagaatgattgggcctcattggtacaaatgtttttaacaaacagcaacagtacagagcattttgatgcatgtaagtggacaaaatcagaaccacattcctgggaattgatcttcccaatagaggtatgtggacctaataatggttttgaaatgtggagttctgagtgggcaaatcaaacttcatggcctttgaggttgcttattgacaataccaaacagtctacaaatattgatattctcttgggaatacctcaaaattttgaaattgctggtgatactcttatgccaactttttctgttccccaggctactggcaaatcttttgaaaatgctgggaacctctgcatgaacaggaacaagagctttcttttggttgttgcgctgtttaatttcacaaaaggaaaaaagcatgaccctcctgttgagtattctctggctatttgaaaaataccccccctctttaattgtgccctgaatggggaagagggggttttttt

SEQ ID NO: 51111 - DNA, 410 bp, Glycine max
  Clone ID: PAT_MRT3847_17165C.1
gtgcacttcggcggagagcgcattgcctatgaggtcagcgtgcaagaggcagtggcgctgtatggaggacacacacctgcaggcatgcagaccaagtacctcgatgtcggctggggcctgggcagcgtcactcatgagttagcccccggcatcgactgcccggagaccgccaccttcctggacactttccactactatgatgccgatgacccggtccattatccccgagccctctgcctctttgaaatgcccacaggggtgccccttcggcggcactttaattccaactttaaaggtggcttcaacttctatgcggggctgaagggccaagtgctggtgctgcggacaactttaactgtctacaattatgattacatttgggactttatcttctaccccaacggggtgat

SEQ ID NO: 51112 - DNA, 783 bp, Glycine max
  unsure (1)..(783): unsure at all n locations
  Clone ID: PAT_MRT3847_17166C.1
ctcaatcggtttctactgtagtggggaccatttcggaagggaacgaaaatcactctttgtgctggccacaggcttcgagaatccataccttttccattgttagggtacattgctggacaccctcctattagtataagaattcgngccacagagaaactcgtttgtgtttctttttcagagatctgcttaattgcaagttcaagctggtgaaatcttggattagtgctcccactctcctatctggcataggacttcatgggtagacttttctattactctgctttctttcactctcttcttctcactgatccgcattgccgatcaaagtggtcttatttgaaaaacacttgggcgttggtgcaaatgtttgcttcgttaatggtctctggagacaacaggttcactgagacaacaatttttaattgcagagatttggacatcttggttgttcattatacaatagcaactcaatttaaaaaatttttaccacattacattaggtggcatctgtatacctcgctgatctacattctacaatcttttctcactgctgaaattaaatataagcggaatcagagtaatattcaaatttacggcttattttacgacggctgatacaaaatctggactaaacacgagaaaaatctagcttttgacagaagaagaaaatatggaagtgattacaaatagaagcattcctgctgatgttcatgcaaagcgagctcaagaatgtgaaaaacaagttgttcatgaaagtctgaaggatcaaatttcttgctgatg

SEQ ID NO: 51113 - DNA, 274 bp, Glycine max
  Clone ID: PAT_MRT3847_17167C.1
cattgggggaataagagcagccccaaccggaaatgaaagatgccctctcactgtggtgcaatctcgcaatgagctccacaaagggattgggacaatcatgtcggccccatatcgaatccgttttatcgccgaaggccatcctttgaggcctaagttcgattgatttgcaggtataatgctgggtgtgtgaattcctaccgagtggtctgctggggatgatctaccagaaggacctgctgttaaacatggtgagaacacagatgcaatggatggg

SEQ ID NO: 51114 - DNA, 245 bp, Glycine max
  Clone ID: PAT_MRT3847_17168C.1
aatcataagtctgctgcaaggattattgagataatcaggtacaaatgtagctaacctctacactggactcttggaattagtcgcacgcttactcagaaaagtggagaggccgagtgacgacacatgagaacgcctaagggaaatacaattccagatctgcagacagcatacgacgcaacagtgttcatatacactatggggaaatgaggctcctcagggggccaaagctgaatcctgtggaaagt

SEQ ID NO: 51115 - DNA, 929 bp, Glycine max
  unsure (1)..(929): unsure at all n locations
  Clone ID: PAT_MRT3847_17169C.1
agcnnagttnntgagannnnagannnntcagtcannnagcaangacgcaatgtgaaaaacaatgttatcaaaatttggnngnatttggtccagtcaatgtttagagaagctgagtggttgagaaccaagactgtgccaacaattggtgactatatggaaaatgcatacatatcatttgncntaggaccaattgtccttccggcccnctatnnggttggannnaagctttcagatgaagtcacagaaaatcatgagttgaactatctctataagctcatgagcacatgtggccgtcttcttaatgacattcacagttttaagagagaatccgaggaagggaaattgaatgtgctggctttgcgtattgctcatggcaatggagttattactgcagaagatgccaccgaagaaatgaagggtattgctgaagaaaagagaagagaactcctgagattaattttgcaggaaaaaggaagtgtagttcccagagagtgcaaggatttgttttggaaaatgataaaagtgttgcacctgttttacatgaaggatgatggatttacttcacacgagatgcactctagtgtaaatgcagtacttaaaaaacctgtcatccttaatgaattgttagtacattctcagcagaaccttagtcctgtcaaagccactaatgacctgatgctctagtccaatttgtacatacacatgacaagcaagacctgcccttgcttttgagtgatcattctataggaaccaaatgtcccaatctttcctaactttttaccaatttatttttttctcttacttttagttttttacttttcatgatgatcattttttttttgtcttgattgtctcaggatccaatccatatccataaatgttaagtatgcatccctgtaacgttttctggtgaatggaagggttgaaaa

SEQ ID NO: 51116 - DNA, 139 bp, Glycine max
  Clone ID: PAT_MRT3847_1716C.1
gctggcagagtccagtttcagaaaatacgcctggagccagagcagtcgactcgagtgccgacactgcgtcctcactcgcacttgatactgctgggagtcaagtcagctaggaaggtagcaggacatgttctcaaacagc

SEQ ID NO: 51117 - DNA, 436 bp, Glycine max
  Clone ID: PAT_MRT3847_17170C.1
ggagaagccggacccattttttatggaatttaaaattttcgggcttaaaaatggcccaaaaaactccattccaaattaatttttttccagaaggtgtttcttccaaagtttcccccggaggtatgggttttaaatggggggggccctgaacctaactggggcccggtcctggtcctggggggggcggcggggggggcggtaagggggggggcaaatggaactttagcaacacatgcctttgggacaggttttttttgcccaacggggggaaaaccctttttagcgggggttttttgggggggggggggttttatttttttccaaactagccctccaaaataaggggttttttacaattttcattccccggggcccccaaaaggccgcctttgggggcctaattttttaatcgaacccaacggaaaaggaaaagctt

SEQ ID NO: 51118 - DNA, 128 bp, Glycine max
  unsure (1)..(128): unsure at all n locations
  Clone ID: PAT_MRT3847_17171C.1
ttccaattctaaattcctaaaaactacatccaatccttcttctaaactccatttttctctcaaattntccactccaaaccttaaaaacctactattcattcatacaccccaaatcaattatctctaat

SEQ ID NO: 51119 - DNA, 373 bp, Glycine max
  Clone ID: PAT_MRT3847_17172C.1
cattcatatcttttcaatcggctaaaaaaaataatgttattgctatcctacagtggggagttctaagtactggtggatttagtccataatcttcatggtctaaaattcctctgctagctacatttcacatttgcttgcatcgtgattgtaaattttttaattttatatatacatacatatatataggggctatggggcgttcgggttctactacaaaaagacatcattttgaaattccgaccacgtcaatgtgatcggggtttagcgaagttcataaaaataacatcaattttataaaaaaataacttctacaacatcacatttttaatggtttttcgaaagaagtgcaaaaacattcctttacgattcccaa

SEQ ID NO: 51120 - DNA, 465 bp, Glycine max
  Clone ID: PAT_MRT3847_17173C.1
ggttttttttttttttttttcgatgttaacatggaggaacttgtattataagaattatttatggcacttccatcaacttcattactttccaatcctttctccattttactttcaccattttctcctgcaccagattcttcactttcagataatttggttggggatgaaacactttcatgtttcattttccctgggtgaatgccaccgttgatagcaccattggaaataagaaatccactagttgcagcagtagtctttctggtaatgacatccgaaggggaacaaccttctaatgacgtatgcacttcatcaaaacttgggacaggggataccacatttgctcttcgagtgcgagaaatttttttggggtctctgtccaacccattgggccataggagatgaagatgatcctacaggcaaaggacgcttacgatttatagtaccacttactgaatgaggcttgtt

SEQ ID NO: 51121 - DNA, 442 bp, Glycine max
  Clone ID: PAT_MRT3847_17174C.1
gttgagagagaagaataaaggggattgaatggaaggggaaggggggcgatggttgcattttaggagcaatttagatatataatagaacaatgtaggattggtgtttttgttttggcacgggccacaaaaacagtcacgctgctttctgcttttgttgtggtgtctcctcaagtggacctcaacttacttatctccttcttcccgcatgatcccaaccaaaatgcagtaatggaggactctgatgaagatattgtctgcaactgggtgccttcctcccccgaataaatggatttagggctttcaattcttcttcagcccctttttggagattccccagtgctgcccttgccttttcccattacttgcaacggttcaattcaaagctgcttcttctttagaatattgctctttatacccctttgtctcaatataacccaacaac

SEQ ID NO: 51122 - DNA, 1047 bp, Glycine max
  Clone ID: PAT_MRT3847_17175C.1
ctttagagtctacttcctttgatctattcttttctacaattattgtaatctacccaatattttagtgtttcgacatattccccatcaattcaataacttgccgtgtaaattgatccattctaaacaatatctcccttcttagccaaaaagatcaaagtttcgttatttatagccaaaggctttctgggtcgttgtgagtcttgtgtttgagagattaagacctttttgcattgcaaatggctgctgcaactgctggagttgttggtggaaatggttcgtctgcttcttggatgcgattcaaaggcaaggaaaggaagcaaaccaagatgaacaagtcaaggattagttgctcttattcttcttctgtgatggatccttacaagaccttaagaatacaacgcggtgcctctgaatctgaggtcaggaaggctttcaggcagcttgctctgcagtaccatccagacgtgtgcagagggagcaattgtggggtgcagtttcacgaaatcaacgaggcttatgatactgtgatggccaacttaagaggagaatcaaatgcgacagaatcgtatgaggcttattatgatgctggaattgatgagccactgaggggaatgaacgatccagattgggacatgtgggaggagtggatggggtgggaaggagcaggaatccgtgactactcgtctcatattaatccttacatttgataaatttgttgataattattattagtcttttgaataatgattgtgcattagttaaagtggggtctggtctagagtctagacctacatacatgttcccacccaagtggctggtgttctttgtgtatagtccaagtgaatgtaaagtgagtcctctctctctgcataattgaagatgaggaaatgactctttaatccttaagcctgtgctcggtggagaagaaaaaatgaaaaagaaagaaaataaaattctttcatgaagtcaattatccctttttatttttctctcactttttatcaaaccaaataaaaaaaataatatcaaaaagcatatatcttttat

SEQ ID NO: 51123 - DNA, 513 bp, Glycine max
  unsure (1)..(513): unsure at all n locations
  Clone ID: PAT_MRT3847_17176C.1
ggagttgttggtggaaatggttcgtctgcttcttggatgcgattcaaaggcaaggaaaggaagcaaaccaagatgaacaagtcaaggattagttgctcttattcttcttctgtgatggatccttacaagaccttaagaatacaacgcggtgcctctgaatctgaggtcaggaaggctttcaggcagcttgctctgcaggtttcagtcccaaccctcttctattgatattttatcctaattaattggatttagccattttgattttcaataacttatatttagttggttttctattgtgcttgcttcagtaccatccagacgtgtgcagagggagcaattgtggggtgcagtttcacgaaatcaacgaggcttatgatgtgcgttacatatcctgcaactacccttttctctaaatttcagttgcatatttatttgcaccgcgtagaatgaaaacataaaactgctagttttatatatgaattgtgatcatcntccaattagcataagtcaaac

SEQ ID NO: 51124 - DNA, 271 bp, Glycine max
  Clone ID: PAT_MRT3847_17177C.1
gcacgaggttaaattgtcaagtgagggagtacattgctttgtatataatggcaggttgagtttgattggtgtttctatttcggctttgttcttaaatcaatgtcccgtcttggtgggcattatcacttgttatgctaaaagaggacccaactatggctccaaagtttgaacactcaagctaacatgatcagattgctgttgaagaaaagggaaatacatgtttaggaagttatgtactgctgatatcaaggaatgaagattaacgggcaaa

SEQ ID NO: 51125 - DNA, 779 bp, Glycine max
  Clone ID: PAT_MRT3847_17178C.1
gttttttttcttcctatcctatctagtgaaaatgaattgaagggctaaagcatgaaagatttgatattgatctcttggaatttgaaagtttagaaattggaaaatagtagtgagagtattgatgatgggcaagaagaagccacaaaaaactaaggaactttctgtggcaatagctgaagcatcatcaacaatagatgagaaagagcaacatgaagttcaagttcaacctcaacctcaagctcctcgaaagagaggtagacctcgtaagattgttttaaagttggaagaaagtgaagaggaaaaggcacaagtgatagagcaaggaggagcacaaggcacagagagttcaatggaaaaaggtacaaccaacgaggaagaaggaacatcatcggcatgcatgagggttacaacaaaacaagaagagatacaacttccaaaagtggagccatcgagaagcagagctaggaggaaaagcaaacccagaaagagcagttaattaattatatatataatcattgctccttttttctcttctctttttataatttctttctttcccttctacttttttcatgaagcaattaattctaggttggttcctttggtcttgccatgtttttttatttcggtgaatattggtatttaaaactgatattgttgttgttggggaacacaagtgtcaatagaaacacttgaagtttttattggtttagttctttggtgtaagtggtttatcttatctttgcgtggacgatatgtactgtgttatggttggttca

SEQ ID NO: 51126 - DNA, 500 bp, Glycine max
  Clone ID: PAT_MRT3847_17179C.1
ttccaggaaggtttcccgtcatcactgtatgacgtcctccttctttggggggggggggggggggggggggggggggggggggagccaaaaagagttaaacttgaagaggggtaaaagaaatacaggatataggcgttaaaaggaaaagaaaaagaaaagatatttaggataataaaatactaagaggaaataacgctatacagaccgctgcatgtgggtgatactgcttgcgacccgacgaacccaggtcgtagaacacagctccaggtaacgcgtagtgttaaacgtatgtttcgctattaccctgattccctttatagttacgacagagtcatccacccatgtaaaagttgtaaggggatttaagttggtaatggtgtggttagaagacaattgcaaagtaaccaagacagaaaagctgtttccccggtacagagtggcatattagcgagggtgtgaaaatgggggattaacaaagtttggtctgtttgaaacctggg

SEQ ID NO: 51127 - DNA, 1152 bp, Glycine max
  Clone ID: PAT_MRT3847_1717C.1
tagactaatgtaatttttattcatagagaaaaaagactcatgtaattttttaataccaaagtttttaaatacaatttaataaaaataagttattactaaggtcaaagcattgtacaaggaatgtatagcaatggaggaactcaaattcccagaccagcaataggagcatccaagaacacatccaatgatgaacaattgtagaaagttctcaccagagaagtgaattgcactgaatacaactgagcttatggcaacagcttgctgccactccaaggtagaagaaagtgaggtcaaaagaaatcccctataaacaacttcttccaaaaggggagtgacaatgcaataagcaagcacacaagacaatcttgagatgtcaatgtttaggagcatgtccctcagtatggggttgttcacaggcttgagatgtcatgcaataagcaagcccttggtgtaggattgagatgtcactgtttaggagcatgtcctgcagtatggggttgttcacaggcttggagccaaataatctgtcagcaagtagagatgttaggaaaattaacagaacaagaaacccaaatcccacagctgatgacaaaaaccagttcctgttgctcaataatttgttctttctggagaaatttgaaaacttgtattgtggcttagctgtgtacttcaataaaactagagccccaccaaactcgagaatttgaatggtgagaagtgataaggcctcagtttgtgggtcaagaacaggttgtccattaaatagagcaaccacggataagcctccaaagctaaaagggatatgcagagtgaataaatagagtgcaagattgctccacacgttcccactctcccatggactatcatcctcttgcaactctgagaatccctgagaaaagggtgtgacgtgttctttcctattgcaaaagcacttgaaagggttgcgttgggagggagtgcttcccaattgcagtttcggtgaacatttcaggctataatctgtgtttgggaagtgaaggcactgaaagggtgtggccaactcatgagatggacacaccagaaccgacaacatttgcctctggaatcgaatccttaatactcaaacctttatcttgcaatatagtattccacgactgagattgaaggtcttca

SEQ ID NO: 51128 - DNA, 384 bp, Glycine max
  Clone ID: PAT_MRT3847_17180C.1
ctttgggctgattgatgtgcttgcatggtcgtgagaagatcatagaaggggatagtacacacactaacaactcaccccacatcacgttgctaccccgacaacccctggcgcagccgacagttacggtcatttgcggaaagtccgaggccgataccgactctaagcttaatgtacataagcatcggtaaatttccacgaacctcatcgaaacacctttcaacgttcctttatacgaccataaaagtaccgaggcctccgagggcgacggtaagctcttcggcctcacttgttatacaagccacggcgaacgcctattatccgcgaaactacttcccgagaagaccgacgtcgccgacgaggaaaagaaagcaccgctgcatatca

SEQ ID NO: 51129 - DNA, 417 bp, Glycine max
  Clone ID: PAT_MRT3847_17181C.1
ggctcgaggttaacttcgtttgctctatctctcactctttcgaggaaactagcaatggctgaaccatccaaggccattcacgttccaaatgtggggcatgatacatctgaaaatgacatagcttaaactacataatccgtaccgagtgataacaaagctcgagaggtggcgagccaaaaatcaggctcttcttcgcatgcaacacattacttctgcaaacaatgcttgacaaaaataagcatatggccagccatgcctatgggggccaaatgggtatggccacactttctcacattatggactcactaccctgggtcaaaatcatgcccgactacacgagcctaactggaacctcttagacacagttcatcacaagctgcatcctataacagacggtgtgcctcatcaagagcttgc

SEQ ID NO: 51130 - DNA, 217 bp, Glycine max
  Clone ID: PAT_MRT3847_17182C.1
ctaggaaagaatgggggagacttgtattattgatttccaaaaaatggacaaaaggtactaagcctctgtctgaccacactatatatagcacaaagcttaaactgacgccagggctaaacatatgcaattgaaactaaatataaagggccttccaaatgcaaccccttgagaaccaaaatacgattgtgagagaacctatactctcattgtaacaaaa

SEQ ID NO: 51131 - DNA, 890 bp, Glycine max
  unsure (1)..(890): unsure at all n locations
  Clone ID: PAT_MRT3847_17183C.1
gcacgcacccggacttactggcccgacccacccacccgtgctaataatcgtccgcacacacccccaacgacacaggcggaaattttgacatgtactgcaagtgatcccagaactgcaatggtgagtaaaaatagcaagcctcatgctactgcaatgcatgtgggagctatagaaattatcattgataggttcgcaagtcctgactgcaacataattggcgcaatgcttttggttgatacttatcataccaatcctgaaaatgcagatcgcagtatttttgttgcgcctttcagaggcggaaggcccattcaggtggacacatttccgaataccattgtgcagattgaaccagacatgaattcaaggtttcagctattgagtaccactaccaatggtgattttgttcaaggaaaagatctcgcaatggttaaagataatgtaccatgtgctgctgctggctagacatcaagttacactccaactccattgttggaatgtggtttgcaaaaagacagagggttaattgtggaatattttggaaggatgtctgacgtggctcataacgtttatcagccccaagagatagatttggcggagggaaattctcccttggatattaaatctcgctctagattggaaaaagttggctctactaaagcacaatatgttagtggaaaaacctccaaatatgatataataggtgctggttcacattcttcagaagattttcctgaataagaagatcatgtataacccaaaaagattgatgccagattgagacaaagaatagatcctcattacaatgaggttcaagctcagatggaaacaaatcagagtaaattgtctctagatgacagtgaaactnctaaaggttccatgtcggatcttaa

SEQ ID NO: 51132 - DNA, 807 bp, Glycine max
  unsure (1)..(807): unsure at all n locations
  Clone ID: PAT_MRT3847_17184C.1
ttgcatgcctgcanccatactcccctgccataattaaaacaacccacaaacaatagcattatatggagaacttattactaagtaatactctaaattcaaaaccaaagggaggtaccaagttacctaatataattatgtgctcttgaaagggaaatttaaatgggtaaggtacccctgtctttggataaacaatcatggcaccataaaccgttcctcttaaccaagaaacatgagcatgccagaagaaggtgcccttctgctgcacaactgtaaaattataggtgaaactctggcctgcttgaattggacattgtgtaatcaaggatggcccatcataccagcatgatagcctttgccggacaccatgcctgaaatgtaaaattcaagtttgttagctataataatattgttaacagggtgaactatttatgtacgaggttgtcattgggattaccagtgaattgtaacattgaaaggtgtcatattggtcacttttactatgattctatcatcctcttgggcgtaaacaactggtcctggaaacataccattaattgtgacaatgtctttggagctgcaaattttggtaactctttttgtttgaacctatgaagtaaccattaagagcataaataaatagagaaaaaggcattggagaaacttcattccactggaaagtacaataatgtgtcataatgtgcacttaagttataccttgaaatatagaacttggttgattctaccttggtactcccatgtgctagaaggttcacgttgtagataagtgatatcatactcaacgacagc

SEQ ID NO: 51133 - DNA, 873 bp, Glycine max
  Clone ID: PAT_MRT3847_17185C.1
gatattggaatttctgaaccgtccctgattttattgcgatataatatgtggaactggagggactgatcaccccaatgcaggatgcatcaggttacaattgattggttcattcactatcaggaatgaggatccaggacctatggctttcacgactccacaaaatccttgggagttaaatagggggatgggaaaactgactttccgccaatgcactttctgaagtgttaaaagaacgtctatatctatacggggaggatctgatgcaaagaatgctactctgcatgaatatgccaaatgctgttctttcaatgtggagatattttgttggagatctcgtctttgaagttgataagatgacttctccctacattaaatgtacagtctctttcttcatagcattaggaaatttggctgatgacaccatcaattttgaggcctttccacacaagctggtgcagtttggagagattcaggaaaaagttgtattgaaattttcacaagaggaatttcttacagcttggtcaactcaggtgcgttctgcaacaactctgttggctgatgggtgtccatatttgtatgctatggtgcatgatagttcagtgtctacaataccaggtgattttgtcattggtgttaagttggcaaccataaacaatatgtgtgcatatgggctcaatcctgttatttcaggttcttgttttttgggcaccatacctcagtccatatcacagtaaactggttgtaatcaaatggcaactgtgagaacaccattttatttttgatccttgcaagcagagcttttgtcaaatttttatcgaccttcttggtggaggaattctattggacaaaacttgagattggttcacacttatt

SEQ ID NO: 51134 - DNA, 783 bp, Glycine max
  unsure (1)..(783): unsure at all n locations
  Clone ID: PAT_MRT3847_17187C.1
ccacgcgtccgggaatcatgaaagctgacaaatagaatagatcctgcatagactttttgaggctttcctctaataaaataaaatcctccaaagagagtcgcactcttttaaaagggcttcccgtccattctacctcaagcctccacttctattcactccacttgaaaatggccaacttaatcaccttgttttcgctgtggttgagtatgatgtctactatctacagtgtgaagcttatagcaaatggaagtactaagggagaatccacaaggttctatgatttcaaggttcaaactaaaagagttaccaaactttgcaactccaaagacattgttacaattaatggtatgtttccaggacctgttgtttacgcccaagaagatgatagaatcatagtaaaagtgaccaatatgacacctttcaatgttacaattcactggcacggtgtccggcaaaggctatcatgctggtatgatggggcatccttgattacacaatgtccaattcaatcaggccaaagtttcacctataattttacagtggtgcagcagaagggcaccttcttctggcatgctcatatttcttggttaagaggaacagtttatggtgccatgattgtttatccaaagacaggagtaccatacccatttaactttccctatcaagagcacataattatactagggggagtattggctgcaggatctccaacnnaatgagaatgccactatagcaagtgggagacctnctcctatagcagatgcatataccattaacggtcat

SEQ ID NO: 51135 - DNA, 626 bp, Glycine max
  Clone ID: PAT_MRT3847_17188C.1
cggtcgcgtggtcttccaatgcggagatattctgtcggagatgtcgcctttgaagtttctaagatgacttctccctacattaatatgtacacgctctcttctctctcatatgcattctggaaatttcggctgatgacacccttaatttcgaggcttttccccacaagctggtgcagtttggagagattcaggaaaaagtctgtatcgaaattttcacaagaggaatttcttacagcttggccaactcaggtgcgtcctgcaacaactctgttggctgatgggtgtccatattctgatgctatggtgcatgatagttcagtgtctacactaccaggtgattttgccattggtgttaagttgacagccataaacaatatgtgagcatatgggctcaatcctgggattacaggttctggtcttttgggcaccattcctcagtccatatgacagcaaactggttggaatcaaatggtaccagcgagaacaccactaaattttgattctagcaagagagcttttgtcaattttctattgaccttcccggcggaggaattgtagtggacaaaactggagagtggatcacacttatacaaaattgtccaattaggaacttggtgagagttgct

SEQ ID NO: 51136 - DNA, 804 bp, Glycine max
  Clone ID: PAT_MRT3847_17189C.1
aagttgacaaccataaacaatatgtgtgcatatgggctcaatcctgggattgcaggttctcgatttttgcacaccattcctaagtctatttcacagccgactgtttggaatcaaatggcaacagcgagaacaccatcgaattttgattctagcaagcagagattttgtcaatgttctattgaccttgtcggtggaggaattttagtggacaaaactggagattggatcacacttatgcaaaattctccagttagtaacttgctgagagctgctgcttggaagaaaggctgattaatggataagattgagatgtctgggaatgcagtaatcaaaaggagtgattgggcctcattggtacaagtgtttttaacaaacagcaacagctcagagcattctgatgcatgtgagtggacacaatcggcaccacattcctgggaattgatcttcccaatagaggtgtgtggtcctaacattggttttgaaatgtggagttctgagtgggcaaatcaaacttcatggcatttgagttttcttattgacaatcccaaacagactacagtttttgacatttttttgggaatttcccaagattttgaaattgctggttatactcttatgccagctttttttgttccacaggctactgccatatcttctgaaaatgcggaatcctctgcatgatctggaatttgtgttttctttcgtttgttcgtttgttaattcactaaggaaattaggcatgaccctcttgttgaagatgctctgcctatgtgaaaatattcacaccctttttaattgttgtaa

SEQ ID NO: 51137 - DNA, 639 bp, Glycine max
  Clone ID: PAT_MRT3847_1718C.1
tacggctgcgagaagacgacagaagggggaggtagtgaggtacgtagctcaaaaaggtgttcccacaaagcaaggtatagctcaatggcatcatcatttgtgggtactttattacccaaccacttcacacaaaccaaacactcagctgttcctgcaagtagatcaggtgctccaagaaggaggagagtgcacttagcaacaacaagagcagagaccatgactactgtcatagaaaaactgggcattaagattgagaggaaccctcctgagtccaagctcactcaactgggtgttaggcaatggcccaaatggggttgccctccaagtaagttcccatggacatatgaagccaaagagacttgctatcttctggaaggaaaagtgaaggtctttcctagtgggtcgaatgagtcagttgaaattgctgctggtgacttggttgtgtttcccaaagggatgagttgcacttgggatgtgtctgttggtgttgacaagcactataattttgaataataagaacttccatgaattgatgattttgttggatataataagaaactttggagtggtatttagctttgaaggtgtttttctttgcttctgtttcaaaaaaaaaaaaaaaaaaaaaaaaaaaagaaa

SEQ ID NO: 51138 - DNA, 176 bp, Glycine max
  Clone ID: PAT_MRT3847_17190C.1
atcatcatcatccatggcggttcctccgtcggtcgccgccgctccggcgtcgctctacgtgcgggagctccaccccaacgcgtgcgacatccatctcgttgtctcattctacgacttctagagcgctcagtatgttctcgattttattgactcctggagggggggagccctctgtt

SEQ ID NO: 51139 - DNA, 737 bp, Glycine max
  unsure (1)..(737): unsure at all n locations
  Clone ID: PAT_MRT3847_17191C.1
aatacttgtccgcccacgcgaccgaaggaaaaggggctgattacaccattaatttcgcggcttttccccacaagctggtgcagtttggagagatccaggaaaaagtcgtatcgaacttttcacaagaggaattccttacagccttggtcaactcaggtgcgtcctgcaacaactctgtcggctgatgggtgtccatatttgcatgctatggtgcatgatagctcagtgtctacaataccaggtgattttgtcattggtgctaagttggcaaccataaacaatatgtgtgcatatgggctcaatcctggcattccagggtcctcgcctttcgggcaccattcctcagtctatttcacagcagactgtttggaatcaaatggcaccattgagaacaccattgaattttgattctagcaggcagagctttcgtcaattttctattgaccttatcggtggaggaattttaagggacaaaactggagattggatcacacttatacaaaattctccaattagtgacttgttgagagttgctgcttggaagaaaggctgtttaatggataagattgctatgcctgggaatgcagcagtttaaggagtgattgggcctaattggtacgagcgtttttaacaaacagtaacagttcagatcattntgatgcatgcaagtggaccaaaatcgaatcacatttctgcgaattgatcttaccatagaggtatgtgggcctaataatggt

SEQ ID NO: 51140 - DNA, 594 bp, Glycine max
  Clone ID: PAT_MRT3847_17192C.1
aaccaagaaacccaagttaaggttttttgcaatcttcccttctaaaaagaaatggccggaaaaggagagggactcgccatcggaatcgacctgggcaccacctactcctgcgtcggagtctggcagcacgaccgcgtcgaaatcatcgccaacgatcagggcaaccgtaccacaccctcttatgtcgccttcaccgataccgaaagactcatcggagatgccgctaagaaccaggtcgccatgaaccccatcaacaccgtcttcgatgcgaagaggttgattggtaggagagttagcgacccttctgttcagagtgatatgaagttgtggccattcaaggttactgctggtgctggtgaaaaacccatgattggtgtcaattacaagggtgaggaaaagcaattcgctgctgaggaaatctcctctatggtcctaacaaagatgcgggagattgcagaggcttaccttgggtcgactgtgaagaatgccgttgttactgggcctgcttacttcaatgattctcagcgtcaagccaccaaagacgctggtgtcattgctggcctcaatgttatgagaataataaatgagccaact

SEQ ID NO: 51141 - DNA, 960 bp, Glycine max
  unsure (1)..(960): unsure at all n locations
  Clone ID: PAT_MRT3847_17193C.1
cgcgtccggtcgacgggcacatgtattttatttccatcaagaagacattgacccacagacgccacaaagtgtgaacgaggctaactttcgtatcagagtacccctcaatttttgcagctgctgcttcctttttattgtttccttcgcttggagaagaacgttaagcagacaaaggatatctctttttctttccaaagaaaatttattattctcttttgcacaattcaactccaaaaccggatctacttcttcaaccgcgtcattcatttcaaccttcaagctacggaagagcgatgaactcatgatattgattagcatctaaaaatgtttattcttcgtcaccatacaaatctcgctatagtcctcactatcttcatagcttgcacaacaagagcacaaaacctcaccacctgcaatggcaaatgcggggagcacacccttcagttcccttttggcttctcccaaggttgtccaatccagcttgactgttccaacgaccaagtccaacttcgcagcgaattcggtgaatttctggtccaaaacgtaacaaacagcaacatattcgtaaatctgcctgcaaaatgcaaccgtaccatggaatcaattcagccaatttttactgagaattttgccccaacgattaacaatagctttctggtgcaagattgtagagaggtgtttggtgggtgtgttattcctgctagttttgtgagcaaccaaattgatgttgagaactgcagcaacaaaagtgctaatatcagttgcttttcgaaacagatgaagtttttgtgacgtacgctgatttgaacgggactaagtgtaagtacttgttctctgcggtttctttggggcagagcaaggagattccgctgcagtttcagggtgttgagtgggngggggtggcttcctgggcagtgcgaagatcatcaatggtctaacaacgctacctgcacaacggtc

SEQ ID NO: 51142 - DNA, 1674 bp, Glycine max
  unsure (1)..(1674): unsure at all n locations
  Clone ID: PAT_MRT3847_17194C.1
aaaaaaaacacacacttcacacattattacgacaattaaaagagggggggaaattttcaaataggcagagcatactcaacaagaggggcatgcctaatttcctttattgaattaaacaaaccaacaagcgaaagaaaacacaaattccagatcatgcagaggattccgcattttcaaaaaatctggcagtaccctgtggaacaaaaaaagctggcataagagtattaccagcaatttcaaaatcttgagagattcccaaaagaatatcaaaaactgtaaactgtttgggattgtcaataaggaaactcaaatgccatgaagtttgatttgcccactcagaactccacatttcaaaacccttattaggaccccattcctttattgggaaaatcaattcccaggaatggggttctgattttggccacttacatgcataaaaatgctctgtactgtggctgtttgttaaaaacacttgtaccaatgaggcccaatcactccttttgactgctgcattcccagacatcacaatcttgaccattaaacaacctttcttccaagcagcaactctcaacaagttactaattggagaattttgtataagtgtgatccaatctccagttttgtccactaaaatttcttcaccgagaaggtcaatagaaaattgacaaaagctctgcttgctagaatcgtgagaacaccattgccatttgattccaaacagtttgctgtgaaatggactgaggaatggtgcccaaaagacgagaacctgaaataccaggattgagcccatatgcacacatattgtttatggttgtcaacttgacaccaatgacaaaatcacctggtattgtagacactgaactatcatgcaccatagcatacaaatatgggcacccatcagccaacagagttgttgcaggacgcacctgagttgaccaagctgtttggaatcaaatggcaacagtgagaacaccattgaattttgattctagcaagcagagcttttgtcaattttctattgaccttctcggtggaggaattttagtggacaaaactggagattggatcacacttatacaaaattctccaattagtaacttgttgagagttgctgcttggaagaaaggctgtttaatggtcaagattgtgatgtctgggaatgcagcagtcaaaaggagtgattgggcctcattggtacaagtgtttttaacaaacagcaacagtacagagcattttgatgcatgtaagtggacataatcagaaccacattcctgggaattgatcttcccatagaggtatgtggtcccaataatggttctgaaatgtggagttctgagtgggcaaatcacacttcatggcatttgagtttccttattgacaatcccaaacagtttccggtttttgatattctcttgggaatttctcaggattttgaaatgcctggtaatactcttatgccaggctttttctgttccacaggctactgccagattttctgaaaatgcggaatcttttgcatgatttggaanttgtgttttctttcgcttgttcgtatgtttaaaccaataaaggaaattaggcatgaccctcttgttgagtaggatatgcatattncaaaatttccacactcttttaagggtggtaatgaggtgtnaagnncgtgttattttaaaa

SEQ ID NO: 51143 - DNA, 2665 bp, Glycine max
  Clone ID: PAT_MRT3847_17195C.1
tcgccctcgagcgctcgagcccatacggcctgatactgaactcatctcactacattaatattcccttgggtttcattaattgtgacatttagctttttttattgaaccgtgtcaatggccgctactatgaaggctttagcttttgttgctttgcttgttaccattaatgcaatagtgtgtgaaagtagagtggcgagaaaggaccttggattggaccttggtggggtgggaattggggtgggtgctggggttggactaggccttggtggtgggggtggtgctggttctggtgcaggtgcaggctctggctctggctctggctcttcgtcatattcaagttctggctcctcttcttcttcatcagggtcaggctctggagcaggttctgaagctggttcctatgcaggatctcatgctggctcaggctcctctagagcgggttctgaagcaggttcatacgcagggtctcatgcaggatcaggatcatacggtggtaatggaaagtaattaattaaatgcatgccagttaaaccatatcaattatatgcatgctgtcctgtggagaaaagaacaagtcggtgtctttgttagttcactagaattatactttagtaagtaagcaaaaataagttgatgcatgtgttgtgtccatcctgttctttttcttttgtacaagtaggaatcgtgcttctccctgtgtccaatatgcaatagtttccttgaaaggtggttgaataataattaaatcatgtatacgtgtctgttactttgttattggtttatccagtgacaattctataatatatcaactatggcttttataagtttccaaagataaggagcctgaagttgagaagatacgaaggttatcaaagaatcctaaatcgaaaaaaggagaagttccttccttgtgtgaggccttgaaccaggcggtgcctccttctgtgccaccttctctcgacggtcacctacggcctcgaacagatggggggatgggctcaagcgaagataatcagggggatgtacaaaatatttctagaagcagcagtgccgatgatggcgacttcgcgccaccgcccaggcacctgccggaagctgctgaggccgctggcggcttttcggattgcttgcatgcaaaatcagataacatacaattgggtggagaagaacgtccattggttgccccaaaatcctcaccagagatggctgtaaatggatcttaagctttcagaatcatatgcaggaagacagattatttgttttatttgacgtatagattttctggtgggtaagtggttctgactacatacatagagctttgagacgaaggaaatttacctacaagggggtaaattctgcttttgcgttgcatcgaggacgtgggaatactgtacagtgccacaaagaggcggcgggaagatattaatacagcaacgtgggtgtatctggctcctattcttcagtttgctattttgggcttttgagcttagtagttgttgtttttgtatgacattcctgagaaataattctgtattttccccttctccaaaatttacctcttccagctcatttattttcaaagtttctgccagaatatccaagtgccggtgaggggttatcattcatattatactacattatataacccttctcagtatttgaacttcctgatagagggcgccaatatcttgccctacacaggttttccgtgtgtttttttttcctcttttgtttttttcttctaaggcccatttttcacaaatgtgggaatcatcaaccgttgtaaatctgtattaaactgttgaatattgcaaagtactcttatgcagtttgtccataaataattctgagttttcccctgctctaaaaatttacctcttccagctcatttatttacaaagtttccgccagaatgtccaagtgcgggtgaggggttatcattcatgttatataatattatttacccttctcagtatttgaacttcgtgatagagggcgccaatatcttgccctacacaggttttccgtgtgttttttccccctttcttttttcggtggtgggatgtgttggtaggaaaacatgcagtgagtatctaaggcccatttttcactaatgtagggaatcatcagccgttgtaaatctgtattaaactgttgagtattgcaaagaactcttcttctgtttctttctcagttctctggccaatttcaagttcaagctggtgaaattttggattagtgctcccactctcctatctggtataggacttcgtgggtagacttttctatttctctcctttctttcactctcttcttctcactgatccgcattgcccgtcaaagtggtcttatttgaaaaacacttgggcgttggtgcaaatgtttgcttcgttaattttctctggagacaacaggctcactgagaaaacaatttatacttgcagagattggacatcttggttgttaatatacaatatcaactccattttagaaaattcctaccgcattacattaggtggcatctgcatacccttgtgatcttacattctcccatcttttttcactgctgaaattcacaataagcggaatctgatgtatattcatatcttcggcttatctacgactgcagatacaaattcttgactaacactagaaaatcttgctt

SEQ ID NO: 51144 - DNA, 1075 bp, Glycine max
  Clone ID: PAT_MRT3847_17196C.1
tgcaactcctggtgccgccgcggcggaattggggggtcgcaccagtcctccgatttctttgtgggccgcgtggccggacgcatgggcggacgctggggcagcaggctcactgagaaaacaaatgttacttgccgagatgatgcacatcattggatgtttattatacaataggaactcaatttagaaaattcctaccgcattacattaggtggcatctgtataccttgttgatttacattctcccatcttttctcactgctgaaattaaatataagcggaatctaagtaatattcatatttccggcttattttacgacggcagatacaaattctggactaaacacgagaaaaatcttgctttgacagaagaggaaaagatggaagtgattagaaacaaaggcattcctgctgatgtttttgcacgcgagcttatgaatttgaaaacatgttgctcatgaaagcctcaaggatcaaattcctgctgttgacaagttgtattctactaaggttaataagtttgcaaaaattatgaaccttacacaaagtgttgctggtgatcttaaacttcttactgagtgggaggttgttttagggtaagcatagttcctgtatctaatattagtgcaggggagaatcatgtagttcaaataccccctaatggcacaggaggaaattttgttttctagtgcaagtgatttcagaactgcaatggtgagtaaaaatagcaagcctcaagctactgcaatgcatgtgggagctatagaaattatcattgatagtttcgcaagtcctgactgcaacatagttggtgcaatgcttttggttgatacttatcataccaatcctgaaaatgcagttcgagtatttttgttgcgcctttcacaggcggaaggcccattcgggtggtacatttccgaatacccttgtgcagattgtaccagacatgaattcaaggtttcagctttttgggtccacttccaatggtgattttgttcaaggaaatgatttcccattggtttaagttattgtcgcatgtgtctctgatgcttgccttcattaaccctccaactccttt

SEQ ID NO: 51145 - DNA, 227 bp, Glycine max
  unsure (1)..(227): unsure at all n locations
  Clone ID: PAT_MRT3847_17197C.1
gcaattacatactgaaaccaaaactgagtattatcaaactacacgagcacaaaaccaaggccagatggtttcaaggcacctacaaatcctataactgagacgagtaatagtggaactgtccatatcccggtccaaacttgagctgtttggggaaactctcattgcgcattacatccattggagggaacacatcataatccttttgctttnnnnacaatcannnnnat

SEQ ID NO: 51146 - DNA, 1118 bp, Glycine max
  Clone ID: PAT_MRT3847_17198C.1
ttttcgcgtccggatgttccgactgcaacatagctggagcaatgcttcaggttgatacttatcataccaatcctgaaaatgcagttcgtagtatctttgttgcgcctttcagaggtgggaggcccattcgggtggttacatttgccaataccattgtgcagattgaaccagacatgaattcaaggattcagcttttgagtaccactaccaatggtgattttgttcaaggaaaaaacctcgcaatggttaaagttaatgtagcatgtgctgctggtggcttgacatcaagttacacttcaactccattgctggaatatgtgttgcaaaaagacagagggagaattgtggagtactttggaaggatgtctcacgttgctcataacgttcatcaggcccaagagaaagatttgttggagggaaatttttccttcgatattaaatttcgctctacattggaaaaagtttcctctactaaagcacaatttgtttgtggaaaaacctccaaatatgatataattggagctggttcacatttttcacatgattttccttgaaaagtagatcaagaaaaacccaaaaagattgatgccagattgagacaaagaattgatcctcaattcattgaggtttaggctcagatggaaacaaatttgtttaaattgtctcttgatgatgttgaaactcctaaaggttccatgatggatctcaaaatttctcaatctaaaattgcacttcccaaaaacacagtttggggaaccattctgcgtagtgacctattggcaaatcttttgacagagggcaatattagagcaagtgttgatttgcagcgcactcatcgttttaaaggaatgattaatatggtggccacagttggtattcctgagaatacaggtttagcattagcctgtgctatgaatagtttctttagggggcgtgccccgactgatattttcaccatatgcctttaacactgagaattatgtaatcctgcttgctcaatcctatgtctatgtcatttaatccaaacccccgttctgatgcatggagttaggaaattctgaagcgtcccggatttcattgtgataccatttgtttaactggatggactgccactccaa

SEQ ID NO: 51147 - DNA, 241 bp, Glycine max
  Clone ID: PAT_MRT3847_17199C.1
ggcggtttttcgcgtgcgatttaaagggcgagcctcaggcgcagggagtggtgactaatgttcgggcacaaattgcaaggattggtcacctgatgaacattgggacgcaggctccatatgggtgcacctcaagcgcagggaaaccggaacggatctgatgaggagcttgagagggctcgcacccgggaattcttagactttgccttctcagctggctcttcgattaccagatgtgggagtt

SEQ ID NO: 51148 - DNA, 768 bp, Glycine max
  Clone ID: PAT_MRT3847_1719C.1
accaggacaccgagtccactcgagtggatcttggtacctctaacctatctggacatttggtacctgaacttgggaagctggagcatctacagtatcttgagttgtacaaaaccaacattcaaggaactattcctccggaacttggaagcctgaagagtctagttagcttggacttgtacaacaacaacatatcaggcaccatcccaccttcattggggaaattgaagaatcttgtctttttacgactcaatgacaaccgactaattttgcgactcaatcgaggcccaattcccaaggaactgtctgctgtttcaagccttaaagtagtggatgtctccaacaatgatttatgtggtacaattcctacatctgggcccttcgagcatattccattgaataactttgagaataatccccgcttggaaggtccagagttgttgggactagtaagttatgacacaaactgctcgtgaataacgtgatgtggtaggatctcaatctgcgttgaattatatatatgtattctaaaatttaagtgtattacctcatagtgtaatgggaagtggtaaatgtaatctctggtatatgtaaatttacatactgaaggacattggaatttgtgacttgaatatctattgatgtaatactagaaaaaagatcgacttggtcactcgctgataaaatatttgtgacgcattgctctccatgttattggttctttgtcaatgacaatgcaagtgtttatcgccgtggtattcacttcacaca

SEQ ID NO: 51149 - DNA, 479 bp, Glycine max
  unsure (1)..(479): unsure at all n locations
  Clone ID: PAT_MRT3847_171C.1
tacggctgcgagaagacgacagaaggggatgccttccaatttctcgtcacttctccgcaaatcctcgccgccgccgtcccaccaacacccgcaaattacagaccttagcgtgccaaacaaaccccaaccttgatcaaaaggatacccctaccacggatgaagaaaaacttgtggtcgagcccagcacgagtacaacaacaagttctcttcctcaattgccgaccaaaaacatcaacaacaaaatcgcacttgtttctaccttagcggccttggggcttttcttatctgccaggttggatttcggtgtttccctcaaggatctctctgccaatgcaatgccttacgaagaggctctctccaatgggaagcccactgtggtggagttttatgcagattggtgtgagggatcgagttaattntgtgatgttgaatgttgataacacanagtgggagcaagagcttgacgagtttggcgtgga

SEQ ID NO: 51150 - DNA, 1313 bp, Glycine max
  Clone ID: PAT_MRT3847_17200C.1
attttatcattgatagttccgtaagtcccgactgcaacatagttggtgcaatgcttttggttgatacttatcataccaatcctgaaaatgcagctcgtattatgtttgttgcgcttttcagaattggaaggcccattctggtggttacatttccgaataccattgtgcagattgaaccacacatgaattcaaggtttcagcttttgagtaccactaccaatggcgattttggtaaggaaaagatctcccaatggtctaaagttaatgtagcatgtgctgctgttggcttgacatcaagttacactccaacttcattgttgcaatctggtttgcacaatgacagaggcttaattgtggagtgctttgtaaggatgtcttacgttgctcataacgttaatcagccccaagagaaagatttgttgtagggaaatttatcctttgatattaacatctcgctctaaaattggaaaaaagtttacctctaacaaaagccacaaatttgttaagtggaaaaaacccttcaaaatatgattataaatttgggtgccttggttcaacatttctttcaagaagatttttccttgaaaaggaagatcaagaaaaccccaaagattgatgccagattgagaccaaaaataaatccttaatacaatgaggttcaagcttcaatggaaacaaatttgtttaaattgtctcttgatgatgttgaaactcctaaaggttccatgttggatctgaaaatttctcaatctaaaattgcacttcccaagaacacagttggaggaaccattctgcgtagtgatctattggcaaattttttgacagagggcaattttagagcaagtgttgatttgcagcgcactcatcgtattagaggaatgattaaaatggtggccacagttggtattcctgagaatacaggtatatcattggcctgtgctatgaatagttcttttagggggcgcgccagttctgatatttacaccatctgctctcaagactgtgaattgtggaatcctgcttgcacaaaagcaatgactatgtcatttaaatcaaacccgggtctgatgcatggagtttggaatttctgaagcgtcccggattttattgtgatattattgtgtcactggatggactggccccccaatgccgggagttcaggtacaattgattggttatttccctttaagaatgcgtccccggaccctttggttttaaatccccaaatcttttgtgtaaatagtggtgggaaaatgttttcccccgggccttcccaagtgtaaaaaaacccttttttttgggggggaggggcg

SEQ ID NO: 51151 - DNA, 1335 bp, Glycine max
  Clone ID: PAT_MRT3847_17201C.1
gtgatttgatcagaaaggaatatgacatgaagtgcaaattcttacggaatctggaatcaaaaggagaaaagacttctagaattgataaaatgcgtgctgtagtcaaggatctgcattcaagaattagaattgcaattcttaggatagactctatatctaagaggattgaggaattgcgggacaaagagcttacgcctcaacttgaggagttgattgacgggttaagtcggatgtgggaagtgatgtttgagtgccacaagctgcagtttcagacaatgtcaactgtgtataacaacagccatgctggaattgctgccacacactctgaattacgtaggcaaattacttcctatctcgaaagcgagctccattatctatcctctagttttatcaagtggattggagctcagaagttctatctggaggccataaatggatggctgcacaaatgtgtttctcttaaacaaaaaccaggaaagaaaaagagaccccaacgtccactcctaagaatgtatggtcctccaatatatgccacctgtgaaatctggttggaaaagcttggcgaattacccgtccaggatgttgtggattctatgaagagtttagcgggtgaaattgcccagttcttaccgcgtcaagagaagaaccagggtaaaggtgcaaatcactcccatttaacaacttggagtgctaataatatccgtagcgaatcgtcggataatctattgagagatgggacattagaggactgggattcaggttttgatcaatttcgtgcaagctttcttggatttctcgcccaattaaataattttgccgggtcttcgatcatgatgtacacagatcttagacaagccattcagattgccaagaagaattatcatcatagatctaattctcaggctcaagatggtcagtggaattctctgtctcaagatgataattccatgtctcaatcttgagttgccaattctgaaaagaaaatcccaaaacaataattgagtttcataggttgcattaaacatggtggagttgttgcagcattacaggtttatgttgaactcatgaatgttgagtttcatacaagtccattggatgtggcatttgtacatgaaagaaagaaaaaggaaggaagaaagtatatttacaggatgagcatacttatatgatagtttcatcatttcaataatgcaagacggtggttacaggttaggcaaagctgtaattactaggttctgttaaagtgctactatgcatgctaagagaaggaacttgtgaagtgtcatttttgtaaacaaaaagtgtcatatatagtacttttacttgattttcttt

SEQ ID NO: 51152 - DNA, 581 bp, Glycine max
  Clone ID: PAT_MRT3847_17202C.1
tgaaagagagctgaggactatataatagcaaaggctttctggtcgataagtcaacagatcttcccctaggaaagaaagaagaagttccgattctttctactaccatcacttcccgactcacttgttcaaacgatagtttaagttccggaactagtgcctgctcatggaatcgctgcttttgccgcttgaaagcttgtcgtctcaatctttcttaagaagccagagcaagtgcatgtgaaagttagcctaatactcaaattaggttctctttccactttgacttctactattgctacttctcgactcgacccctagatctcgaattcttaacagactcagactgcccttctacaggacaaaatcttcctctgctgccaattaagtagcaataaacctatccccctcatcgtatttttaaaaggcacgagtgaaaacagttcctgattccctcttgccttttttttccgatgcggttaaatctactttcgggggtggcatttagtctttgttagtggggcaaggagtgaagttcaagttccccttgatcagaggctttatgaagagtcaggaacgactttgaa

SEQ ID NO: 51153 - DNA, 350 bp, Glycine max
  Clone ID: PAT_MRT3847_17203C.1
aaggtcacaatgtatatcgaaaggtgaattaagctggaatggtgcattgaaccttcaacgaagatggactacaagactataaaaacattacagttctagacacaataggcctcacacttactcgaccgctaacacctactgtaactgctgatgatgctgcctaacaagagtcatatgaacatgatacactgtatgaggagacgctaatgaccagcaactgcttatggggatcctaggattcaccctaaccagcgaacttcccacgctgagacgagtgagatggacttggcacggaatgcgagagcatcttgtgctgcctgaacgatctatgggcggacgccgcatgtcta

SEQ ID NO: 51154 - DNA, 429 bp, Glycine max
  Clone ID: PAT_MRT3847_17204C.1
aatactaacaattcatatccttgctacaaatgcatacaacgtgttggattaagggcatgctttaatgcaagtgggtcctttgcctataatatgcatgaacaatcagttctgtgttagcgtggctactagtgattggatagaaaaccaataacgtcaacggaaccccaagcctccatcagtgaaaacctcattctctggatgcgagccacctgaacagaaagcttccacatcaatttgccaaggttctcgggcagcagcattgacagcttccttggcgttaccatcctgggagactatatcttctgctggacaactgggttcaaaacgaacaatggctgtctactctccttgaggaacagcgattgtttgccaactaaatgtttgttctgaactaatgctaactctgacaagttgccgagcggggagaac

SEQ ID NO: 51155 - DNA, 181 bp, Glycine max
  Clone ID: PAT_MRT3847_17205C.1
gtgaatcaaagctcacagcaaatacagcccaccccacaagacgcgtgagcacaatgagaaagacacacatgggtgagaagtgaatgtgtcatctcgcagcatggatacaatcatacagacattcacgccagctgctataaaagaaatggcaaccacaaaaccgaagggtgcccatgaaagc

SEQ ID NO: 51156 - DNA, 401 bp, Glycine max
  Clone ID: PAT_MRT3847_17206C.1
ggcccaaaaggataattaaataaaccggaaaaaaaacttcgggatcatcaaccctcccaccaaagagcaacggcccccgtttcaacgggaaaaaaaaccccaggggggggaaaccctcccccgaaaaagattccgggaaaattcaaaaaaacccaattttttttttaaaaaatccattttcccccccaaaaaaacaacgcggggaacctgcccggggggggggctgaaaaaaacaacctcgtaaataacccccgccattccccccccggggggaggcccggcccaataaaaccagggggggggccagggcccgcttaccaaagagggcccaaatgtcccacccgggttcaggggcgcccccgaaaaggccccccccaaaaaaaatttttccccggaccccg

SEQ ID NO: 51157 - DNA, 301 bp, Glycine max
  unsure (1)..(301): unsure at all n locations
  Clone ID: PAT_MRT3847_17207C.1
nnnantagnagtggaatcggtcgangtnatncaganggtattatagagaaaacattcntntggggtagtangcttgggaaaggtctgcnngttttnnnaaggactgggntnncactgatnaagnantgcccaatgatcntntcaanagantgagtttncgttnatganccatcttntncccatggagttcggcttantgaggtaaggactatncgtatgcttctgnangggntagagatatgggangccatcaantccctgggtncnannnnatgcgtnattctactacnantcagatgct

SEQ ID NO: 51158 - DNA, 526 bp, Glycine max
  unsure (1)..(526): unsure at all n locations
  Clone ID: PAT_MRT3847_17208C.1
attcggcaccagttcattagatgatatttttattcccaaggttttcagagatatcagctctggtttgaatgagctaaaaaggcaactcagtcaacttgattccgatggctctgancgacttcaccacaaagnccggagccctttcgagtctgaattagttcacttggatgatccagcagaatcttatgtaagagatctgcttgttgcctctggtttgtactttggttcatggaataaatctctattaagaggggacacatttgcaaagcccattggcaactcagtttttgaagaagtggaagagtctcataacaatttgatcaaggaggatgaaagatccacaaaggatcagaacaagaacaagttagagcacaaagttttgcttgatttgttaaatgaggcactttccattgttcttaggtcacatttgacgttgtctaaattcagaaggaaactaancaattcctccatggcaccttcaccatgtggaaaggaactactgaagttagtgtgggacattgtcaat

SEQ ID NO: 51159 - DNA, 964 bp, Glycine max
  Clone ID: PAT_MRT3847_17209C.1
gacccggcccggattccccgtttgattctcccctccccgtatgtttgggaatcgatcctcactgcaatgcggtgctggatttgatggaaacaaatgtgtttaaattgactctagaagatgttcaaactcctaaaggttccatgtgggatcttaaaatatgttaatctaaaattgcactttccaaaaacacagttggaggaaccattctgcgtagcgatctattggcaaattttttgacagagggcatttttagagcaagtgttgatttgcagcgcactcatcgtattaaaggaatgattaaaatggtggccacagttggtatccctgagaatacaggtatagcattggcctgtgctatgaatagttcttatagggggcgtgccagttctgatatttacaccatttgctctcaagactgtgaattatggaatcctgcttgcacaaaagcaatgactatgtcatttaatccaaacccgtgttctgatgcatggagtttggaatttttgaagcgtaccggatttcattgtgatatcatttgtgtcactggatggactgccaccccaatgcatgatgttcaggttacaattgattggtttatttcctctcaggagtgtgttcccaggacctattgtgttttaaatccacaaaatccttttgtgttaaataggtggatggggaaactgactttcccccagggcacttcccgaagtgttaaaagaatgcctctttctattagggggaggagctggtgcaaagaatgctattctcatgaatatgccaaatgctgttcttttcaatgtggagatattttgttggagatcttgtctttgaggttctaagatgacttctcctacataaatgtacagcctcttcttcatagcattgggaatttgttgatgtaccataattttgggcttttcccacagctggtcagtttgagagattaaggaaagttttttgaatt

SEQ ID NO: 51160 - DNA, 432 bp, Glycine max
  Clone ID: PAT_MRT3847_1720C.1
ggctcgagctggttttcagttcacagttcaaggcttacagaaggcaaatgtcaataaaaaacttttattggctgccccaaaatattccttttactttgtaccaaagggaattaggcttttttatcttatcgcttttattcaccaaattcaagcggatacggcgatgtgggacaggagagttgattttcctgacaattttaaacaaataataaagtttgtatgcaacaagtaaaaagcggcgatactgtaaaggttcattatcatggccgtttaaccgatggaacaacgttcgattcctctgcaggtcgtgaaccgctgcaattcgaagtaggaagcggaatggttattcctggtttcgacaatggtgttatgggaatgatagttggtgataaaagaaccattaatataccagttgccgaagcttatggtcct

SEQ ID NO: 51161 - DNA, 799 bp, Glycine max
  Clone ID: PAT_MRT3847_17210C.1
aaaagatttaagacgcacgcacggcgcgctccgataatctgcgaaattcggtctcggggcaaacgtgtttgagattcaattcggcaacagtggcgaacaccattgaggttttgattctagcaagcagagcgttcgccagttttctattgaccttctcggaggaggaatctcattggacaaaactggtgattggatcacacttatacaaaattctccaattagtaacttgttgagagttgctgcttggaagaaaggctgcttaatggtcaagattgtgatgtctgggaatgcagcaatcaaaaggagtgattgggcctcattggtacaagtgtttttaacaaacagcaacagtacagagcattttgatgcatgtaagtggacaaaatcagaaccacattcctgggaattgatcttcccaatagaggtatgtggtgctaataatggttttgaaatgtggagttctgagtgggccaatccaacttcatggcatttgagtttccgtactggcaatccccaacagtttacagtttttgatattctcttgggaatctctcaagattttggaatcgctggtaatactcttaagccagctttttctgtcccccaggctactgccagatcttctgaaaatgcggaatcctatgcatgatctggaagttgtgttttctttcgcatgattgtttgtttaattcaataaaggaaattaggcatgaccctcttgttgagtaggctctgcctatttgaaaatttccacacctcttttaattgtcgtaataatgtgtccagtgtgtgttatttt

SEQ ID NO: 51162 - DNA, 399 bp, Glycine max
  Clone ID: PAT_MRT3847_17211C.1
cccaaccgtaccgaccggcaactgattactataccggttgtcctcattctacatggaaaaaatgcttcttccgtgcggtgactacccttacaagagcctacgcggctactgaccctccagggatcattatccacacccggtcatctcaaaatctagttgctgcacctggccacccggcttaatcttgtccgataggcacccaatggcagctaaatacatcaatgctctgtccaaacaccctttgggggttactacaaatgtacctgtgagcgggggctgacctgtgatggtgacaagcacatctatggctccatcaacaaaaccaactttggtgtttgacaccaagctgggggctcccataaggaaagcccctgcaaggatgctcttataaatcaccgc

SEQ ID NO: 51163 - DNA, 631 bp, Glycine max
  Clone ID: PAT_MRT3847_17212C.1
gtgtctcagttggtattcctgagaatacaggtctatcattggcctgggctctgaattgttctctattgggggcgtgccagatctgatatccacaccatctgctgtcaagagtgaaaatcatggaatgctgcatgcacaagagccatgtccatgtcatttaatccaaatccgtgttctgatgcatggagtttggaaatcttgaagcgtaccggatttcattgtgatatcatttgtgtcactggatggactgccaccccaatgcaggatgttcaggttacaattgattggtttatttcctctcaggaatgtgttcccaggacctattgtgttttaaatccacaaaatccttttgtgttaaataggtggatggggaaactgactttcccgcagggcactacccgaagtgttaaaagaatgcctctttctatagggggaggagctggtgcaaagaatgctattctgatgaatatgccaaatggctgtcttctaatcgaggagaaatttcgtcggagatctcgtctttgaagtttctaagatgacttatgcctacatgaaatgtacagtgtctatcttataacatttgaaaatttggctgatgacaccatttattctgaggcttttcccacaagct

SEQ ID NO: 51164 - DNA, 726 bp, Glycine max
  Clone ID: PAT_MRT3847_17213C.1
ctggcagtagcctgtgaacagaaaaagctggcataagagtatttccagcaattgcaaaatcttgggacattctcaagagaatgtcaaaaactgtagactgtttgggattgtcaataaggaaactcaagtgccatgtagtttgatttgcccactcagaactacacatttcagaaccattgttaggaccacacacctctattggaaagatcaattcccaggaatgtggttccgattttgtccacttacatgcatcaaaatgctctgtactgctgctgtttgttagaaacgcgtgtaccaattaggcccaatcactccttttgagtgctgcattcccagacatcacagtcttgaccatgaaacagccttctcggtggaggaattttagtggacataactggagattggatcacacttatacaaaattctccaattagtaacttgttgagagttgctgcttgcaagaaaggctgtttaatggttaagattgcgatgtctgggaatgcagcagtcaaaaggagtgattgggcctcattggcacaagtatttttaacaagcagcatcggcacagagcgttttgatgcgtgtcacgtggacaaaattggaaccacattgctggtatttgatctttccaatagaggtgtgtggatcaattaatgtttttgaaatgtggagttctgagcgggcaaatcacacttcatggcatttgagtttccttatggacaatcc

SEQ ID NO: 51165 - DNA, 540 bp, Glycine max
  Clone ID: PAT_MRT3847_17214C.1
ataaccaaaaaatcaatgaaggacctcacctcacataagagtaaacgcctctaaattaaggtgataaaacacatcgtgttctagaattcaatcaaagcaagatgggcattaatccaacaaaatgcgtaacaattgcaattggtttgttgtgcctgtgttgtgttgctgacagtgttcccaacaccagcatcatcaacgttctctgcaacaatggggtgtacacttcaggggagttagaggaagaaacaccagcacagaggaattatgactaccacaacatttcaccctatcctaatgcctatgcctatggacatgctacttgtaaccttaatctgacatcccctgattgcaaaacatgtcttggtgctgctcaaacggccttctttagcacatgccagacaccacggatcggggctcgttctgtgctctatgattgtacaatcaagtacgagcaatacccatttgacgattagaaattgaacattgagctttggtgttcgttcaactttccatcataataaattatcgtgacgattgcac

SEQ ID NO: 51166 - DNA, 1105 bp, Glycine max
  Clone ID: PAT_MRT3847_17215C.1
gattatttctaccgcattacattaggtggcatgtgtctaccttggtgatctacattctcccatctctcctcactggtgaaattaaatataagcggaatttgagtaacattcatatttccggcttatttcacgacggcagatacaaattctggactaaacacgagaaaaatcttgctctgacagaagaggaaaagacggaggtgattagaaatagaggcattcctgctgatgttcttgcaaagcgagctcatgaattagaaaaacatgttgctcatgaaagcctcaaggatcaaattcctgccgttgacaagtagaattctactaaggttaataagttcgcaaaaatcatgaaccttagacaaagtgttgatggtgatcttaaacttcttactgatgggaagctgtatgagggcaagcatattcctgtatctaatattagtgcaggggaaaatcatgtagctcaaatacccctaatggcacacgaggaaattctgccttctagtgcatgggatttcagaactgcaatggtgagtaaaaatagcacgcctcaaactactgcaatgcatgtgggagctattgaaattattattgatagtttcgcaagtcctgactgcatcatacatggagcaatgcttttggttgatactcatgataccagtactgaaagagcagttcggagtattattgttgcgcctttcataggcctggggggcattcgggtggatacatttccgaataccatagagcagattgaaccagacatgaattcaaaggtgtagcttttgagtaccactaccaatggtgatttagttcaaggaaaagatctcgcaatggttaaagttaatgtagcatgtgctgctgttggcttgacatcaagttacactccaactccattgttggaatctggttcgcaaaaagacagaaggttaattgtggagtacttgggagggtggtctaccgtggtcattacggtaaatcagccccaaaagaaagattggtggaagggaaatttttccttggtattaaatcttcgctctagatgggaaaaagtttcttttacaaaagcccatttggttgggggaaaacccttcaaatatgatataat

SEQ ID NO: 51167 - DNA, 1257 bp, Glycine max
  Clone ID: PAT_MRT3847_17216C.1
tcagaaatagcttccctcatacaactcccatcagtaagaagtttaagatcgccaacatctctttgtctaaggttcaaaatttttccaaacttattaaccttagtagaattcaacttgtcaccaacaggaatttgatccttgaggctttcgtgagcaacatgtttttcaaattcatgagctcactttgaagaaacatcagcaggaatgcctttgtttctaatcacttccatcttttcctcttctgtcaaagcaaattttttctcgtgtttagtccagaatttgtatctgccgtagtaaaataaaccggaaatatgaatattactcagattccgcttatatttaatttcagcagtgagaaaagatgggagaatgtaaatcatcaaggtatacaaatgccacctaatgtaatgcggtaggaattttctaaattgagttgctattgtataataaacaaccaagatgtccaaatctctgcaagtaaaaattgttttctcagtgagcctgttgtccccagagaaaattaacgaagcaaacatttgcaccaacgcccaagtgtttttcaaataagaccactttgaacggcaatgcggatcagtgagaagaagagagtgaaagaaaggacagaaatagaaaagtctacccacgaagtcctataccagataggagagtgggagcactaatccaagatttcaccagcttgaacttgaaattaagcagagaactgagaaagaaacagaaaaagtttctccaattagtaacttgttgagagttgctgcttggaagaaaggctgtttaatggtcaagattgtgatgtctgggaatgcagcagtcaaaaggagtgattgggcctcattggtacaagtgtttttaacaaacagcatcagtacagagcattttgatgcatgtaagtggacaaaatcggaaccacattcctgggaattgatcttcccaatagaggtgtgtggtcctaataatggttttgaaatgtggagttctgagtgggcaaatcaaacttcatggcatttgatgttttttattgacaatcccaaacagtctacagtttttgatattctcttgggaatttttcaagattttgaaattgctggttatacttttatgccaagttttttctgttccacaggcttctggcagatatttctggaaatgcgagattcttttgcatggatctaaaatattggggttttcattacgcttggtctcgtttggcttatattcaaattaaagtataatttaggc

SEQ ID NO: 51168 - DNA, 897 bp, Glycine max
  unsure (1)..(897): unsure at all n locations
  Clone ID: PAT_MRT3847_17217C.1
tggaacaaatttgtttccatctgagcttgatcatgntcaaactcctaaaggttccatgttggatcttagaatttctcactctaatattgcactttccaagaacacacttggaggaaccattctgcgtagagattgattggcaacatgtcagacattttttaatctgagagcaagcgttgatatgcagcgcactcatcgtattagaggaatgattaatatggtggccacagctggtattcctgagaatacaggtatagcataggcctgtgctatgaatagttcttttagggggctcgccatttctgatatttacaccatctgctctcaagactgtgaattgtggaatcctgcttgcacaaaagcaatgactatgtcatttaatccaaacccgtgttctgatgcatggagtttggaatatttgaagcgtaccggatttcatggggatatcatttgtgtcactgggtggactgccaccccaatgcaggatgttcaggttacaattgattggtttatttcctctcaggaatgtgttcccaggacctattgtgttttaaaatccacaaaatccttttgtgttaaataagtggatggggaaactgactttcctccatggcactttcctaagtgttaaaagaatgcctatttctatagggggaggagctggtgcaaagaatgctatactcatgaatatgccaaatgctgttctttcaatgtggagatattttgttggagatctcgtatttgaagtttttaagatgacttcttgctacattaaatgtacagtctctttattcatagcatattggaaatttggctgatgacaccataaatattgaggcttatccccacaagctgatgcagttagtatagattcaggaaaatgttgttttgaaattt

SEQ ID NO: 51169 - DNA, 1783 bp, Glycine max
  Clone ID: PAT_MRT3847_17218C.1
actttaacaatggaattctttcccttaaaaaatcccttggtaggggactcaaagctaaaacctaaattcatgtctggtcaatctgccgatggtattggaaatgtaaccacccgaatgggccttccgcctttgaaaggcgcaacaaaaatactacgaactgcattttcaggattggtatgataagtatcaaccataagcattgcaccaactatgttgcagtcaggacttgcgaaactatcaataataatttctatagctcccacatgcattcaagtagcttgaggcttgctatttttactcaccattgcagttctgaaatcacttgcactaaaagacagaatttcctcctgtgccattaggggtatttgaactacatgattttcccctgcactaatattagatacaggaatatgcttaccctcatacaacttcccatcagtaagaagtttaagatcaccaacaacactttgtctaaggttcataatttttgcaaacttattaaccttagtagaatacaacttgtcagcagcaggaatttgatccttgaggctttcatgagcaacatgtttttcaaattcatgagctcgctttgcaagaacatcagcaggaatgcctctatttctaatcacttccatcttttcttcttctgtcaaagcaaggtttttctcgtgtttagtccagaatttgtatctgccgtcgtaaaataagccggaaatatgaatattactcagattccgcttatatttaatttccgcattacattagcgtggcatctgtataccttgttggtccacattctcccatcttttctcactgctgaaattaaatataagcggaatatgaatattactcagattcctgggcgttggtgcaaatgtttgcttcgttaattttctctggggacaacaggctcactgagaaaacaatttttacttgcagagatttggacatcttggttgtttattatacaatagcaactcaatttagaaaattcctaccgcattacattaaggtggcatctgtataccttgttaatttacattctcccatcgtatctcaccgctgaaattaaatataaacggaatctgagtaatattcatatttccggcttattttacgacggcagatacaaattcatgaactaaacccgagaaaaatcttgcttcgacagaagaggaaaagatggaagcgattagaaacaaaggcattgctgctgatgttcttgcaaagcgagctcatgaatttgaaaaacatgttgctcacgaaagcctcgaggatcacattactgctgtggacaagttgtattctactaaggttaataagtgtgcagaaattatgaaccttatacaaagggttgaaggtgatcttaaacgtgctactgatgggaagatgtatgagggcaagcatattcctggatctaatattagtgcaggggagaatcatgtagttacaaatacccctaatggcacaggaggaaattttgtcttctagtgcaagtgacttcagaactgcaatggtgagtaaaaatagcaagcctcaagcttctgcaatgcatgtgggagctatagaaattatcaatgatagtttcacaagtcctgtctgcaacataattggtgcaatgcttttggttgatacttatcataccaatcctgaaaatgcaaaacgtagcattttgttgcgcctttagaggcggaaggcccattctggtggtacattttcgaaaccattgtgctattgaaccagacatgaatttaaggtttagcttttgagtaccacttccaat

SEQ ID NO: 51170 - DNA, 1172 bp, Glycine max
  Clone ID: PAT_MRT3847_17219C.1
ctggtaccctccggtaccgctccggcgttccaggcgcgccctttttcgtccgattactcgtccgaaaggttgctgtacaaaagcacaatttgctggtggaaaaaccttcaaatatgcactaattggtgctggttcacattcttcagaagattctcctgactacggaagaccaagaaactcccaaaacgattgatgctctatcgagacaaagaatagagcctcaatataatgaggttcaggctcagatggaaacaaatttgtttaaattgtctgttgacgatgttgaaacttctaaaggttccatgttggatcttaaaatttctcaatctaaaaatgcacttgccaaaaacacagttggaggaaccattctgcgtagtgatctattggcaaatattttgacagagggcaattttagagcaagtgttgatttgcagcgcactcatcttatggaaggaatgattaaaatgggggccacagttggtattcctgagaatacaggtatattattggcctgtgctatgaatagttcttttagggggcgtgccagttctgatatttacaccatctgctctcaagactgtgaattatggaatcctgcttgcacaaaagcaatgactatgtcatttaatccaaacccgtgttctgatgcatggaagtttggaatttctgaagcgtactggatttcattgcgatatcatttgtgtcactggatggactgccaccccaatgcaggatgttcaggttacaattgattggtctatttcctctaaggaatgtgttcccaggacctattgtgttttaaatacacaaaatccttttgtgttcaataggaggaatgggaaaatggactttcccccaaggcacttcccgaactgtaaagataatgcctctttctataaggggaggagctggtgcaactaatgctattctcatgaatatgccaaatgctgttctttaaatgtggacatattaagctggagatatcgtctttgaaggtactaagatgactcctccctaaattaaatgtacagactctgtcttaatagcattacgcaaattcggctgatgataccatcgattgtgaggctttcccccacaagctggtgcagctagtagagattcatgaaaaagttgtatagaaattttcaccaagaggaatctcttacagctag

SEQ ID NO: 51171 - DNA, 678 bp, Glycine max
  Clone ID: PAT_MRT3847_1721C.1
tggctgacgagattccctgcatttctgctgttgttgttgaattcggctcgaggccaaagcctagaattgattacactttgaaggctgttggtggaagtttgacggcactgcctggaatttcagatatgattgatgatatggtgaactcaatcgttaccgatacgctccaatggcctcataggattgttgttcctcttgggggcatacctgttgatactagtgaactggagcttaaaccccagggaacgcttagagtgactgtaattaaagcgaatgacctaaagaatatggaaatgattgggaagtctgatccttatgcagtgttgtatattcgaccactgtttaaggttaaaacaaaggttattgataacaacttgaatcctgtttggaatgaggtgtttgacttgattgcggaggacaaggagacccagtcactcattgtcgaggtttttgataaagacattgggcaagataagcgattgggaatagtaaaattgccacttaatgacttggaaccagaaactgaaaaggagtttgaattgaggctgctgtcatcacttgatacactgaaagtgaaagacaagaaggatcgaggaaccataaccataaagatcttttatcaccaatttaacaaggaagaacagttggttgcactagaagcagagaaaaatattctag

SEQ ID NO: 51172 - DNA, 600 bp, Glycine max
  Clone ID: PAT_MRT3847_17220C.1
ccggaattcggctcgaggcggaatagccttcatttttatgaactttattctcactctcatctccaccatcaataaaaatttccttttaagatctgcccttttccccttcttcacagtttttatctgattctccaaaatctacaatggtcttacactactcctgattaaagttgattttttttctatctgggtacatgtaaagttgatgtttttattctcaaattgaaccaaacatcaggttttctggaccactttgctgctgaatatagatgtcagctactatactttgaattaaacttcagtgtgattgataatggctttccaaagggcatctgcaaccatgattgcagtttggattgttgtgttgatggttctctccaaaggattatcttcaagtggggtagtatcagataattccacaatacctgcttttgtaaatattggggttctctattctttcaataccagtgttggtagaatggtgaaaactgctgtacaagctgcggttgacgatgtaaattttgagcaatctattcttgctagcactaagttgaaggcctcactgcaagaagataaccaataccagaggtttttctgagc

SEQ ID NO: 51173 - DNA, 1117 bp, Glycine max
  Clone ID: PAT_MRT3847_17221C.1
atttttactccccattgcagttttgaaatcacttgcattagaagcaagatattcctcctgtgccattaagggttttgaactacatgattctcccgtgcactaatattaaatacaggaatatcttaccctcattcaacttcccatcagtaagaagtttaagatcaccaacaacactttgtctaaggttcataatttttgcaacattattaaccttagtagaatacgacttgtcaacagcaggaatttgatccttgaggctttcgtgagcaacatgtttttcaaattcatgagctcgctttgcaagaacatcagcaggtatgcctttgtttctaatcacttccatcttttcctgtctgtcaaagcaagattttctagtgtttagtccagaatttgatctgccgtcgtaaataagccggaaatatgaatattactcagattccgcttatatttatttcagcagtgagaaaagatgggagaatgtaaatcaacaaggtatacagatgccacctaatgtaatgcggtagaaattttcatatttccggcttattttacgacggcagatacaaattctggactaaacacgagaaaaatcttgctttgacagaagaggaaaagatggaagagattagacacaaaggcattcctgctgatgttcttgcaaagcgagctcatgaatttgaaaaacatgttgctcacgaaagcctcaaggatcaaattcctgctgttgacaagttgtattctactaaggttaataagtttgcaaaaattatgaaccttagacaaagtgttgttggtgatcttaaacttcttactgatgggaagttgtatgaggagtagcatattcctgtatctaatattagtgcaggggagaatcatgtatttcaaatacccctaatggcacaggaggaaattcttgcttttagtgcaagttatttcataacttgcatggtgagtaaaaatagcaagcctcaagctactgctatgcatgtgggagctataaaaattatcattgatagttttgaaggtctgactgcaacatatttggtccattgctttttggtgatacctatcataccattcctgaaatgccatttttatttttttgttgaccctttat

SEQ ID NO: 51174 - DNA, 681 bp, Glycine max
  unsure (1)..(681): unsure at all n locations
  Clone ID: PAT_MRT3847_17222C.1
ccacgcgtccgcatcaataaaaatttccttttaagatctgcccttttccccttcttcacagtttttatctgattctccaaaatctacaatggtcttacactactcctgattaaagttgattttttttctatctgggtacatgtaaagttgatgtttttattctcaaattgaaccaaacatcaggttttctggaccactttgctgctgaatatagatgtcagctactatactttgaattaaacttcaggtgcattcatctctttgattaaagttctatattattcacatgctgttatttccccttgcaatctgctactttttttttgctttaatgggaggaacattaatgctttattctttcctatcatggttgtgtttgagatgcgctttacaactttgtgtcttatgtttttgttttgggttacttggcctggaattagcttaacatgccaaataaggtcttgattgtgaagtgcagtttatgcttaatgttttgaaagtcacagttttgtggatgagtgtttaactntttactttcttaatatccctcctcttttttaattctcttaagatgttgctttacttgtttgttgagcagtgtgattgataatggctttccaaaggcatctgcaaccatgattgcagtttggattgttgtgttgatggttctctccaaagata

SEQ ID NO: 51175 - DNA, 399 bp, Glycine max
  Clone ID: PAT_MRT3847_17223C.1
gggggaagccgtggccccttaaccccccattaagatgcccagccattattttttgaccggttatttttggttttggggcacatatttggaagcgatttttttaattagcgctggcctttgaaaataaaaataggcctttactttttactgaccaaataatttttaataaaccttcttccaaaaaaagggggaaatgggggaaataattttttggtgaaacttcctaagtttaaaaattaaaaaaaaccgggaaacctccttttcctttgccggaaatgggaccctcctcccattaagaataaaaatggttttcctaacgtttggatttcatgccaccctggcaaaggaaattcctgctaaaaggattaccaccaccaggggtttttgacaatggttttt

SEQ ID NO: 51176 - DNA, 194 bp, Glycine max
  Clone ID: PAT_MRT3847_17224C.1
cggtgccgggaatggccggatgcgacccacgcgtgccgcccacgcgtgccgtacgcgtagatgacgacagaagggggagcagaatcttcatgccaagccaggtaagcacatcccacgcaacaccccagatggattcaggttgtgttgctatggggttgtcactgagctgtgttaccagcaacaacaagccttaa

SEQ ID NO: 51177 - DNA, 263 bp, Glycine max
  Clone ID: PAT_MRT3847_17225C.1
gcgcttcgccggcgtttcatgcggtgctgggttggggaaagggttggaggagtaatcctacatctggtcctgaggtggagataacactgcatgcactggactttacaaagggtccgctttgggagctaagaacaatgttgccttggaacttgtctacaccgtgtgctccacatactgatgtctaagaggagcgcataggcctctcatgtacacgtgataacaccaattgatatgaagtgtgtcgcttagttgggtcacttgga

SEQ ID NO: 51178 - DNA, 392 bp, Glycine max
  Clone ID: PAT_MRT3847_17226C.1
aaaaaaaatggggtttttgaaattaaaaacaacaataatataacattcatgtaagaataatgtcctcatggacggaatagtatcgagaattgccccaaaatacaaggcaaaacacaggaacacaaggacctatgaagtccccactagaaaagccgctgcccacattgaacatacccccatacaagctatggatttaagttggcccaaaattttaactatggatcaaactacagacaaccacctattttcatagcaggaaaaagtaacctattatgagcactgtgcaggaaatatatctctctctagaaaaaaagagggccctatcaaacctatagggagttaaggaacctgacggagttgttttggttaagatcataacaaatcaccttttt

SEQ ID NO: 51179 - DNA, 450 bp, Glycine max
  Clone ID: PAT_MRT3847_17227C.1
aatcaatcaatcacaaccagtaatataaaccgctggatctgagttttccgttgcatattcgccgtttctccctatcctggatacagatttgcgatttggatctgagaagagaatggatcgagaaaatggcgacggcgacattgaaggcggtggtggcgccgacgacggtggttttcgctctccgattggtcgcaagtaccaccctgtcttggccaacgatcgcgcggtgctcgaaatgtcctccatggatcagggaccttcttcttcctcttccgcatttccagatcagcatcctaatatcagaaaagtaaatacaagtgtgaatggtagttcggatgctaaagaagagaacccttctcatgaaaaccaacctaatggatccctgcagcaggaatctaaactggaattgtttggttttgattctcttgtcaacattcttggtctcaaaag

SEQ ID NO: 51180 - DNA, 797 bp, Glycine max
  unsure (1)..(797): unsure at all n locations
  Clone ID: PAT_MRT3847_17228C.1
ccacgcgtccggatattggaaatgataatataaagaacccaaaggagcgactggttcgtcagaagcaaaatcttcgacgtcgtttaggtttggatgtctgtgaacaatttgtggatatcagtgatgtaataagagatgaagatcttatggcatccaaatcagactcacatctgaacgggatagatcgtagactttttacttcttgttctgcacataacatccagaaaatggtttcaaacatggttcctagtgtcaaatcaaagtggccaagcgcaagagaattgaatcttttaaagcgtaaagcaaaaattaactctaaggaccaaacaaaaagctgggtgaagatggaagtacagaggcgtcaggtgctcaaaatttgacttcgaaaggcacatgtcccgattcagtaaattacagtaaggcattcgtgggtgttaatcacgatgaagatggccttgaacatgatggggatggacaatggcctttccacacttttgttgagcaacttattattgatatgtttgatcctgtttgggaggtacgacatggcagcgtgatggcattgagagagattttagcacatcaaggtgcttctgctggagtatttaaacctgactcacgcatgggtgggaccttgtttattgaattagaagacaaagttaccaaatattttgaagagagagagggaaaattgggttaaatatgcaagtttccacagatgagtttgtttcaaacttgaagagccaaaacttgaagatgtatcatcatcaacctctatggatagtngtgatgacttg

SEQ ID NO: 51181 - DNA, 960 bp, Glycine max
  Clone ID: PAT_MRT3847_17229C.1
gtaagagagggcggaagccggcgaacggaagagaggaaccattaaaccatgttgaagcagagagacagaggagggagaagctgaaccagagattctacgcgcttcgtgctgtggttcccaacgtgtcaaagatggacaaagcgtcgcttctgggcgacgcgatatcttacatcaccgagctgaagtccaagcttcagaccctcgaatctgataaagatgtattgcataagcagcttgaaggagtgaagaaggaactcgagaaaacaaccgataacgtttcttctaatcacgcgtgtaataataacaataacaacaagttgtcgtcgaatcagccggcgttaattgacttggttgagatggacgtgaagatcattgggtgggacgcgatgataacgatcacatgcagcaagaagaaccaccccgcggcgacgttgatgacggcattgatggagttggacttggacgtgcactacgccaccgtaacgttggtcaacgatttgatgatccaacaagcaacggtgaagatgggaagtagattttacacgcaggagcagcttcgagcggcgctgtcggctaaggttggggatgtacgatgatgttggcactttgcggcagcgttgagattataagtgtgtgtttgtgtcatgttattagctagctatctctttctaagttgtgtgctgctctggggtattttaagccttcccggtagctgtttctgtaaaattttaagattttatttttctttattgggcagcttagtattgaattttgaggtaatcaagctgggaagctccatggagtagtagtataactagctagggacagttttcatcaaatctgtgggtggagtggaaataggggtaattttatctgtttaggtagtgtatatatttataataaatcataaatgtgatcatgcaagttctcaatattattatgcttcagctaaagggcggc

SEQ ID NO: 51182 - DNA, 2126 bp, Glycine max
  unsure (1)..(2126): unsure at all n locations
  Clone ID: PAT_MRT3847_1722C.1
cccacgcgtccgtttacgcgtggggcgagcatgccatgttttatcggctcggggttattcccaaagccgatacttccttttcaagtcttttctcttctctctctctctatctctcttccaaaataagattcttccctctctctctccagaacttcctcctccctctgcttctttctttcttgcagcgcgattgctgcatcgtcctccaataagagctcgctgctagcgaaccctaacacggcggcaacgtgaggtgttcggttgaagctcagatcagcgatggcagcagcaacccccacttctctgcggttcctcctctcagtctccgctaaccctaactctcgctcacctcgccgcctcaaattccgaaggcgacgctctctacacgctgaaacggagcctctcggaccctgacaacgttctccagagctgggatcccactctcgttagtccctgtacttggttccacgtcacctgcaaccaggacaaccgagtcactcgagtggatcttggtaactctaacctatctggacatttggtacctgaacttgggaagctggagcatctacagtatcttgagttgtacaaaaacaacattcaaggaactattcctccggaacttggaaacctgaagagtctagttagcttggacttgtacaacaacaacatatcaggcaccatcccaccttcattggggaaattgaagaatcttgtctttttacgactcaatgacaaccgactaactggcccaattcccaaggaactgtctgctgtttcaagccttaaagtagtggatgtctccaacaatgatttatgtggtacaattcctacatctgggccattcgagcatattccattgaataactttgagaataatccccgcttggaaggtccagagttgttgggactagtaagttatgacacaaactgctcgtgaataacgtgatgtggtaggatctcaatctgcgttgaattatatatatgtattctaaaatttaagtgtattacctcatagtgttatgtgaagttcttctttctctctctggttatatcttaattttccctaccgttcttccttcgtttttgtcaaatcaatgcctgctgcttttttaccttaaaacggcgcgactgagaggcttaatgatgaagcaaagagaggtggttgcaggagaaccccaccatggctggcggcagcagccctcagtttccgtcggcttcacctctgcgtccccctacccctaactctcggtgatctcgccgcctcaaattccgaaggcgacgctctctacaccctgaaacggagcctcccggaccctgaccacgttctccacagctgggatcccactctcgttagcccctgttcttggttccacgtcacctgcaaccaggacaaccgagtcactcgtgtggatcttggtaactctaacctatctggacatttggtacctgaacttgggaagctggagcatctacagtatcttgagttgtacaaaaacaacattcaaggaactattcctccagaacttggaaacctgaagagtctagttagcttggacttgtacaacaacaacatatcaggcaccatcccaccttcattggggaaattgaagaatcttgtctttttacgactcaatgacaaccgactaactggcccgatccccaaggaacttgctgctgtttcaagccttaaagtagtggatgtctccaataatgatttatgtggtacaattcctacctctgggccattcgagcatattccattgaataactttgagaataatcctcgtttggaaggtccagagttgttgggacttgtaagttatgacacaaactgctcgtgaataacgtgatgtggtaggatctcaatctgcgttgaattatatatatgtattacctcatagtgtaatgggcagtggtaaatgtaatctctggtatatgtaaatttacatactgaagggcattggaatttgtaacaatattatgatctgacaatgatgttaagacttgaatatctattgatgtaatactaaaaaaaaaatcgacttggtcactcactgataaaatatttgtgacgtattgctctccaaaaaaaaaaaaaaaaaaaaaaagnggangggaaaaaaaaa

SEQ ID NO: 51183 - DNA, 946 bp, Glycine max
  unsure (1)..(946): unsure at all n locations
  Clone ID: PAT_MRT3847_17230C.1
aattccacgggtacgaccccacgcagtgagtaagagagagagatttttctctttctctctttctcttctttttcccctcgtttcgtttctttgttaatatctccccgtcaaccatggactctccgaggtaccaccaagagcaccaccaccaccgcggcggcgtgagtcttgttccttcgccacgccacagtttgagttcttcaaacagcagcagcaccagcagcactagcagcaacaacaatggactccaccacacccaattgctgtcacctctgactccgaccgcggcggctgctcaatctccgacatcatcgtaccctccgaagcccgtgaccagatccgaatccgccaacccgtacccgacaacctttgtccaagccgacaccacctccttcaagcaagtcgtccaaatgctaaccggatccacccaaaccgcaaaacaagcctcagcctcggcctctgaacctgcaaaaccccacactcacatcccacccatcaaaaaacaaacgggtttcaagctcttcgaacgaagaaactcgctcagcaagaatctcagcatcaaccctctcaacaacgtcgtcgtttcgtctttctcgccgaggaaacaccacgaggttctctctcccagcatcctcgacttccccgcgctcgttctcagccccgtcacgcccctcatacccgaccccttcaaccgttcccgttccctcaacgaaaacggcgccggtatggttatggacacagccgaagctactgaagagaaagccatcaaggagaaagggttcttcttgcacccttctcccgcgtccactcctcgcgacgaaaagcctcgtcttttgccccctcttccccaccaccaccgccgccgccgcgtccccaggttccggttcttcttcctcctcttaaaattntcaacccccccccccccccccgccaaaaaaaatatata

SEQ ID NO: 51184 - DNA, 426 bp, Glycine max
  Clone ID: PAT_MRT3847_17231C.1
ggctcacgtagttcgcggcggcgagccggaatcggcgggcggcattcaccaatcaccgccgtcatcgtcctcgtggtcgtcctcgtctctggttgctgatcaagccccgtcatcggaggtgattccggtgtcgtcgccggtggataattctaatacggttggtgatgtagatagttccgatggcgctgaaggcaatgcggattgttctaaaaagcccgcttggaacaagccctcaaacggcgtcgtcgtcgtcgagactgggcctgtaatgggcgctgctgaatcatggcccactttgcttgcgtccaccaaaggttctgctaaattgcctgctgaatcgtcctccaagactgttaccgatgatggatcactctccacttctcagtggccaatgacttcacaatcttctcataaacaagcgactac

SEQ ID NO: 51185 - DNA, 475 bp, Glycine max
  Clone ID: PAT_MRT3847_17232C.1
tcgtcattttcctctggaagcataataagtatatatataaagttgttgccacttgcaatactcatcaatcaaaatccaaacccaaagctttcttttttctccatcaaattctctgacctcaccatggggatgcagcttgttttcattggcaccatagccttgtgtttggttgtttcctcggctatgcttgagcagtttgaacaagcacctaaacaagatggatcgcttagcttcttggtcattggagattggggaagaaaaggagcttacaaccaatcctaagttgcattccagatgggagttattggagagcaattagacatcgattttgtgatttccaccggcgacaatttttattacagtggcttgaggcatagatgatccagcctttgatgactcattcaccaaaatctacactgcttctagcttgcaaaagcaatggtacagtgttttgggcaaccacgactataggggt

SEQ ID NO: 51186 - DNA, 225 bp, Glycine max
  unsure (1)..(225): unsure at all n locations
  Clone ID: PAT_MRT3847_17233C.1
gtacaccgtattaaagaatttaagatatactatgatgagagcgcggttcccattgctgttgctgggagtcgtgttcctagcatcagtttctgtctcatttggcattgcgtattgggcaaagcagaaccccagtcagaacaagtgtgtccgaagttgtacntagcgagaaagattcctacaggaagcaagcatggcacgctcgtctgcaactcccttaaggtggag

SEQ ID NO: 51187 - DNA, 416 bp, Glycine max
  Clone ID: PAT_MRT3847_17234C.1
agaaaaaaaaaaaacaaaaaaaaaaaaaaaaaaaaaaaaaaaaaaaaaaaaaaaaaaaaaaaacaaaaaaaaaaaaaaacacaaaaaacaaaaaaaaaaaaaaaaaaaaaaggggcggccccccaacaggttcaaaccttacttacccttgcatgcaacgtcacaccccttcaacactgtcacctaatttcaattcacgggccttccttttacaacttcttcaccggaaaatccctggctttacccaccttaaccgccttccaccaaaaccccctttcgccacctgcccttttcccaactaggccttcatcgatccccttccccaacatttgcccacccccgaatggacaacgggacccccccttttgcggcccattaacccccctggctatcccgctcatgcctcttcctccccc

SEQ ID NO: 51188 - DNA, 443 bp, Glycine max
  Clone ID: PAT_MRT3847_17235C.1
tacggctgcgagaagacgacagaaggggacggttcaagaattacttctgagctgtacgcttgtttatacgacaagagaatgtgacggtttttggcttcttttgatgctggtgctcttatggtagcatggtcatgtcctggcgtacgctactatgggcatcctctcctaatgaaaacttgctatggggagcgttctgcgcttgtactactgtccagttacatgccttgatgtggaagcacattgcatccgaggctttaaaagcttgccttgatagtgccttgaatcatccaaggactactttagtggtgcacattcttgatcagactctataacaggtgacctgcctgctttcttttatgtctagtgggcgccaagtccatcaaaacgacatatccatcatatgcttatatgacagcgttctatgtaatatacgctactatgaa

SEQ ID NO: 51189 - DNA, 302 bp, Glycine max
  Clone ID: PAT_MRT3847_17236C.1
cgcgtcacatctcctagtattcggcccgcacgttgttttggtgtctagctacacgactctgatcaagccctttattttgctttgcattctgtatggggagatcctcatcgctgagggggcggttggtgagccttcgaaggacgtggaagaaggaccaaatggaattcactatgattttagcggctgcaatgacgtgcagggaagccttttgagcgcaatgaaattccaactaaatcatgatcccgctctctgtggaactggaaaaggaacgggaaagggaggatatggcggcggtgggagcc

SEQ ID NO: 51190 - DNA, 521 bp, Glycine max
  Clone ID: PAT_MRT3847_17237C.1
caaatgaaaaataaatcaatacgaaatcaaatcaaaatgaagtttaaacagattggaaatatatcatattaacccatgcaaaacaatcaccaaacaatgcagatttaagcaaaatcttaaatcctaattgcaacaatgtgttcaagtgtaaaagaaattgtagttggtttcttaattttatcagcatgtagttatttgcttccaaggggaaggtcatccccttctttgctacatcactaataacaagcaatcgatagtgagcttaattgtgatgcaaacctgataaagccgtaactcaaaccgtggaccaatttccttcagttctatagatttagggctcccattcttttcataaatatgatgcctgagtgagatatagtcagactggttggaaaacacgacaatacgttttgtgtctagttttggcactggaaaaagatgcttcataatgtttgcggggtctgtcacctaacttagttgagaaattattgagaatcagatgtggataagcctcaggcatt

SEQ ID NO: 51191 - DNA, 333 bp, Glycine max
  unsure (1)..(333): unsure at all n locations
  Clone ID: PAT_MRT3847_17238C.1
gtccgtcaaagatgctcataacagtctaagccgaaggagaggaacattaccatatgcaaccaaaaaatcccagagctcgcgccatggtttccccaggtacaacagcannnnnnctgatcggattacccagatgatcgaccactagccttattaccgtcgcngactcnctccttcacactgatcctgttacaccttctcctggcccccnnctccagnnnagtgccagggtcgaaactgatgctttgcttggggattctgacgggctaacaaatcctggttcgatagaagaggactagcatctgattcatgtactgcgttctagctccaaagcga

SEQ ID NO: 51192 - DNA, 891 bp, Glycine max
  unsure (1)..(891): unsure at all n locations
  Clone ID: PAT_MRT3847_17239C.1
cccgaaaaggaagaccaagaaaaacccaaaaagacagaagccagacngagacaaagaatagagccccaatataangaggggcaggctcagaaggaaacaaacangaccaaaccgcctcttgatgatgttgaaactcctaaaggttccatgttggatcttaaaatttctcaatctaaaattgcacttcccaaaaacacagttggaggaaccattctgcgtagtgatctattggcaaattttttgacagagggcaattttagagcaagtgttgatttgcagcgcactcatcgtattaaaggaatgattaaaatggtggccacagctggtattcctgagaatacaggtatagcattagcctgtgctatgaatagttcctttagggggcgtgccagttctgatatttacaccatctgctctcaagactgagaattatggaatcctgcttgcacaaaagcaatgactatgtcatttaatccaaacccgtgttcttgatgcatggagtttggaatttctgaagcgtaccggatttcattgcgatatcatttgtgccactggatggactgccactccaatgcaggatgttcaggttacaattgattggtttatttcctctcaggaatgtgttcccaggacctattgtgttttaaatccacaaaatccttctgtgttaaattggtgcgatggggaaacttgcttttccccagggcacttccccaagtgtaaaatgaatgcctttttttattagggggaggagcttggtgcaaagaatgttttctcatgattagcccaatgctgttcttcatggggaaaattttgtggaaacttgtcttgaaattcttaaagactttcctaattaaatgccagctctttttcataacatttgaatttggt

SEQ ID NO: 51193 - DNA, 571 bp, Glycine max
  Clone ID: PAT_MRT3847_1723C.1
aaaacaacaagcattgaaaaacgcgcgggcagttaaagcataagattaacatgagagacgcagaagaaactaattaaggtaaagatcgaagaatggaagggtcttcagcatcatcgcatgaagaagagagaacagccactttctatgtgtaccatccttgctattttcttcaacaagcattcagggctctcttgaggtgtctaggtattgagtctgaagccacaatgtgttcaaaggcagaagaagagaaaagctcactgtcacaaattactgctgcagatgatcttattacaaactctccaagctgcaacatatcccacaaaaactcccaagatgctgcagatccaccatccacaactaatcaaaccattatcattgcaagttcaatggcaaggcgtggaaatcgagggtctagaattagccatgggtcaggccctcagcataattaaatacataccatgcatgggccatggctttggacttggttggaacttataaagtgtggtactcgaaggtcaggacttactctagggcccaggtctttagagaataaatgaaaaatttattaccg

SEQ ID NO: 51194 - DNA, 1131 bp, Glycine max
  Clone ID: PAT_MRT3847_17240C.1
tcctttgcgcacgtggacacttgcagcgcactcatagttttaaaggactgatcccactggtggccacagctggtatccctgagaatacaggtttatcactggcctgtgctatgaatagatcttctagggggcgtgccagttctgatatttacaccatctgctctcaagactgtgaattatggaatcctgcttgcacaaaagcaatgactatgtcatttaatccaaacccgtgttctgatgcatggagtttggaatttctgaagcgtaccggatttcattgtgatatcatttgtgtcactggatggactgccactccaatgcaggatgttcaggttacaattgattggtttatttcctctcaggaatgtgttcccaggacctattgtgttttaaatccacaaaatccttttgtgttaaataggtggatggggataactgacttttccccagggcactttcccgaagtgctaaaagaatgcctctttttatacggggaggagctggtgcaaagaatgctattctcatgaatatgccaaatgctgttctttcaatgtggagatactttgcaggagatctaattgttaagaagtggactactaaagacttctacctacaggaaccgaggcacttctcatggggattcatttggaaagaacgctgatgacaccatcaattttgagagcttatgcccacacgctggtgcagtttggagagattcacgaaaaagttgttttgaaatttttacaagaggaatttcttacagcttggtcaacttaagtgcgtcctgcaacaactctgttggctgatgggtgtccatatttgtattgctatggtgcatgatagttcagtgtctacaataccaggtgatttttgtcattggggttaagctgcaaccataaacaatatgtgtgcatatgggctcaatcctgggatttcaggttctcggattttgggcaccaattcctaagttcatttcgcagcaaactggttggaaatcaatgggaacagtgagggacaccattgatttttgattctagcaggccgggctttggccatttttttatggacctcttcgcgggaggattttttttgggacaaaccggggattggattcacacttatccaaaattt

SEQ ID NO: 51195 - DNA, 811 bp, Glycine max
  Clone ID: PAT_MRT3847_17241C.1
gcgttcattttgtccggttgactcagactatttacccgcagtggatggtggttaaggctgagttggtaacatagttgaatagatagtctctggatgaggttgaatctctaaaaggtctcatgtgggagctatataatatcgaaatctaaatgtgcacttcccaaaaacacagttggaggaaccattctgcgtagtgatctattggcaaattttttgacagagggcaattttagagcaagtgttgatttgcagcgcactcatcgtattaaaggaatgattaaaatggtggccacagttggtattcctgagaatacaggtatatcattggcctgtgctatgaatagttcttttagggggcgtgccagttctgatatttacaccatctgctctcaagactgtgaattatggaatcctgcttgcacaaaagcaatgactatgtcatttaatccaaatccgtgttctgatgcatggagtttggaatttttgaagcgtaccggatttcattgcgatatcatttgtgtcactggatggactgccaccccaatgcaggatgttcaggttacaatcgattggtttatttcctctcaagaattgtgttcccaggacctattgtgtgttaaatccacaaaatccttctgtgtttaataggtgagtgtgggaactgaactttccccagggcacttcccgaagtgtaaaagaatgccttttctataggtgaggagctgtgcaaagaatgttttctcatgattttcaaatgctgacttcaatgtgagaaatttgttgagattctgtttgaagttcaaatgattct

SEQ ID NO: 51196 - DNA, 1283 bp, Glycine max
  Clone ID: PAT_MRT3847_17242C.1
ggatggaaacaatgaagtgggagtgttaacgagatgtcgagccaacagcaagcacataatgcattaacttgagccgatggaagatgttttccttgaacaaaagtcaccattggtagtggtactcaaaatctagaaccttgaattcatgtctggttcaatctgcacgatggtattcgaaaatgtaaccgcccaaatgggccttccgcctctgaaaggcgctacaaaatatactacggatgcggcaattttcagaattgggtatgataagtatcaaccaaaagcattgcagcaactatgttgcagtcaggacttgcgaaactatcaatgataatttctatagctcccacatgcattgcagtagcttgaggcttgctatttttactcaccattgcagttctgaaaatgcagttcgtagtatttttgttgcgccttttcattagtgcggtaaggtcccattctggttggttacatttgccgaataccatcgtgcagattgaaccagacatgaattcagggttttagcttttgagtaccactaccaatggtgattgtgttcaaggaaaagatttcgtaatggttaaagttaatgtagcatgtgctgctgttggcttgacatcaacttacactccaacttcattgatggaatctggtttgcaaaaagacagagggttaattgtggagtattttggaaggatgtcttacgttgctcataacgttaatcagccccaagagaaagatttgatggagggaaatttttcctttgatattaaatctcgctctagattcggaaaaagtttcctctacaaaagcacaatttgttagtggaaaaaccttcaaatatgatataattggtgctggttcacattcttcagaagattttcctgaaaaggaagatcaagaaaaacccaaaaagaatgatgccagattgagacacagaatagatcctcaatataatgagggtcaggcttatatggaaacaaatttgtttaaaatcgtctcttgatgattgtgaaacttctaaaggttccatgtttggatctaaaatttctcaactctaaaattgtactttccaaaaacacaatatgtggaaccattgtggcatgagagctattggcaaacttttcgacagagggcaattttagagcatgtgttgatttgcagagcacttatcggattaaaggaatgattaaaatggtggccacagttgggattcctgagaacccaggcatatcattgtgctgtgctatgaataggtcttttaaggggcgtggcagatctgatat

SEQ ID NO: 51197 - DNA, 1143 bp, Glycine max
  Clone ID: PAT_MRT3847_17243C.1
gggtagacttttctatttctctccttggtttcattttgtgcttttaccggatccgattggcggttaaagggggctttttttgaaaaacacttgggcgttggtgccaatggtagcttcggttaattttcttttggggccaccaggttcactgagacaacaatttttaattgcagagatttggacatcttggttgtttattatacaatagcaactcaatttagaaaatttctaccacattacattaggtggcatctgtataccttgctgatctacattctcccatcttttctcactgctgaaattaaatataagcggaatcagagtaatattcaaatttccggcttattttacgacggcagatacaaattctggactaaacacgagaaaaatcttgctttgacagaagaagaaaagatggaagtgattagaaatagaggcattcctgctgatgttcttgcaaagcgagctcatgaatttgaaaaacatgttgctcatgaaagtctcacggatcaaattcctgctgttgacaagttgtattctactaaggttaataagtttgcaaaaattatgaacctcacacaaagagctgctggtgatcttaaacttcctactgatgggaagttggatgaaggaaagcatatgcctgtatctaacattagtgcaggggaaaattatgtagatcaaatacccctaatggcacaagaggaaattctgttttctagtgcaagtgatttcagaactgcgatggtgagtaaaaatagcaagcctcaagctactgcaatgcatgtgggagctatagaaattatcattgacagtttcgcacgtcccgactgcaacatacttggtgcaatgctcttggttgatacttatcataccaatcctgaaaatgcagttcgtagtatttttgttgcgccttttagaggaggatggcccattcgcgtggtacatttccgaataccattgtgcagattgaaccagacatgaattcaaggtttcagtttttgagttccactaccaataggtgattttgttcaaggaaaagatctcacaatggttaaagttaatgaaccatgtgctgctgttggtttggccttaatttccacttcaacctccattgttggaatttggtttgaaaaagacaga

SEQ ID NO: 51198 - DNA, 973 bp, Glycine max
  Clone ID: PAT_MRT3847_17244C.1
ttacgtccgcctactcgtccgcaaacccgtgttctgatgcatggagttgggaatttttgaagcgtaccggatttcatagtgatatcatttgcgtcactggatggactgccaccccaatgcaggatgttcaggttacaattgattggaaaatcacctctcagcaagggcgaacgaggacctattgagttttaaatgcacacaacaggctcactgagaaaacaattgttactggcagagatttggacatcttggttgtttattacacaatagcacctcaatttataaaatttctaccgcattacattaggtggcatctgtataccttgttgatctacattctcccatcttttctcactgctgaaattaaatataagcggaatttgagtaacattcatatttccggcttattttacgacggcagatacaaattctggactaaacacgagaaaaatcttgctttgacagaagaggaaaagatggaggtgattagaaatagaggcattcctgctgatgttcttgcaaagcgagctcatgaatttgaaaaacatgttgctcatgaaagcctcaaggatcaaattcctgccgatgacaagttgtattctactaaggttaataagtttgcaaaaattatgaaccttagacaaagtgttgttggtgatctttaaacttcttactgatgggaagatgtatgagggtaagcatattcctgtatctaatattagtgcaggggaaaatcatgtagttcaaatacccctaatggcacaggaggaaattctgtcttctagtgcaagcgatttcagaactgcaatggtgagtaaaaatagcaagccttaagctactgcaatgcaatgtgggagctttagaaactatcattgatagtcttccaagtcctgactgcaacatatatggtcaaagctttgggtgatacttatataccatcctgaaatgcaattcttatatttttgttgcccct

SEQ ID NO: 51199 - DNA, 1196 bp, Glycine max
  unsure (1)..(1196): unsure at all n locations
  Clone ID: PAT_MRT3847_17245C.1
aggtatagtattggcctgtgctatgaatagttcttttagggggcgtgccagatctgatatttacactatctgctctcaagactgtgaattatggaatcctgcttgcacaaaagcgaggactatgtcatacaatccaaacccgcgtgctgatgcatggagctagtaatttatgaaacgtaccggatttcattgagatatacattcgtgtcactggatggactgccaccccaatgcaagatgatcactgatacaattgattggtatatttactctcaagaatgtgtgcccaggacctattgtgatgagaatccacaaaatacttgtgtgataaataggcggatgggaaaactgactttcccccagggcacttaccgcagtgttaaaagaatgcctctttctatagggggaggagctggtgcaaagaatgctattctcatgaatatgccaaatgctgttctttcaatgtggagatattttgttggagatctcgtctttgaagtttctaagatgacttctccctacattaaatgtacagtctctttcttcatagcatttggaaatttggctgatgacaccatcaattttgaggcttttccccacaagcctggtgcacattggagagattcaggaaaaagttgtattgaaattttcacaagaggaatttcttacagcttggtcaactcaggttgcgtcctgcaacaactctgtcggctgatgggtgtccatatttgtatgctatggcacatgatagttcagtgtctacaataccaggtgattttgtcattggtgttaagttgacaaccataaacaatatgtgtgcatatgggctcaatcctggtatttcaggttctcgtcttttgggcaccattcctcagtctatttcacagcagactgtttggaatcaaatggcaacagtgagaacaccattgaattttgattctagcaagcagagcttttgacaattttctattgaccttctcggtggaggaatcttagcggacataactggagataggatcacacttatacaaaattctgcaattagtaacttgttgagagttgctgcttggaagaaaggctgtctaatggtcaagactgtgatgtctaggaatgcatgtaggcaaaacgagtgattgagcctaatatgtacaagtgtatttacaaactgtgacataacanagaatttcgatggatgg

SEQ ID NO: 51200 - DNA, 1225 bp, Glycine max
  Clone ID: PAT_MRT3847_17246C.1
tttcgtccacgcgtacggaaattttgataaaccgcgatcataggttgccgcaccttaaaaccggaaacaaaagcaatcgttacttgattccaagaatctctcaatttcttcctacttttttgtgtacgatttcttaagggaaagaaaatcactctctgtgctggccacagacttcgtgaatcattttcttttccattcttagtttatttgctgaacactctcctatttgatataggacttcgtgtcagatttaaacttcttctgtttctttttcagttctctgtttaatttcaagttcaagctggtgaaatcttggattagtgctcccactctcctatctggtataggacttcgtgggtagacttttctatttctctcctttctttcactctcttcttctcactgatccgcattgccgttcaaagtggtcttatttgaaaaacacttgggcgttggtgcaaatgtttgctttgtaattttctctggagacaacaggttcactgagacaacaattttaattgcagagatttggacatcttgggtgttgattatacaatagcaactcaatttagaaaatttgtaccacattacattaggtggcatctgtctacctggctgatctacattctgccatatgttctcactgctgaaattaaatataagcggtatcagagtaatattcaaatttccggctgattttacgacggaagatacaaattctggactaaacacgagaaaaatcttgctttgacagaagaagaaaagatggaagtgattagaaatagaggcattcctgctgatgttctggcagagcgagctcatgaatttgaaatacatgttgctcatgatagtctcaaggatcaaattcctgctgttgacaagttgtattctactaaggttaataagtttgcaaaaattatgaaccttagacaaagtgttgttggtgatcttaaacttcttactgatgggaaagttgtatgagggtaagcatattcctgtatctaacattagtgcaggggaaaaatatgtagttcaaatacccctaatggcacaggaggaaattcttgtctctaatgcaagggatttcaaactgcatggtgagtaaaaatagcagcctcagctactgcatgcatgtgggactatagaaatattatgatagtttcgacgtcccgactgacatattggtgcaatgctttggtgatacttatataccaatctgaaatgc

SEQ ID NO: 51201 - DNA, 1014 bp, Glycine max
  Clone ID: PAT_MRT3847_17247C.1
cctgtccggaatacttgttttgatccacgcgtcctagtagataaaccgcgatcacaggttgccgcagcttattttttgaaacaaaggcggtttttactcgatttcaagaatcttccaatttcttcctacttcttggggtacgatttcttaagggaaagaaaatcactctctgtgctggccacagacttcgtgaatcattttcttttccactcttagtttatttgctgaacactctcctatttgatataggacttcgtgtcagatttaaactttttctgtttctttctcagttctctgcttaatttcaagttcaagctggtgaaatcttggattagtgctcccactctcctatctggtataggacttcgtgggtagacttttctatttctgtcctttctttcactctcttcttctcactgatccgcattgccgttcaaagtggtcttatttgaaaaacacttgggcgttggtgcaaatgtttgcttcgttaattttctctggggacaacaggctcactgagaaaacaatttttacttgcagagatttggacatcttggttgtttattatacaatagcaactcaatttagaaaattcctaccgcattacattaggtggcatctgtataccttgttgatttacattctcccatcttttctcactgctgaaattaaatataagcggaatctgagtaatattcatatttccggcttattttacgacggcagatacaaattctggactaaacacgagaaaaatcttgctttgacagaagaggaaaagatggaagtgattagaaacaaaggcattcctgctgatgttcttgcaaagcgagcttatgaatttgaaaaacatgttgctcacgaaagccttaaggatcaaattcctgttgttgacaagttgtattctactaaagttaatatagttggaaaaaattttgaaccctagacaaaagtgttgttggggatcttaaaccttctacctgatggaaagttgtttgagggtaagcttttcct

SEQ ID NO: 51202 - DNA, 110 bp, Glycine max
  Clone ID: PAT_MRT3847_17248C.1
gcgttcaaacattctggaacataagaaagggttttttgttgatctctacattgccctggatcttgaacatggttgcaaccgtgattctgatgaaaaggatctgcaattcc

SEQ ID NO: 51203 - DNA, 927 bp, Glycine max
  Clone ID: PAT_MRT3847_17249C.1
ctttaggagtttcaacatcatcaaggttccatgttggatcttaaaatttctcaatctaaaattgcacttcccaaaaacgcagaatggatcctccaactgtgtgactggggggagttatagtggatggggaaatttgcagagccctcatggaacctttgggaggattaacatggtggccagagaaggtataattgcgattacaggaatcgcattagcctgagctatgaatagttcctttagggggcgtgccagttctgatatttacaccatctgctctcaagactgtgaattatggaatcctgcttgcacaaaagcaatgactatgtcatttaatccaaacccgtgttctgatgcatggagtttggaatttctgaagcgtaccggatttcattgtgatatcatttgtgtcactggatggactgccactccaatgcaggatgttcaggttacaattgattggtttatttcctctcaggaatgtgttcccaggacctattgtgttttaaatccacaaaatccttttgtgttaaataggtggatggggaaactgactttcccccagggcacttcccgaagtgttaaaagaatgcctctttctatagggggaggagctggtgcaaagaatgctattctcatgaatatgccaaatgctgttctttcaatgtggagatattttgttggagatctcgtctttgaagtttctaagatgacttcttcctacataaaatgtacagtctctttcttcatagcttttggaaatttggctgttgacaccattaattctgtggctttccccacaagctggtgccatttgcagagatccaggtaatagttgttttgaaattttacaagaggatattcttacatcttggtcaactatgtgcgacctgcacaacttgttggctgatgtgggtctttttgtatgct

SEQ ID NO: 51204 - DNA, 397 bp, Glycine max
  Clone ID: PAT_MRT3847_1724C.1
gaagaagtgaagatatgagaacagaacgtatttggatctgataagagaagatggggggaggaatggaagcaaacaaagaacaagttcatagaggattggagcactgccagagagaatctggagtatcaattggcgctggactcaacgctaccttgctcttgttggcatgtttggcatcgctattcccttcctggtctacaagggcataagccgtgaattcgtatgtaggcatgtttcaattaccaaattagggctttatttattgaacgaatcactctatggcttgtgattgtacctatgcgtgcgatacttggtataccttttttattgcatactaaggatcttcactttcttttaacaactatatgtatgcgtatgatgatacatacattatttt

SEQ ID NO: 51205 - DNA, 367 bp, Glycine max
  Clone ID: PAT_MRT3847_17250C.1
tcgtccacgcgttcgtccacgcgtacgttcacgcgttcgaaacagaaatcgtcgatttcttctaagatatataacggggcattggtctgatgttcgaatcgtacttgcgggatcaaacgactgctattggtagagaagggatgcatgggatgcttggaatgcccgttgaagctcatcaacttgatagtgacaatcactggtcttgccatcgtaggctacgggatctatatttctgttgaattctctaaagcttcagatgatgacaacatgccggtcgtttctccagcaagcgatgattcttatctgagtcaacttcgcccgcctgtgcttatcgccaagtccctatccaacgacttttacgatcact

SEQ ID NO: 51206 - DNA, 527 bp, Glycine max
  Clone ID: PAT_MRT3847_17251C.1
aaaagaaaaaggccttgggttttttttaggaagatggtttggccttttaagaggggggaaaaacataaagatgattgttttacaaagggggggcccttttaagggggcccgcattcacagggggggggtttttaccaaagggggcccccaaagggttgggtaagttctaaaagggaccttttccagggacataaggtgggggggggaaaccaagctttggaaactttgggggcccaccatttttaatttccttcccctttaaaagggcagctggggcggggtcctttgttgggcccctgggggcaaagggccccccgggaagaagcttggtttccaaatccgggcccttaatttttttgggggtctccgccccccccccaaaaacttttttggcgcccccggccccattaaaattggggggggggggtttcccgctgttgttcaacgtccccccctcaaaaaaaaaagctccgggcttggaccaaacagccttaggaccacagttagctccgtttttgttaaaggcc

SEQ ID NO: 51207 - DNA, 128 bp, Glycine max
  unsure (1)..(128): unsure at all n locations
  Clone ID: PAT_MRT3847_17252C.1
aaaacaaagcgggcnttccaatgggcgacttctggcgggctcaacccttgctcncgannttcaaaccaaccttggttgcagggncttncttctaacctttcccaccaccaancatancggacanngac

SEQ ID NO: 51208 - DNA, 1328 bp, Glycine max
  Clone ID: PAT_MRT3847_17253C.1
aattcggctcgagcaagaccaacaccaacaccaacactagcgtgtttcgtcttcttcgtctttactcttttcttcaccgaagcgtaaaaagaaaaggcttgactagagaaagagagagagagagcttcgaatcgaaactcagaagtagaaaaaaacacaaatcacaatcgctatggctaggtacgaccgagcaatcaccgtgttctcccctgacggccatctcttccaggtcgagtacgccctcgaagccgtccgcaagggcaacgccgccgtcggcgtccgcggcaccgacaatgttgtcctcggcgtcgagaagaaatccaccgccaaactccaagactccaggtcggtgaggaagatagtgaatctggacgaccacattgcgctggcctgcgcggggctgaaggccgacgcacgcgtgctcataaacagggcacgtgtggagtgccagagtcacaggctcaccgtggaggatcccgtcacggttgagtacataacgcggtacattgcggggctccagcagaagtacacgcagagcggcggcgtgaggccctttgggctttcgactctgattgtcgggtttgatccctacactcactcgccctccctctaccagacggatccctctggcacgttctcggcgtggaaggcgaacgccaccgggaggaactcgaattcgattcgggagttcctggagaagaactataaggacacttctggccaggagactgtcaagttggctattcgcgcattgcttgaagttgttgagagtggagggaagaacatagaagttgcggtgatgactaaggagcagggtctgcgtcaactggaggaagccgaaattgatgccatcgttgctgagatcgaagcggagaaggcagctgcagaggctgctaagaaagcccctcctaaggagacataattttctgttttgtgttatgcgagcattgttcttgctaggtattggctgtactcactgaagctaaaaattgatgccattgtgtctgagattgatgcaaagaaaacggctgctgaggctgcaaagaataccctttctaaggagacatgattttatgttacttttatttagctcgtgaattgttcttgctagatgttggcctaacttaaaatgactgctttattgtttttgggtactgccattagtgttggtcatatttaattgcatgtcattattattgaagttcaattgagtagggtgatacacaacatcttcatagacaggagctggttctttatattgtggccaatacgactatatttaaatatattttcatagtttagaagaaatttaaatgacgtggaatggg

SEQ ID NO: 51209 - DNA, 273 bp, Glycine max
  unsure (1)..(273): unsure at all n locations
  Clone ID: PAT_MRT3847_17254C.1
aagattganaaccactcagatcgatttancattcaaaacaactcanatcttctataaaggtgacaaacatcttgactctaaagtaggcatgacatgacacatgccccatgcatgagagtgaaccaaaacanaaggnaacccatctccaacaaatggcataatttggacaagaactttgaacatgttttctaaattgacgagactcacaagacagggttggtaacttggacagaattgacaccatttgtttttgcttgcaagactgggatggcc

SEQ ID NO: 51210 - DNA, 1314 bp, Glycine max
  Clone ID: PAT_MRT3847_17255C.1
aagtgtatccaatccagatacaagggttgatgatgcagagtttgaggagaatgaagtttatgcaattgatatcgtagcaagtactggagatggcaagcctaagcttttggatgaaaagcagacaactatttataagagagctgttgacaagagctatcacttgaagatgaaagcatctaggttcattttcagtgaaataagccaaaagtttcccatcatgcccttctctgcaaggttagcttgatatgataatctaaatgtttcaacactttgtttaacctgaaggttttgaatttgggttctctttgttgcacattaaatcttagctgtttcataatagtgcaagggctttggaagagaaaagagctcgtttgggtttagtggaatgtgtgaatcatgagctcctgcaaccttatcctgttctgcatgaaaagcctggtgattatgttgcacatatcaaattcactgtcttgctaatgcccaatggatcagatcgtgttacgtctcactcactccaggagttgcagcccaccaaaacaatagatgatcccgaaatcaaggcgtggctagcattgggcacaaagacaaagaagaaaggcggtggaaagaagaagaaaggtaagaagggggcagaagctgaaccaatggatgcaacaaatgatgctacaccccaagaacaagattgagagacagaaaccctttgattttgcttttgatccctttcaattttggtacatttttcaccaagttgtatctgcttgattgtgaatttagtacagctttcggacatccaatgttaataggaatttgatttccttggctattgtacttgacctgaatgctgtactcctgattaagcataaatatgcttaattgttggaggggttttaattttataaacaaaggatttcaaatttaaaacccaattacatggttggaaatgtaaaaaaaaaaaaaaaaaaaaaaaaaaaaaaaaaaaaaaaaaaaaaaaaaaaaaaaaaaaaaaaaaaaaaaaaaaaaaaaaaaaaaaaaaaaaaaaaaaaaaaaaaaaaaaaaaaaaaaaagggggggcccttttaaaaaaaccaaagttaaaaacccggggaatgaaaaaaaaaatttttttaaaagggtcacaaaaattaaatcacttgcccgtttttaaaaaagggggaaaaggaaaaaacccggggttaaccaaattaaacacctttggaaaaaacccctttttcaaaggtgggggaaaaaaaaaaaagccccaaacgaatcgcctttcaaaaaatttgcccaccttaaagggaaaatggacccccc

SEQ ID NO: 51211 - DNA, 498 bp, Glycine max
  Clone ID: PAT_MRT3847_17256C.1
aaaactttcatggttttcattttaaaaaaaaagagaaaataaaaaaaaaaattaaaaataaaaaactatataatattaaaaataaaaaaataaatatagaataaataaaaagaacattggttttaaaattgaaaaaatacattacaaaaaaaggggggggccgtttttagggtttcaagttttttatccccgttttgcgagctttataattttttttttggggaccgaaaatcccttcccgtggccgtctttttaaaacttggggttggggaaaccttgggggtctcccaattatatcgaatgagaaaacaacccttttttttcaggggggttaaaatgaaagaagtcccgccgtatccccttttcaaacgtttgttaaacttaaagggtatttgggcccccccttagcggggccttttaactcggggggggttggggtcacctccctagggtccgtttccttttgttggccccttttaccccgtttttttccttttt

SEQ ID NO: 51212 - DNA, 1843 bp, Glycine max
  Clone ID: PAT_MRT3847_17257C.1
ctcgagccgtgatctcttaccttaaaaaaaactccaaaagagagagaaacgttattattaggaactaaagcaaaaaccctaacgctagtgcaaccaaagcacaaatcctatataagccaccgcttaaccttgaccctgtatgcgactaaccctagttcattgcactgcaacttagccacttgaacccccttcgtaagcctcttcacatcttcacttcttcacttcttcttccgcactaatacgaaaccagagggaattcacaaaagaggttaccatgtcggacgatgagagagaggagaaggagttggatctcacttctccggaagttgtcaccaagtacaagagcgccgcggagattgttaacagggctttgcagttagttatttcagaatgtaaaccgaaggcaaagattgttgacctttgcgagaaaggggattcgtatattagagagcaaactggtagcatgtacaagaatgtgaagaggaagatagagagaggtgttgccttccctacatgtgtgtctgtgaacaacactgtctgtcacttctctcctcttgccagtgatgaaacagtgttggaagatggtgatatagtgaaaattgacatggcttgccatatagatgggttcattgctgctgtggcacacactcatgttcttcaggaggggccagttacaggacgggcagccgatgctcttgcagcagcaaacaccgctgccgaagtggccttgcggcttgtaaggcctggaaggaagaacaaggatgtaactgaagcaattcagaagattgccgcagcgtatgattgtaaaattgttgagggtgttcttagccaccaaatgaaacagtttgtgattgatgggaataaggttgtgctaagtgtatccaatccagatacaagggttgatgatgcagagtttgaggagaatgaagtttatgcaattgatatcgtagcaagtactggagatggcaagcctaagcttttggatgaaaagcagacaactatttataagagagctgttgacaagagctatcacttgaagatgaaagcatctaggttcattttcagtgaaataagccaaaagtttcccatcatgcccttctctgcaagggctttggaagagaaaagagctcgtttgggtttagtggaatgtgtgaatcatgagctcctgcaaccttatcctgttctgcatgaaaagcctggtgattatgttgcacatatcaaattcactgtcttgctaatgcccaatggatcagatcgtgttacgtctcactcactccaggagttgcagcccaccaaaacaatagatgatcccgaaatcaaggcgtggctagcattgggcacaaagacaaagaagaaaggcggtggaaagaagaagaaaggtaagaagggggcagaagctgaaccaatggatgcaacaaatgatgctacaccccaagaacaagattgagagacaaaaaccctttgattttgctttttgatccctttcaattttggcacatttttcaccaagttgtatctgcttgattgtgaatttagtacagccttcggacacccaatgttaataggaatttgatttccttggctattgtacttgacctgaatgctgtactcctgattaagcataaatatgcttaattgttggaaaatatatcaaatttaaaaccccaattttgtgtttggaaatgtgtgttctgtgcctaggttgaaatgttgacctttttgcattggttagacactattgttttgtatatgcacgtagctggaccgattgttttgtgggagaatgaatatttatgtaatatcggcaaaacttaaaagaggaaataacacatgagattttgtg

SEQ ID NO: 51213 - DNA, 186 bp, Glycine max
  Clone ID: PAT_MRT3847_17258C.1
tcatcagctgtatgatcgtcgctccgttcgtttggtgggggggcggggggcggataagaacgctttgcggggcgaggtggaggcgggtggaaacagctaaacctacctacagccacgttcccacgtaagatagtggagagccgtaacgcgaccagagaaaccgtatgtatcgaaaccaaaactgga

SEQ ID NO: 51214 - DNA, 133 bp, Glycine max
  Clone ID: PAT_MRT3847_17259C.1
ggaagtttggaaaccaccaagtacttttgcacagtcattgatgcccctggaccccagggatttcttcaagaaaatgatcactgggacctcccaagctgactgggctgttcttataattgattccactactggt

SEQ ID NO: 51215 - DNA, 242 bp, Glycine max
  Clone ID: PAT_MRT3847_1725C.1
ggcttggattcttgcttcagtggtctggtgctttagcactagggtaagtgagatttctagttgttgaataattttgattttgtttgggagaagaatttcaatttcttgtagagtagatagaacctattctgttgaattttatatatagggatccgacctgattatcattttatttgctgtgtattatagaacaaattgctgatgtttgtattaagaatgtactgacctccaagggcccaaaa

SEQ ID NO: 51216 - DNA, 249 bp, Glycine max
  Clone ID: PAT_MRT3847_17260C.1
gtccctcctcatttccacgtcagaattttaaaaggacacggaagcaacatttgattgcttccactggacgtggatcaaagaatgccacatgctaaatcaaacatgctaacttattgcatcttagttcccacatgataggactatattcgtttggaactttgtaattctcaagactgaatttaaagaatgctaaaataaaaatgaataataatagaagaaccatggaaaatgtttagaaatttgacccac

SEQ ID NO: 51217 - DNA, 427 bp, Glycine max
  Clone ID: PAT_MRT3847_17261C.1
aaggcccaaacaagaaaagaattaaccccagttttttcgcaacaatggtgatttccttacaaaacaaagacaaacccccgcaaaaataacgggagggtataatttcatatccccaaaaaaaaactaaggggcttttgaaaacatttaaactcaaaactcggcaaaacttctttagaacaggtacttaaaatgcccgccccaaaaattttttcaaccaatatcaaaatatggggaccactttttggatttctttggggcttgggctggctgggatgctggaccaactggaacactggatgcgggtgatactttttttccaggaccttgggctaatcgctcctccctccgagcaattttcctttttttgttggccttgtttttggcacgtttggcctcaaactgggcggacaagggtttcttttttgcc

SEQ ID NO: 51218 - DNA, 441 bp, Glycine max
  Clone ID: PAT_MRT3847_17262C.1
aaaaaacaccaaggggcaaaaaattgacccccgccctaaacatagggggatgaaacctgaaaatttaaaaacctcaaggggcataaaattgaccaccgcactaaacattcatcattcgcattgggacggcccctttttttttttgattaacggacattcccacccttcctccttgaaacaagggcaaaagaagaagaggccctcttgttctttcgcttgggcctttttaaggaatcttcaaaggaaacaaaatctgaaaggggggttctccttttccccttttccttcctactttttttaagccggggcctaaacccaacggcttaattagaaaaaatggccctcttcctccgggggtcccacctttttttcccccccccccttttttcaccggaatcatcggaatcactaacttccctcttggcaccccccctctttgac

SEQ ID NO: 51219 - DNA, 318 bp, Glycine max
  Clone ID: PAT_MRT3847_17263C.1
cggagaaaaacacaaggcgggccaaaaacaatcccgaaaggcaacactcccccgagccgaaactcctggaggctcctgaaaagaaatcccctaaaaaagggggacctaaattcaaaaaacaatttgctccaaacccaataaaaaacgtgcgacacccccctaaaaccgccccataaaacggtcctattccccaccctttattgaactcaaatgcccaggtttttaaaaaaaaaagggacacaagataaaccaaaaccgggcccacaaggggggccccccccataccccccccctgggagtccgggccggtcccccccg

SEQ ID NO: 51220 - DNA, 449 bp, Glycine max
  Clone ID: PAT_MRT3847_17264C.1
agcgtgctcatgtgctcttccaggggggaacagagaccacccaaacggctgaagacgggcggcgttgcattcggacgctcggatgattctatcacccaaacctcaatcaaggcctatattgctgatgaccatacaaccttgctctccgcctttgccggtgctggatcagacgtaccctatgggaagctgacacgagaggccacgcttgctcctgatgggtgactgacagatgctattaggcacgggagggcagtccttgatgcagttcctgttggtggcaacatctgtggtggccatgtgaaccctgctgagacgattggattggcgctagggggccacatcacgatcctcactggctttttgcactggattgcacagcttcttggctacatggtggcatgagtgcttcggaaccatggcacaggaggcctgccaactccaatccacaa

SEQ ID NO: 51221 - DNA, 1055 bp, Glycine max
  Clone ID: PAT_MRT3847_17265C.1
gcttcgaaggcgtgtgacaagaaacctcagagagcgtttcctctgtctggggtccattcacaatttcacatttcattcatattcattacttcatgggccttcaacaagctccttaatttcatcttcttcttctaccttttcctcacgcatcaccgtttcttttcttgtttctgtctacgtgtggtgtcccaatacacaatagaacaacaaacaatatacacacacacaaacataactctctttatttctctctctcttttgctgaggtaattactgaaatccgtgcctgctgctttcacccttttgtgccaaagtttgcaattttttttctattatattgtgcctctgctctgcttgccaccaaagctttcaaatttcctcttctgggtctttctcttttgcctctgggaaatggctaattgcagaaaacaacaaggagagggtcatcatcaagtgggtcactggcgatcctcctacaacaggaagccacccttgggaaataagtggcattcaacagtgcctgcctgggaaaggaaattctgcacttcaattggctcagttccatggcgaaagctagtagaaagcaagaagtatatgcacctgtttgaacatgtggtgaactgggatgactctgccggcaaagaggcatttgacaatgcaaaaacaaggtattgggctgagatcaacggtgttccctgcaacatttcgccacctgatcccaacattttcatcgatgaagtagattggaatgcaactgttgaccctcaacttattctagacgtggaaacagaattagcaaaggtccccaatgaggaactaaggaagaacgatcatgagattgtgatgattggtggcgctctcttcttgaacgagcaaaagcttccatgtactggatgggacgatgattatgctgccgaaggaccaaagccttttgatccaaattctgctgtccaaggctggggggaaaatctgcaagacacaatggagtagaatctgggaaactgaatcatgctcctgctgacatgcaggtgaacatgttgctcctgctgacctgc

SEQ ID NO: 51222 - DNA, 1413 bp, Glycine max
  Clone ID: PAT_MRT3847_17266C.1
aacaaatagcaattcgttacgttgattttcatagaaatcttctcaattttctttcctactttctttgtgtacgatttcttaagggaaagaaaatcactctctgtgctggccacagacttcgtgaatcattttcttttccactcttggtttatcttgctgaacactctcctatttgatataggacttcgtgtcagacttaaacttcttctgtttctttttcagttctctgtttaatttcaagttcaagctggtgaaatcttggattagtgctcccactctcctatctggtataggacttcgtgggtagacttttctatttctcttctttctttcactctcttcttctcactgatccgcattgccgttcaaagtggtcttatttgaaaaacacttgggcgttggtgcaaatgtttgcttcgttaattttctctggagacaacaggttcactgagacaacaatttttaattgcagagatttggacatcttggttgtttattatacaatagcaactcaatttagaaaatttctaccacattacattaggtggcatctgtataccttgctgatctacattctgccatcttttctcactgttgaaattaaatataagcggcatcagagtaatattcaaatttgcggcttattgtacgacggcagatacaaattgtggactaaacacgagaaaaatcttgctttgacagaagaagaaaagatggaagtgattagaaatagaggcattcctgctgatgttcttgcaaagcgagctcatgaatttgaaaaacatgttgcttatgaaagtctcaaggatcaaattgctgctcgagacaagtatgtattctactaaggctaataagtttgcaagaattatgagccttagacaaagcgttgttggtgatcttaaacttcttactgatgggaagttggatgacggttagcatattgctgtatctaacattatggcaagggaaaattatgtaggtcaaatacccctaatgggacaggaggaaattctgtcttctaatgcaagagatttcagaactgcaatggagagtaaaaatagcaagcctcaagctactgcagtgcatgtgggagctatagaaattatcattgatagtttcgcaagtcctgactgcaacatagatggtgcaatgcttttggttgatacttatcataccaatcctgaaaatgcagatcgagtatttttgttgcgcctttcagaggcggaaggcccattcaggtggttacatttccgaataccattgtgcagattgaaccagacatgaattcaaggtttcagcttttgagtaccactaccaaaggtgattttgttcaaggaaaaaaacttccaatggttaaagttaatgcaacatgtgccgctgttggcttgacatcaagatacactccaactccat

SEQ ID NO: 51223 - DNA, 696 bp, Glycine max
  unsure (1)..(696): unsure at all n locations
  Clone ID: PAT_MRT3847_17267C.1
taggcttcgaaggcgtgtgacaagaaacctcagagagcgtttcctctgtctggggtccattcacaatttcacatttcattcatattcattacttcatggtccttcaacaagctccttaatttcattctctccttccaccttttcctcacgcatcaccgtttcttttgtttctgtcttagtgtgccgtgtcccaatacatacataatagaacaacaaacacacacacataactctctctctctgctgaggtaattactgaaatccgtgcctgcttccacccttttgccgaagtttgcaaatttttctcttatattgtgtctctgctctgcttgcaaccaaagctttccaatttcctctactgggtctttctcttttgcctctgggaaatggctaattggagaaaacaacaaggtgagagtcatcatcaagtgggtcagtggcgatcctcctacaacagaaagccaccgttgggagataagtggcattcaacagtgcctgcctgggaaaggaaattctgcacttcaattggctcagttccatggcgaaagctagtagaaagcaagaagtacatgcacctgtttgaacatgtggtaaattgggatgactctgccgcnaagaggcatttgacatgccaaatgaggtattgggctggaatcaacggggttccctgcacatataattgcctgatccaacatt

SEQ ID NO: 51224 - DNA, 1102 bp, Glycine max
  Clone ID: PAT_MRT3847_17268C.1
cccccaagggggttctacttttaagagtacgatctcttaaggccaagaaaaacactctctgagctggtcacagacttcgtgaatcaaatactcttccactcctggtttattcgctgaacactctcctatttgatataggacttcgtgtcagatttaaacttcttctgtttctatctcagtcctctggttaattttaagttcaagctggtgaaatcttggattagtgctcccactctcctatctggaataggactccgcgggtagacttttctatttctctcctttctttcactctcttcttctcactgatccgcattgccgatcaaagtggtcttaattgaaaaacacgttgggcgtcggtgcaaatgtttgcttcgttaattttctctggagacaacaggctcactgagaaaacaatttttacttgcagagatttggacatcttggttgtttattatacaatagcaactcaatttagaaaatttctaccgcatttacattaggtggcatctgtataccttgttgatctacattctcccatcttttctcactgctgaaaatttaaatataagcggaatctgagtaatattcatatttccggcttattttacgacggcagatataaattctggactaaacacgagaaaaatcttgctttgacagaagaggaaaagatggaagtgattagaaacaaaggccttcctgctgatgttcttgcaacgcgagctcatgaatttgaaaaaccatgttgcccatgaaagcctcatggaacaaattcctgctgttgacaagttgtattctactaaggttaataagttttgcaaaaattatgaaccttagacaaagtgttgatggtgaacttaaacttcttactgatgggaagttgtatgagggtaagcgtattcctgtttctaatattagtgcaggggaaaagcatgttgttcaaatacccctaatggcagatgaggaaattttgtcttatagcgcatgtgattacagaactgctatggagagttaaatttgcacggctaaagtttctgaaatgcatgtgggagctatataaattatgattgctagttttgcaagtgtctgctggaacata

SEQ ID NO: 51225 - DNA, 799 bp, Glycine max
  Clone ID: PAT_MRT3847_17269C.1
tctcgctgcgagcgggccgcatgtccccgagtgtcttgtgctccccacgatttactttcacctcactcccgaacactaccctaattgccctattctctcttccttcgtcccagcgaccacaaatcactgcaattcaaggtttgaacttcaaatggcgagcgctgtagatgcttcaggaaacccgatcccaacgtcggcggtgttgatggcgtcgtcgaagcacattgggataaggtgccactccgagaatttggagtttctgaagtgcaagaagaaggatcagaaccctgaaaattgcctcgataagggtcgtgatgtcacccgttgcgtccttggccttctgaaggatctgcaccaaaagtgcacaaaggagatggatgattatgttggctgcatgtactaccatacaaatgaatttgacttgtgtcgcaaagagcagcaagcattcgagaaaaagtgttctttggaatgaaattatgcactgctgttgtcgaaaataatatcacaggcaatttggagtgagcaaatgagcctgttttccaaaaattcattgaccttttccgtttgtatgacagtgttggaatctataccattaactatgttggtcgtctaaatttttctagagaaatgcatccaagcaagacaaaacaagatcctcttcaaacataataactgacaagaatttttgaagttggaacatgcttgtaatttgatctctacgtttgaaatgcatatttcttgtgctttaaaaaaaaagatagcttgactttatggtgccctggcgtttcctgacaactga

SEQ ID NO: 51226 - DNA, 739 bp, Glycine max
  Clone ID: PAT_MRT3847_1726C.1
actcaaatgaggaaggaaaggaagaagctaagaaagaatgccgctaaacctgtagtaagcacttctaggaactttattagagctaagaaggatgaaaattcttttgagaaaaatggggcttttggcagaggaaatgagtctgagggaaagttgaagaaaagggggaattttaaaggaatgcgatcgggtgaagaagttttggagaggggaaagttgaggactttggattctggtgggaagaagaagagtatatatgcttcggctggaggggataaaaatgtgaagttagagaatggtatggaagtatctaagaagagaactttgattaggaacggtgagaagcgagtgaaagatgtacccgttgaaggaaatgatggccaccatacaatgtgggatcatgataagacaaggaatggcggctttaaagtgaagcgatcgactcaaatgaggaaggaaaggaaggaagatgttgtgttggctattgcaaagcagaaaggcaaggcggaggatgcggggaaaattggattagttgggacagaagatcaaggaagtggttcggtgaagagaagtagagacaagaaaactgaattgagcaaagggaaaaaccaagaagttctatctggttcaagttttgccaagaaaaaagccagagatagaacagggttggatgatgatgatgctgagatgctacatgatcgtccgaagaagaagaaaagggtgataaaaaatgacccacatg

SEQ ID NO: 51227 - DNA, 272 bp, Glycine max
  Clone ID: PAT_MRT3847_17270C.1
ggcggaaccggaagcggagtcttttcttatgctccggaacctgacccgagtggtgatccaaatctacaccctgcttctccccatatcctttgtgcacattctaaaacccaaattctgacacctctctccccaaaataagctcctttctcccctttttcaacaacctcaccactaccttttttccaaccccgccgattactttctcccgctaaaacacccttttatgaaaggcaaagaacttgttctattcaccccaacccccaaccaagttt

SEQ ID NO: 51228 - DNA, 1199 bp, Glycine max
  Clone ID: PAT_MRT3847_17271C.1
ctcgagccgcgccagatctgatatttacaccatctgctctcaagactgagaattatggaatcctgcttgcacaaaagcaatgactatgtcatttaatccacacccgtgttctgatgcatggagtgtggaatttctgaagcgtaccggatttcattgtgatatcatttgtgtcactggatggactgccaccccaatgtcagatgtgtaggttacaattgattggattattttctctaacgaatgtagtcccaggacctattgtgttttaaatacacacaaaccttttgcgttaaataggagggtgggaaaactgactctccctcagggcacttcccgaagtgttaatagaaagcctctttctatagggggaggagctggtgcaaagaatgctattctcatgaatatgccaaatgctgttctttcaatgtggagatattttgttggagatctcgtctttgaagtttctaagatgacttctccctatattaaatgtacagtctctttcttcatagcatttggaaatttggctgatgacaccatcaattttgaggcctttccccacaaggctggtgcagtttggagagattcaggaaaaagttgtattgaaattttcacaagaggaatttcttacagcttggtcaactcaggtgcgtcctgcaacaactctgttggctgatgggtgtccatatttgtatgctatggtgcatgatagttcagtgtctacaataccaggtgattttgtcattggtgttaagttgacaaccataaacaatatgtgtgcatatgggctcaatcctggtatttcaggttctcgtcttttgggcaccattcctcattccatttcacagcgaactgtttggaatcaaatggcatcagtgagaacaccattgaattttgattctagcaagcagagcttgtgtcaattttctatggaccttgtgcgtggaggaatattattggacaaaactggagattggatcacacttatacaaaattctccaatgactaacttgttgagagttgctgcttggaagaaaggctgtttaatggttaagatcgtgatgtctgtgaatgcatcattcaaaaggagtgattgggcctcattggtacatatgttgttaacaaacagcatctattcagagcagtttgatgcatgtgagtggacataattggaaccacattccttggaattgagattc

SEQ ID NO: 51229 - DNA, 2573 bp, Glycine max
  Clone ID: PAT_MRT3847_17272C.1
acgataatttaattgtaatggtatcagggcttcagtgatttagtgataggaaaagcaggagggcttaatatgtaccttgtagacagcactggtaataaacaatatgtatctccactataaaggcaaatcaaaagtggaaaatctctcagtctcttatagtgatgagtttccataatattatggataacattgtattaaagatgactagtttatacaccttggttctcctactttttctttttctatcttatagacctgctctttcattttcttctagacataggcaatattggggtggtggtgggaggatattgagctctggtgagcataatggtgatcttgtgactaatttgcctggtcagcctagggtgaatttccagcactatgctggatatgtcacagtcaatgaaaccaatggaagagcactcttttactggttctatgaggctatcacccagccaaaagagaaaccattggtgctttggcttaatggaggtcctgggtgctcttctgtgggatatggagcaacacaggagattggtccatttttagtggacactgatggccaagacctcaaatttaataacttctcttggaacaaagaagccaacatgttattcctggaatctcctgttggagttggcttttcatactcaaatacaagcagtgactatgaccaattgggagatgaattgacagctaatgatgcttactcttttcttacaattgtttcagtttccatcatatcgagggaggacattttacatagcaggggagagctatgcaggaaagtattttccagagctggctgaactcatccgtgatggaacaaggacccctccctctatattgatctcaagggtattctgttgggtaaccctgaaacatcagatgcggacaatctctcactcgcctgcttccataatatggataaccttgtatgaaagatgactagcttatccacctgggttctttcacttttactttttctatcttatccgcctgctctttctttttcttcttgacatgggcaatattggggtggtgggtggttattgagcactggagtctggttgattatgcttggagccatgctgtgatatctgatgaaactcatcaaacagtcaaaacaagttgtgactttaacagcactgatccatggcgaaataaagattgtagccaagctgtggatgaagttctcaaacaatacaatgaaattgatatctatagtctctacacctctgtttgctttgccagtacagcaagctcagacgatcaatccatgcaaacttccatgaagcgttcatctaaaatgatgcctaggatgttgggtggctatgatccgtgccttgatggctatgctaaagccttttataataaaccagatgttcagaaggctcttcatgccagcgatggtcacaatctaaagaaatggagcatttgcaatgacaagatattcaatgactgggccgattcaaagccatctgttatcccaatttacaagaagcttatttcagcaggacttaggatttgggtttatagtggagatacagatggtagagtaccagtgctgtcgacaaggtacagcttaagccctcttgcgttgcctatcactaaatcatggaggccctggtaccatgacaatgaggttagcgggtggtttgaagaatatgaggggcttacatttgcaacgtttcgaggagctggccatgcagttccctgttttaaaccaagcaactcacttgcgttcttctcctcctttctcaatggagaatcaccaccttctacaaaataagaaatccgtataatcatattgggtgctctttgtgtgaccccatatgaagattttgctcttacattagcaatagctaatagtccatattgtcaaaatgcgaagcaaccctaagcaaatgtaatgaataaaagagttttgcaatgaaaatagttttacaatgaaaaaatgctgcattttataataaaccagatgttcagaaggctcttcatgccagcgatggtcacaatctaaagaaatggagcatttgcaacgacaagatattcaatgactgggccgattcaaagccatctgttattccaatttacaagaagcttatttcagcaggacttagaatttgggtttatagtggagatacagatggtagagtaccagtgctttccacaaggtacagcttaagctctcttgcgttgcctatcactaaatcatggaggccatggtatcatgacaatgaggttagtgggtggtttgaagaatataaagggcttacatttgcaacgtttcgaggagctgggcatgcagttccctgttttaaaccaagcaactcacttgcgttcttctcctcctttctcaatggagaatcaccaccttctacaaaataagaaatctgtataatcatattgggtgctctttgtgtgacccccatatgaagattttgctcttacattagcaatagctaatagtccatgttgtcaaaatgagaagcaaccctatgcaaatgtaatgaataaaagagttctgctccctattcaccaaagcaaaatgagaagatagtttctat

SEQ ID NO: 51230 - DNA, 1315 bp, Glycine max
  Clone ID: PAT_MRT3847_17273C.1
acttgtttaagatcataatcttgcaacattattaactttagtagaatcaaacttgtcaacagcaggaatttgatccttaaggctgtcatgaccaacatgtttttcaaattcatgagctcgctttgcaagaacatcagcaggaatgcctctattttctaatcacctccatcttttcctcttctgtcaaagcaagatttttctcgtgttttagtccagaatttgtatctgccgtcgtaaaataagccggaaatatgaatattactcaaattccgcttatatttaatttcagcagtgagaaaagatgggagaatgtagatcaacaaggtatacagatgccacctaatgtaatgcggtagaaattttctaaattgagttgctattgtataataaacaaccaagatgtccaaatctctgcaagtaaaaatttctaccgcattacattaggtggcatctgtataccttgttgatctacattctcccatcttttctcactgctgaaattaaatataagcggaattcgagtaatattcaaatttccggcttattttacgacggcagatacaaattctggactaaacacgagaaaaatcttgctttgacagaagaggaaaagatggaagtgattagaaatagaggcattcctgctgatgttcttgcaaagcgagctcatgaatttgaaaaacatgttgctcatgaaagcctcaaggatcaaattcctgctgttgacaagttgtattctactaaggttaataagtttgcaaaaattatgaaccttagacaaagtgttgttggtgatcttaaacttcttactgatgggaagttgtatgagggtaagcatattcctgtatctaacattagtgcaggggaaaatcatgtagttcaaatacccctaatggcacaggaggaaattctgtcttctagtgcaagtgatttcagaactgcaatggtgagtaaaaatagcaagcctcaagctactgcaatgcatgtgggagctatagaaattatcattgatagtttcgcaagtcccgactgcaacatagttggtgcaatgcttttggttgatacttatcataccaatcctgaaaatgcagttcgtagtatttttggtgcgcctttcagaggtggaaggaccattcgggtggttacatttccgaataccattgtgcaaattgaaccagacatgaatttaaggtttcagctttggagtaccactaccaatggtgattatgttcaaggaaagatctcgcaatggtaaaggtaatgagcatgtgctgctgttgcttgacataagtacactcaactcattgtggatctg

SEQ ID NO: 51231 - DNA, 1436 bp, Glycine max
  unsure (1)..(1436): unsure at all n locations
  Clone ID: PAT_MRT3847_17274C.1
gactgcttccccaacgcaggatgtacagggaacaattgagtgtttttttacctctcaggactgtgctcccaggacctattgtgtcataaatccacaaaatccttttgtgtgaaataggtggatggggaaactgactttcccccagggcacttcccgaagtgttaaaagaatgcctctttctatagggggaggagctggtgcaaagaatgctattctcatgaatatgccaaatgctgttctttcaatgtggagatattttgttggagatctcgactatgaagaatctaagatgactactgcctacattaaatgtacagactctttcttcatagcatttggaaatttggctgatgacaccattaatttcgaggcttttccccacaagctggtgcagtttggagagatacacgaaaaagttgtattgaaattttcacaagaagaatctcttacagcttggtcaactcaagtgcgtcctgcaacaactctgttggctgactgggggtccatatttagatgctatggtgcatggttgctttnnnnntttcttgttcaaatttaatgttcaagctgggtgaaattcttggattagtgctcccactctcctatctggtataggacttcgtgggtagacttttctatttctctcctttctttcactctcttcttctcactgatccgcattgccgttcaaagtggtcttatttgaaaaacacttggggcgttggtgcaaatgtttgcttcgttaattttctctggagacaacaggctcactgagaaaacaatttttacttgcagagatttggacatcttggttgtttattatacaatagcaactcaatttagaaaatttctaccgcattacattaggtggcatctgtataccttgttgatctacattctcccatcttttctcactgctgaaattaaatataagcggaatctgagtaatattcatatttccggcttattttacgacggcagatacaaattctggactaaacacgagaaaaatcttgctttgacagaagaggaaaagatggaagtgattagaaatagaggcattcctgctgatgttcttgcaaagcgagctcatgaatttgaaaaacatgttgctcatgaaagcctcaaggatcagattcctgctgttgacaagttgtattctactaaggttaataaatttgcaaaaattatgaaccttagacaaagtgttgttggtgatcttaaacttcttactgatgggaagttgtatgagggtaagcatatttctgtatctaatattagtgcaagggaaaatcatgtaattcaaatacccttaatggcacaggggaaattctgtcttctaatgcaaagtatttcaaaacttcaaatggtgatttaaaaatagaaagcctcatactactgcaattcattttggaactatttaaattattatttat

SEQ ID NO: 51232 - DNA, 208 bp, Glycine max
  Clone ID: PAT_MRT3847_17275C.1
cgacggacaccattgttccgatcactgaggtgcagaacttatcaagccgggccattcatcagacatgtcggactttgacctgctcttatatctcgatcaaccaagccacttgcttatcctgcacactgacggactcaacgaatgaactatcaggcttatggtttatgaccacttacaacactgatccggccgctgattgcgctgtccc

SEQ ID NO: 51233 - DNA, 1325 bp, Glycine max
  Clone ID: PAT_MRT3847_17276C.1
tgtgcataccttgcggatctacattctcccatgttttctcactgctgaaattaaatatgagcggaatttgagtcacattcatatttccggcttattttacgacggcggatacaaattctggactaaacacgagacacatcttgctttgacagaggaagaaaagatggaggtgattagaaacagaggcatgcctgctgatgttcttgcaaagcgagctcatgaatttgaacaacatgttgctcatgaaagcctcaaggatcaaattcctgccgttgacaagttggattctactaaggctaataagtccgcaaaaattatgaaccttagacaaagtgttgctggtgatcttaaacttcttactgaagggaagttgtatgaggagaagcatattcctgtatctaatattagtgcaggggaaaatcatgtagttcaaatacccttaatggcacaggaggaaattctgtcttctagtgcaagtgatttcagaactgcaatggtgagtaaaaatagcaagcctcaagctactgcaatgcatgtgggagctatagaaattatcattgatagtttcgcaagtcctgactgcaacatagttggtgcaatgcttttggttgatacttatcataccaatcctgaaaatgcagttcgtagtatttttgttgcgcctttcagaggcggaaggcccattcgggtggttacatttccgaataccatcgtgcagattgaaccagacatgaattcaaggtttcagcttttgagtaccactaccaatggtgattttgttcaaggaaaagatctcgcaatggttaaagttaatgtagcatgtgctgctgttggcttgacatcaagttacactccaactccattgttggaatctggtttgcaaaaagacagagggttaattgtggagtattttggaaggatgtcttacgttgctcataacgttaatcagccccaagagaaagatttgttggagggaaatttttcctttgatattaaatctcgctctagattggaaaaagttttctctacaaaagcacaatttgttagtggaaaaaccttcaaatatgatataattggtgctggatcacactcttcagaagattttcctgaataggaagatcaagaaaaacccaaaaagattgatgcctgatcgagacaaagaatagacctaatacaatgaggttcaagctcagatggaacaaatatgttaaattgtctatagtcacgtgaaactcctaaagttccatgtggagcttaaagttctcatctaaaatgcacttccaaacacagctgtgaaccatttgcgattgttattggaatttttg

SEQ ID NO: 51234 - DNA, 1992 bp, Glycine max
  Clone ID: PAT_MRT3847_17277C.1
aatacggctcgagtgctggctaaacctttctctcacataacacaaggaaaaaggaacatattcactttagttacttcaccacaacaaaacactaacgttgttgttgttcacttcaccaagcattctcttatgctctgacagacactctggttggttgacatggattccaattccaaggccattttggattatgctttgtttcaactcactccaaccagaaccagatgtgagttgttagtgttttgtggaggtgttcatcagaaaatagcttctgggttgtttgagcctttcgtttctcatctcaaattcctcaaagatgagatctccaaaggtggatactcaattaagcttctgcctcccaaccacggtggcttctggttcaccagagccacgtttgagagatttgtgcgctttgtcagcacaccggctattctggagaggtttgttagccttgaaaatgaaattcttcagatcagaagttcatttcaagctaatgctttttcaatgtccgttgcaactccagatgaaggatctgtgccacaagccaatggcatcacaaggaggttaagtgattctacaaagttaaatgatgtacttgaaggagttgacaataaagaggaaaactcaaaggtttccctgcatcgtctgttagagtctcgaatagcactactccggaaggagcaagcaatggcttatacacgtggtcttgttgctggatttgaaattgacagcattgatgatctcatatactttgcaaatgcatttggagaagcccgtttgagcgaagcctgcatgaattttaaggaattatggaagaaaaagcatgcagatgatctttggataaaagaagtagctgctatgcagtcaagcttaccaccagcactctcattgtctggatcatcaggaattatattggcaaatgatataaccacccataatagctctagggacagcattgcttctggtgacgaaaatgtatctctggaaacattgaattctgctttaaacaaaaaagaagatgtgaacctgcctacagcagatcataaactttcacatacagcaaatgttaatatgccaatgccctggccttacaatgtacctccatatatgtataatcttcaaaatccgcaaatgccttcataccaaggatatcctatgactaatatgcagtctgttcctccttaccttgtaccaaatatgcaatggtctcctgacctgggagtgaatcagaaaccatcagaaaccaaaagggataaatctcacaagaaaagagcagaagaataccaagaccagcagacagagtccagtgaccctgattctgggagtgaatctgattcagataaacagaatcactccagtcattcttcgaaggatgatctgaagaggaaaaagcacagaagaaagtcatccggaacagttgtgattcgtaacatcaactacatcactccaaaaaggagaaatggaaatgaggatggaggctctgatgaatctttagaagatgatgatgtcatcgatgacgaaaccatcaaacaaaaggttggtgttgcacttgaatctttgcaaaaggtccataaaggtgaaaaacgtgctaatggaaaaaaagcagcagtgcggcacaatgtaactaaatcacgtgatgcgactgcagaggatctcactgaaaacttgagtgatgcctctgaaggaggaaagaaaaatgacaactgggatgcattccagaaccttttgaagattgatgaggggaccggaactgatggaccagaaaggatgcagtcaattgatgtccaggatgaacattttgtgttgagaagctcggaagaaagaatgccaaacggtgctagttcatctcctaaatttgatttcaaacaagttttgaagaatcctaaagttccaaatgactcctttattgtgactcggagagattggagaaatgaaggtggcttcaagctggatgagtatgtagacaagtgtggtccagttaccaagagcagg

SEQ ID NO: 51235 - DNA, 873 bp, Glycine max
  Clone ID: PAT_MRT3847_17278C.1
ttttgtttgaatggtgaatctgtttgttgattttttatgtgcggaaatttgtatcggtttgcaatatgattgtgtggctgattctgtattgggagtgctgtgtggtgtattggtggggtctgaatgtttcatgtggatgaatttagagcactgcgttgtattgctgtgctgtgccattttttagggatttctccaagtcaattggttaaagcttgaatagtcaatgaaataagactctgtactctggccttaaatatgtggtttacaacaagaataacgagccttatatttcactaggtgaggttaggtatatagattacatgatgtcattgaactcggttaaaaactaaattttcagggatattataccgtgagatccgttttttaatattgttttacaatgtcctttgataacaaaagcttttccttctttaatttcctttgtccatgcatttgacttctttatcccatgtttggcaaaattattaattctacattttccattcgttgttccaagatcttggtaaaactactcgaaagctttggatccttccttggtttttccttttcttttctcatttttagccttccattttgcccaaatttcagcattattgcacatgtgaaaggccttaagcactcccatttaaacactttcattccaccaagattctttatcttgaacactttctatttcaccactgggattttctatcactcttgagacactgccacttgattattagatttataatttgttgagttttctgtttaggacccttaaaatgaatgtcaaggatcaagatcctatgttgtacagtaagaagactctcgtgcaatcaccttgcaagctctttaatcaaaactccttac

SEQ ID NO: 51236 - DNA, 358 bp, Glycine max
  Clone ID: PAT_MRT3847_17279C.1
agcaagggggctggagagaggaactaatacaaagtcttatctggtcttttcacaaccccactagtctggttggggggttcaacacaatgtgggtggacacaatcggcatccaccttccatgtacgtcttaacaaggactgcacgatgctaaaaataattacaacacccttgtaacatatccaatggctaagttcctacaattgggaattctctcattcaatcgtccacagattagaaaatctaatctagttaagcctgctaatgaaatacaactttatcgacccccacgttctgggaagacattcatcgcatgagctgtatcttacgaaacactgactattttcttttgtattaatgg

SEQ ID NO: 51237 - DNA, 470 bp, Glycine max
  Clone ID: PAT_MRT3847_1727C.1
gtgttggtttaaataattattattttaaaaaaaatcatacgttcattaatttttgtgaaataacatgaagcggcaatgataataagacgaagtgactgctaagtgaatcatttgttggatatgtaagatgttgattactcaaataaaaacactatccacacacatgcttaatggttgtctaacctaaacagggttatttttacatctaaacaatgactcaggctggaaaagtgattacaggaaacatatacattgtggatgctgatgcatagagcttctacttcaatttaacaagtcacaaccacatgcctattgtcaaattgcccgttgaacgataaaatgctaccgaatactttgcacagattccaaagacaaaaaggctgaagaatgcattagagaatttatcactacacagcttagcaagctaacgtttttaaccttgccttggattattggcccattaaaatacc

SEQ ID NO: 51238 - DNA, 1053 bp, Glycine max
  Clone ID: PAT_MRT3847_17280C.1
tggctcgcctgccggtaccggcccggccttcctggctcgaccgacccacgcgtttttttgactgtgggcatttttagagcatgtgacgactggcagcgcactcatcggattaaaggcatgattaaaatggcggccatagttggtgttcctgagaatacaggtatagcattggcctgtgctatgaatagtctcttttagggggcgtgccagttctgatatttacactatctgctctcaagactgtgaattatggaatcctgcttgcacaaaagcgatgactatgtcatttaatccaaacccgtgtgctgatgcatggagcttggaatttctgaagcgtaccggatttcattgtgatatcatttgtgtcactggatggactgccaccccaatgcaggatgttcaggttacaattgattggtgccatttcctctcaggaatgtgttcccaggacctattgtgttttgaatccacaaaatccttttgtgttaaataggtggatggggaaaactgactttcccccagggcacttcccgaagtgttaaaagaatgcctctttctatagggggaggagctggtgcaaagaatgctattctcatgaatatgccaaatgctgttctttcaatgtggagatattttgttggagatctcgtctttgaagtttctaagatgacttctccctacattaaatgaacagtctctttcttcatagcatttggaaatttggctgatgacaccatcaactttgaggcttttccccacaagctggtgcagtttggagagattcaagaaaaagttgtattgaaattttcacaagaggaattttttacagcttggtcaacttaagtgcgtcctgcaacaactctgttggctgatgggtgtccatacttgtatgctatggtgcatgatagtttagtgtctacaaaaccaggtgattttgtcttggtgataagtgggaacccataacaatatgtgtgccatatggcttaatcctggtatttcgcgttttgtcttttgggaccattctcatcccatttaaagaaatgtttggaaaaa

SEQ ID NO: 51239 - DNA, 532 bp, Glycine max
  unsure (1)..(532): unsure at all n locations
  Clone ID: PAT_MRT3847_17281C.1
ggctcgaggttcacttcaccaagcattctcttatgctctgacagacactctggttggttgacatggattccaattccaaggccattttggattatgctttgtttcaactcactccaaccagaactaggtgagctacgatcagaaaattaaaatctttacttagtggggtgcttttgtttttactctgtgtggttggttgatggttttctttgcagatgtgagttgttagtctttcgtggaggtgttcatcagaaaatagcttctgggttgtttgagcctttcgtttctcatctcaaattcctcaaagatgagatctccaaaggtggatactcaattaagcttctgcctcccaaccacggtggcttctggttcaccagagccacgtttgagaggtcattgctacttttgctcatnnttgaattacctctntggcctcttaatgggntattctcatctcttctttgatctcaagaactttcttgcgtgttttctaattaaaatttgagagtncgtgaatcaataacctcaataa

SEQ ID NO: 51240 - DNA, 934 bp, Glycine max
  Clone ID: PAT_MRT3847_17282C.1
gcttctttctcggcaaggacacttggattcaaaggccggtattaaaacaatatgggggggtgtaatataatgcaagtgacatcaaaactgaaaaggagagtaaaaatagcaagcctcaagctactgcaatgcatgtgggagctatagaaattatcattgatagtttcgcaagtcctgactgcaacataggtggtgcaatgcttttggttgatacttatcataccaatcctgaaaatgcagttcataatatttatgttgcgcctctcacaggctgcaggcccattcgggtggttacatttccgaataccatcgtgcagattgaaccagacatgaattcaaggtttcagcttttgagtaccactaccaatggtgattttgttcaaggaaaagatctcgcaatggttaaagttaatgtagcatgtgctgctgttggcttgacatcaagcttacactccaactccattgttggaatctggtttgcaaaaagacagagggttaattgtggaatattttggaaggatgtcttacgttgctcataacgttaatcagccccaagagaaagatttgttggagggaaatttttcctttgatattaaatctcgctctagattggaaaaagtttcctctactaaagcacaatttgttagtggaaaaaccttcaaatatgatataattggtgctggttcacattcttcagaagattttcctgaaaaagaagatcaagaaaaacccataaagattgatgccagattgagacaaagaatagatcctcaatacaatgaggttcaggctcagatggaaacaaatttgctcaaattgctcttgatgatgttgaaactctaagggttcatgtggacttaaaattctcatctaaattgcactcccaaaacacattggaggaacctttcggtctgacttttgccattttttgaca

SEQ ID NO: 51241 - DNA, 350 bp, Glycine max
  Clone ID: PAT_MRT3847_17283C.1
ggaacagactgcatattagtcataggatatccttggtatgaaggccagcagactgagtcaagtgaacctgattctgggagtgaatctgattcagataaacagaatcactccagtcattcttcgaaggatgatctgaagaggaaaaagcacagaagaaagtcatccggaacagttgtgattcgtaacatcaactacatcactccaaaaaggagaaatggaaatgaggatggaggctctgatgaatctttagaagatgatgatgtcatcgatgacgaaaccatccaacaaaaagttggtgttgcacttgaatctttgcaaaatgtccataaaggtgaaaaacgtgctaatgg

SEQ ID NO: 51242 - DNA, 1412 bp, Glycine max
  unsure (1)..(1412): unsure at all n locations
  Clone ID: PAT_MRT3847_17284C.1
tcgtcttgatgccattaatcaaaccaaagagaaatatgggtgggcaggacatgtttgcttaaaggttaaatcgcgctgtagatggggaaacgtttgctgtacaaaagcacaattcgctagtggaaagaccttcaaatatgacataatctggtgctgggttcacattcttcagaagattttgctgaaaaggaagatcaagaaaaacccaaaaagattgatgccagattgagacaaagaatagatcctcaatacaatgaggttcaggctcagatggaaacaaataagattaaattgtctcttgatgatgttgaaactcctaaaggttccatgttggatcttaaaatttctcaatctaaaattgcacttcccaaaaacacagttggaggaaccattctgcgtagtgatctattggcaaattttttgacagagggcaattttagagcaagtgttgatttgcagcgcactcatcgtattaaaggaatgattaaaatggtggccacagttggtattcctgagaatacaggtatatcattggcccgcgctatgaatagttcttttagggggcgtgccagttctgatatttacaccatctgctctcaagactgtgaattatggaatcctgcttgcacaaaagcaatgactatgtcatttaatccaaacccgtgttctgatgcgtggagtttggaatttctgaagcgtaccggatttcattgtgatatcatttgtgtcactggatggactgccaccccaatgcaggatgttcaggttacaattgattggtttatttcctctcaggaatgtgttcccaggacctattgtgttttaaatccacaaaatccttttgtgttaaataggtggatggggaaactgactttcccccagggcacttcccgaagtgttaaaagaatgcctctttctatagggggaggagctggtgcaaagaatgctattctcatgaatatgccaaatgctgttctttcaatgtggagatattttgttggagatctcgtctttgaagtttctaagatgacttttccctacattaaatgtacagtctcttttcttcataggcatttggaaaatttgggcttgatgatacccatcaaatttttgagggcttttttccccccacaaagcctgggttgcaaggtttgggaagaagatttcaggganaaaaagttggtattttggaaaattttttcacaaagaaggnnaatttcttttacaggccttggngtcaaacttcaaggttgcggtnccttgcaacaaaccctctgttggggcttgatgggggtgtcccattatttgtattgccaaatggtgccatgatagtttcagtgtctaccaattaccagggtgattttgtcaattggtgtcaagttgacaaccataaacattatgtgtgcatatgg

SEQ ID NO: 51243 - DNA, 724 bp, Glycine max
  unsure (1)..(724): unsure at all n locations
  Clone ID: PAT_MRT3847_17285C.1
aagaaagtcataatttcttaataatttctcaatttttcattttacattttgtgtttgcttcagttaaatgatgtacttgaaggtgttgacaataaagaagaggaaaactcaaaggtttcactgcatcgtctgttagagtctcgaatagcactactccggaaggagcaagcaatggcttatacacgtggtcttgttgctggatttgaaattgacagcattgatgatctcatatacttcgcaaatgcatttggagcagtccgtttaagggaagcctgcattaattttaaggaattatggaagaaaaagcatgcagatgatctttggataaaagaagtagctgctatgcagtcaagcttaccaccagcactctcattgtctggatcatcaggaattatactggcaaatgatataaccacccataatagctctaaggacagcattgcttctggtgacgaaaatgtatctctggaaacatcgaattctactttaaacagaaaagaagatgtgaacctgcctacaccagatcagaaaccttcacatatggcaaatgttcatatgccaatgccctggccttacaatgtacctccatatatgtataatcttcaaaatccgcaaatgccttcataccaaggatatcctatgactaatatgcangtctgttcctccttaccttgtaccaaatatgcaatgggtctcctgactggngagtgaatcagaaatcatc

SEQ ID NO: 51244 - DNA, 1071 bp, Glycine max
  unsure (1)..(1071): unsure at all n locations
  Clone ID: PAT_MRT3847_17286C.1
aaaatgctatgtactgttgctgtttgttaaaagcactcgcagaatgaggcncaatcactccttttgactgctgcattgccagacatcgcaatcttgacctttaaacagcctttcttccaagcagcaactctcaacaagttactaattggagaattttgtataagtgtgatccaatctccaggtttgtccagtaaaattcttccggggagaaggtcaatagaaaattggcagaagctctgcttgttagaatcaaaattctaatggtgttctctactgttgccatttgattccaaactagtttgctgtgaaatggattgaggaatggtgttctaaaagacgagaacttgttattttataaaataacacacacttcacacatcattacgacaattaaaagaggtgtggaaattttcaaataggcagagcatactcaacaagagggtcatgcctaatttcctttattgaattaaacaaacgaacaagcgaaagaaaacacaaattccagatcatgcagaggattccgcattttcagaagatctggcagtagcctgtggaacagaaaaagctggcataagagtattaccagcaatttcaaaatcttgagagattcccaagagaatatcaaaaactgtagactgtttgggattgtcaataaggaaactcaaatgccatgaagtttgatttgcccactcagaactccacatttcaaaaccattattaggaccacatacctctattgggaagatcaattcccaggaatgtggttctgattttgtccacttacatgcatcaaaatgctctgtactgttgctgtttgttaaaacacttgtaccaatgaggcccaatcactccttttggctgtggcaattccagccattcccatttttgcccattaaccaacctttttttccaaccaagcacttttcaaccaaggttattaaatggaagaaatttggaataagtgggatccaatttccggtttggccattaggatccctcccccaagaaaggtcaatagaaaactgacaaaagctctgccttgctagaatcaaaattcaatggtgttctcac

SEQ ID NO: 51245 - DNA, 794 bp, Glycine max
  Clone ID: PAT_MRT3847_17287C.1
cactgtacaagctttccatccatttataatatgcctaacatatgttgtgtatcaaacacattgagaaacttgctcaatcttgctagactcagttcaagttaaccatgatcaattcaatcaaaatatacatggaactcgaacctatccgatgaaaattccttcctggacaaaatagcaatgtaggaagggtggcataaaaagcaacgttgtgcaaaggaaagaaatataaaaagtgaaagacagaaagacaagaaattatagtaaaacatgcttttatatacaagaatttgcaacaggccattatccatcagaaagatcatcaccataaaaaccaataccatcatcctcatcaaccaaatatttacttttggattttgatgatttgccagattttgtgggtttcttcattttttctgcctgcaactccaacaccttctctgaaggtttccactttcttttgatacgtgtccccccagcatcatcttccactggacttgagttatgattcatgggattttcatttggtccagcctcttctgaaagtggggatccagagttattgctgtccaccaactttgaagaactatttacgaacttgtctggctgttcaggagcatcacaactgggagttgctggcaggaaacataactcttcttcagacatatcagagtcactgaaagcaggatctttctccaccgttacaatgtcaatttcgtcatcttcattaacatcagatccttttacctgcaatgacacgaacaaacctaggactaacatgagaccaggaagaaaaa

SEQ ID NO: 51246 - DNA, 498 bp, Glycine max
  Clone ID: PAT_MRT3847_17288C.1
tcggacaaaaaaaatattcttttttttaaaaacaaaacgaaaaaaaaaaaaaaaaaaaaaaaatatattaaataaaaaataaataagggcggacggttttgaggtatgaagcttacattcgcgggtatcccctgtcatgcctctctttttgtgtcccctaagttcaattcgtttgccgtctttatacaacattatgacttggaaatccttgggtttgcccttcttattatctttgctccacttttccctttgcccagttggtgtaataccaaaaaggccctcacaaatcgcctttcccaacatttgcaccacctaaatggcgattggtacgcgccttgtaaccgcgcatttagcgcgggggatgcggtggttaccctcaatttgcccgttatttttgttagcgccttagggcccgttcctttcccttgtttacatcccttgctcgccccattggccggtttttcccgtttagctcgacttcgggggctcctttttggg

SEQ ID NO: 51247 - DNA, 424 bp, Glycine max
  Clone ID: PAT_MRT3847_17289C.1
gctggccttccggtacagtacagaggtaatcacttatgaattctataatttcttgctttggctgatgaaagtgaagtcttgaacttgaatgaagaaggatggtggattctgaccttccaccgagtccaaatgatttcctatttcccccaatcgaccacgaaaatctccaaattgcgtcacaaacccctccctcacctccttcaccccaacccttcgattctcgtcttcgcggctggattagtatctccttccacatattgcgttccaagctttcatctttgatgcagagagggccaatttggtcaattgggctgccttctgcagcgcttctaatgtcatgctggatcttcatctccatcaggaagaagataaccctcacgcccaatgaagcgcgtctcgttaacatcatcaaggacaaagatcg

SEQ ID NO: 51248 - DNA, 152 bp, Glycine max
  Clone ID: PAT_MRT3847_1728C.1
gaattggggaaatgccacatcaaacgatctaaagacagaccattattcacatctcatcgggttcactggagtcatgcatcatcactgatctgtaagaaccatacaattcacactcacttcgtcacctcaaatcaactaagaacatatcccca

SEQ ID NO: 51249 - DNA, 261 bp, Glycine max
  Clone ID: PAT_MRT3847_17290C.1
ccacgcgtacgcccacgcgttcgcaccatggtacaaacgaagaaggggacgctaagaacatgcatagtgcctgaggctcatgatggtattagcgacccaaatatgccttcgcaccttggctgaggaaccaactcaaacacgtggggctagctctggatgatcataccttattctcgggtcaaaccaactgtcgctctaacgaatagtgttataagttggcaattaaccaggtcataacacattcctttgtgaaaatgtaaa

SEQ ID NO: 51250 - DNA, 538 bp, Glycine max
  Clone ID: PAT_MRT3847_17291C.1
cggctgctagaagacgacagaaggggatgattggaatgatcatgttaaaattttctaattagtgattatgctaaaaaaaaaaaaaaaaaaaaaaaaaaaaaaaaaaaaaaaaaaaaaaaaaaaaaaaaaaaaaaaaaaaaaaaaaaaaaaaaaaaaaaaaaaaaaaaaaaaaaaaaaaaaaaaaaaaacccgcccccccaaaagaccccaacctacctcccccggcctgccaacgaaaaaccttttttatagggcccccaaaatcaattccccggcccgccttttaccaccgcggaaccggaaaaaccccggccgtcccccacctaaaccccctggaaaaaaacccccttttccccagtgggggaaaaaccaaaaagcccccccccaacccccttcccaaaaatttccccaccctaaaggcaaaagggacccccccctgaaccgccccataacccccgggggtgggggggttaccccccaggggaccctttcccttgcccagcccctaagccccctcccctttcgttttctcccctcc

SEQ ID NO: 51251 - DNA, 486 bp, Glycine max
  Clone ID: PAT_MRT3847_17292C.1
aattcgagcggcgctttttttttttttttttttttttttttttggccttaaatgcacattaatgcacttaactacctacataatttattaaatgtacattaaggccaaagaagaaaaaaaacaaagttaaattataattttgtccctaatttttaaatctatgattttagtctttttgatttttaattgaaatatttggttcctcaattttataaactaacgattttagtacctgatagattattaacaaataattttgattaataaattattaagttaattataaattaattaaaaactattaattattaaaaaattattctaattctctacaaattgtgttttttttttccataaatatctcttaaatattgcaaattttttgaaaaaagaaatcatttaaagattcacctcacaaaaattaaatatttaaaagatcgcaattaaaaaaacattttaaaatatattaattattatatcacttat

SEQ ID NO: 51252 - DNA, 216 bp, Glycine max
  Clone ID: PAT_MRT3847_17293C.1
ctcagatgttcctatgggcagctgacatgccttctggttgtgctggacctaaaattgacgaacatgactaagcttgtggaatatcactaacttcaactatagggatgcattcttcttgttaagtgcactgccagatatgtatccttgaacagtgtaagttccagtgatgtaaggtttcatgtctcgagaataaggtcttggtagtttcatgtgaat

SEQ ID NO: 51253 - DNA, 1650 bp, Glycine max
  Clone ID: PAT_MRT3847_17294C.1
cttgatctttttcctgccgctgacaagatgggttctacttatgcttataagtttgcaaaaattatgaaccttagacaaagtgttgttggtgatcttaaacttcttactgatgggaagctgtatgagggtaagcatcttcctgtatctaatattagggcaggggaaaatcatgttgctcaaatacccctaatggcacacgaggatattatgtcttctagtgcacgtgatttcagaactgcgatggggagtaaaaatagcaagcctcaagctactgcaatgcatgtaggagctattgaaattatcattgatagattcgcaagtgctgactgcaacatagatggtgcaatgctattggttgatacttatcataccattcctgaaaatgcagttcggagtattcttgttgcgcctttcagaggcggaaggcccattcgggtggatacatttccgaataccatcgtgcagattgaaccagacatgaattcaaggtttcaactctcgagtaccactaccaatggtgaggaagttctaaggcaaactgtatcacagggtgaagtcaatggagcatgtgcaggggctggctccccaatgcaggacgctccagctacaatggatggatttatttcctctcaggaatgtgggcccagtacctagtgtgttttaaagccacaaaacccttttgagttaaatagacagacccaagaaaaagattatgtggagggcaacttctcctttgatactaaatctcgctctagattggaaaaagtttcctttacaaaagcacaatttgttagtggaaaaaccttcaaatatgatataattggtgctggttcacattcttcagaagatttttctgaaaaggaagattcaagaaaaacccaataagattgatgccagattgagacaaagaatagatcctcaatacaatgaggttcaggctcagatggaaacaaatttgtttaaattgtctcttgatgatgtcgaaactcctaaaggttccatgttggatcttaaaatttctcaatctaaaattgcactttccaagaacacagttggaggaaccattctgcgtagtgatctattggcaaattttttgacagagggcaattttagagcaagtgttgatttgcagcgcacttcaaatcgtattaaaggaatgattaaaatggtggccacagttggtattcctgagaatacaggtatagcattggccctgtgctatgaatagttcttttagggggccgtgccagttctgatatttacaccatctgctctcaagactgtgaattatggaatcctgcttgcacaaaagcaatgactatgtcatttaatccaaacccgtgttctgatgcatggagtttggaatttctgaagcgtaccggcatttcattgtgatatcatttgtgtcactggatggactgccactccaatgcaagatgttcaagttacaattgattggtttatttcctcctaaggaatgggttcccaggacctattggggtcttaattccacaaaacctctttggcgttaaaaaggtggatggtgaaactaaactttccccgggggactccctgaagtgtaaaaagaatgcctttttctatcgggggaggagctggacaaagaatgctattttataatttgccaaatgc

SEQ ID NO: 51254 - DNA, 581 bp, Glycine max
  Clone ID: PAT_MRT3847_17295C.1
cacattattctgcaaccccgtgtttgctactggagcgtttgtcgaaacctgcatatattttctcaggtctcacggaatctcccctcttacatctcctattacgcttagtaaggcaatataagcagaagagcgtctgataccgtttaaatgaccaataatcttgctagcttcagtgtgtaagagaaatgcgacgagactacgaacaggatgaaagactaactagatttacaatcaacacatgtgggcatgatagagactagaaacaagcactcaaacacaagtatactgtttattcttatagcactatgtggaaatcagataattataaacaccttaaagtcatcaatggaaacatgttttcatttaactacagaaaccattgatgacacactacctttgtaattttctaggtaatgaggtctggccacactcaagcttcatgaacgtgtaaaaaaatcatgcatcattggttcctagcatccatgtccaacaatgcctaaaaactcgtatgtgacatacgtgtatgctggcaatcaatacatggtttgtgctcactattatgaataattacagatccctca

SEQ ID NO: 51255 - DNA, 2159 bp, Glycine max
  Clone ID: PAT_MRT3847_17296C.1
aaatggggaaaaaaaaataattatgaagtaataatattgtaaggacaaatgcatgagcgcaaaccagagctcactgtcggacctcagatggcaacagtgagaacaccattgaattttgattctagcaagcagagcttttgtcaattttctattgaccttctcggtggaggaattttagtggacaccaatgacaattggatcggatattgaaaaaattcaatggtgttgtcccaatttacataaaattgggcacccatcagccgacacaggtgcgtaacgcaacatctctgtgggctgatgggggaccataatattatgggtttgtgcatgagtgttcattttttacagtatcgtctaatgggctccattccgcagtccatttcacagcaaactgtttggaatcaaatggcaacagtgagaacaccattgaattttgattctagcaagcagagcttttgtcaattttctattgaccttctcggtggaggaattttagtggacaaaactggagattggatcacacttatacaaaattctccaattagtaacttgttgagagttgctgcttggaagaaaggctgtttaatggtcaagattgtgatgtctgggaatgcagcagtcaaaaggagtgattgggcctcattggtacaagtgtttttaacaaacagcaacagtacagagcattttgatgcatgtaagtggacaaaatcagaaccacattcctgggaattgatcttcccaatagaggtatgtggtcctaataatggttttgaaatgtggagttctgagtgggcaaatcaaacttcatggcatttgagtttccttattgacaatcccaaacagtctacagtttttgatattctcttgggaatttctcaagattttgaaattgctggtaatactcttatgccagctttttctgttccacaggctactgccagatcttctgaaaatgcggaatcctctgcatgatctggaatttgtgttttctttcgcttgttcgtttgtttaattcaataaaggaaattaggcatgaccctcttgttgagtatgctctgcctatttgaaaatttccacacctcttttaattgtcgtaatgatgtgtgaagtgtgtgttattttaaaaaaaaaaaaaaaaaaaaaaaaaaaaaaaaaaaaaaaagaaaaaaggcggagcgatttaaagcccggcgttcggctcgcgtgcggctcgttctcgagtcgattcggctcccgctatttttcatacaacacattctttctagacacgcaacacctagaagatttccttattctttttggtgctaaaccgttgggatccatcgaaattctagacacacaacacataaaagatttccttgttctttttactgcttaaccgttcggctatctcatatatgaacaacaacatgttaggaatgaagagacggagagatgataatgaagggtccttggatttggcaaaatgtcttatgctgttttcttgtccaatagaaagcaacaagacacaacagaaaagttttggttctgtggaatttgagtgcaagacgtgcaaccgcaagttctcttcttttcaagcactgggagggcacagggcaagccacaagaggcagaagctggagggggaagaactgaaagaacaggccaaaagtcttagcttgtggaacaaacccaaaatgcacgagtgctccatttgtggccttgaattctctctgggccaggctctgggtggccacatgagaaaacacagagcttccctcaacgaagggtttcctattattccttctatcgaccaagttattgcgaaaatcccggttttgaaaaggtcgaatagcaccagggttatgtgcttggacttggagttacacctgtagataatgactctgtgcttggaatcaactatgaaatcaccacctcagcttctttttctttgttctgactaactcttttttacctctttctggacacatgtagtattctttcatttttgtgtaaaaatttcattgacttttcccttataaagatcattgattctttatttgttagcaccaaaaattctcacatattatttagttggtgttggctaaccggtacgtcataccaccgattatcaaaaagttctgaatgttttaatagtattgatttttaattattttttt

SEQ ID NO: 51256 - DNA, 310 bp, Glycine max
  Clone ID: PAT_MRT3847_17297C.1
ggtgtgtgggatgagaagatgatgatgaaacattgggagaataaattggctagagagagagagatagagggttgggttggttttcttcctcctcttcctaaatagactctaatctcaatcctcattacacacatatcgacagatttcttcaatcctctctcaatcttttctgttttcttttccactctttaatatcctcgttttcgccgattcaaaaacaactatgattttgtattttgttgtaattttcttcctagatgtatttgactcggttgtctgaatcaattgttgcagcatggtccggaaccac

SEQ ID NO: 51257 - DNA, 1622 bp, Glycine max
  Clone ID: PAT_MRT3847_17298C.1
gttttattcaaatttccggcttattttacgacggcagatacaaattctggtctaaacacgagagaaatcttgctttgtcagaagaagaatagatggcagtgattagatatagaggcattcctgctgatgttcttgcatagcgagctcatgaatttgaaaaacatgttggtcatgaaagtctgaaggatcaaatccctgctgttgacaagttgtattctactaaggttaataagtttgcaaaaattatgaaccttagacaaagtgttgctggtgatcttaaacttcttactgatgggaagttgtatgaaggtacgcttattccttgttctaacatctgggcaggggaaaatgatgtaggtcaaatacccttaatggcacaggaggaaattctgtcttctagtgcatgtgatttcagaactgcaatggtgagtaaaaatagcaagcctcaagctactgcaatgcatgtgggagctatagaaattatcattgatagtttcgcaagtcctgactgcaacatagttggtgcaatgcttttggttgatacttatcataccaatcctgaaaatgcagttcatagtatttttgttgcgcctttcaaaggcggaaggcccattcgggtggttacatttccgaataccattgtgcagattgaaccagacatgaattcaaggtttcagcttttgagtaccactaccaatggtgattttgttcaaggaaaagatctcgcaatggttaaagttaatgtagcatgtgctgctgctggcttgacatcaagttacactccaactccattgttggaatctggtttgcaaaaagacagagggttaattgtggaatattttggaaggatgtcttacgttgctcataacgttaatcagccccaagagaaagatttgttagagggaaatttttcctttgatattaaatctcgctctagattggaaaaagtttcctctacaaaagcacaatttgttagtggaaaaaccttcaaatatgatataattggtgctggttcacattcttcaggagattttcctgaaaaggaagatcaagaaaaacccaaaaagattgataccagattgagacaaagaatagatcctcaatacaatgaggttcaggctcagatggaaacaaatttgtttaaattgtctcttgatgatgttgaaactcctaaaggttctatgttggatcttaaaatttctcaatctaaaattgcacttcccaagaacacagttggaggaaccattctgcgtagtgatctattggcaaattttttgacagagggcaattttagagcaagtgttgatttgcagcgcactcatcgtattccaagatagcgaagaatctttgaaaccacaagagtggagaaaaactctctgctgctgttggttttgcatccttttcattggcatagatttcaatgaaaatatcaatgccaatttcatcacaagcaggttttgcatcaaagacattcggctcaacatcagagtcctccttctgtgtctcaaggggaaccttcagtctccgagggctgagagcttcaagcttcacacgcttctgcgtcttcaaaaggtgccttctcgcggacacgaagctcttcaacggtggcaaatcagcatggt

SEQ ID NO: 51258 - DNA, 275 bp, Glycine max
  Clone ID: PAT_MRT3847_17299C.1
gttctcagtctgccgtgcagattcttttgcatcctattgttggacaaaatagtctatcctcaaatttgtcacttttgtagccatcccaaatgtactgagctcgtcattttgcaagccgcaagattctaatttattaattgcatgggaaagctcgtccttttctattcatttaaaaacagaaagggcccctcctagttaggtcactgacgcacaggtttgaaccccaagattcatcttgcggctgttataaaaatccccattgtttttttgtttca

SEQ ID NO: 51259 - DNA, 143 bp, Glycine max
  Clone ID: PAT_MRT3847_1729C.1
atattattatctgaagaaaacccatcttgcgtttattgacaaaatggttcaacttatataaaaactttacaggagattttagttatgccccactatcctataataaaaaatactttgtggcttttacctggggatttgaaaaa

SEQ ID NO: 51260 - DNA, 245 bp, Glycine max
  unsure (1)..(245): unsure at all n locations
  Clone ID: PAT_MRT3847_172C.1
ccaccacagcagcgcaaaccggaaccanggngagcacctccggcacgaggaggcaaccgangaccagcacaagccgaaagacangccccaacggcggngaagcgcnnnnnggncngaaaaggggacgaggagggcgnggcacnngcaaggccgcgnacaaggggaagcncaaaaccccagaaggagaagnggagnnngaaggcccagangangncnncaacggggacaaggcagaggacgaaggc

SEQ ID NO: 51261 - DNA, 1665 bp, Glycine max
  Clone ID: PAT_MRT3847_17300C.1
ataaaaggtggcatcaaaaaaaaattagaaatgcatttttcagaattggtattataagattcaaaccaaaaacaatggaaccaaataagttgcagtcagaactacgaaaacaatcaatgataattttctatagctaaaacatgcaatgcagtagcttaggacttgctatttttactcaccattgcagttctgaaatcacttgcacaaaagaacaatatttcctcctgtgccattaggggtatttgaactacataattctcccctgcactaatattagatacaggaatatgcttaccctcatacaacttcccatcggtaggaaggttaggatcacccaacaacactttgtctaaggttcataatttttgcaaaccttattaaccttagtagaatacaacttgtcaacagcaggaatttgatccttaaggctttcgtgagcaacatgtttttcaaattcatgagctcgctttgcaagaacatcagcaggaatgcctttgtttctaatcacttccatcttttcctcttctgtcaaagcaagatttttctcgtgtttagtccagaatttgtatctgccgtcgtaaaataagccggaaaatatgtatattactcagattccgcttatatttaatttcagcagtgagaaaagatgggagaatgtaaatcaacaaggtatacagatgccacctaatgtaatgcggtaggaattttctaaattgagttgctattgtataataaacaaccaagatgtccaaatctctgctgaaattaaatataagcggaatctgagtaatattcatatttccggcttattttacgacggcagatacaaattctggactaaacacgagaaaaatcttgctttgacagaagaggaaaagatggaagtgattagaaacaaaggcattcctgctgatgttcttgcaaagcgagctcatgaatttgaaaaacatgttgctcatgaaagcctcaaggatcaaattcctgctgttgacaagttgtattctactaaggttaataagtttgcaaaaattatgaaccttagacaaagtgttgttggtgatcttaaacttcttactgatgggaagttgtatgagggtaagcatattcctgtatctaatattagtgcaggggagaatcatgtagttcaaatacccctaatggcacaggaggaaattctgtcttctagtgcaagtgatttcagaactgcaatggtgagtaaaaatagcaagcctcaagctactgcaatgcatgtgggagctatagaaattatcattgatagtttcgcaagtcctgactgcaacatagttggtgcaatgcttttggttgatacttatcataccaatcctgaaaatgcagttcgtagtatttttgttgcgcctttcagaggcggaagggcccattctggtggttacatttccgaataccattgtgcagattgaaccagacatgaattcaaggtttcagcttttgagtaccactaccaatggtgattttgttcaaggaaaagatctcgcaatggttaaagttatgtagcatgtcctgctttgcttgacatcaagtacacttcaactcattgtggaatttgtttgcaaaagaccaaggttaattgggaatatctagaaggatggttactatgttattacgtaatcaccccaaagaagattg

SEQ ID NO: 51262 - DNA, 136 bp, Glycine max
  Clone ID: PAT_MRT3847_17301C.1
gaaatacatctacttaccatatagagatatatcccgaaacgatgaaggctattatgtggcttcttcttacttttcgccctcagaaatgttccttcccagttcaactctagctcgacaactactgcagaaaggaggg

SEQ ID NO: 51263 - DNA, 2148 bp, Glycine max
  unsure (1)..(2148): unsure at all n locations
  Clone ID: PAT_MRT3847_17302C.1
agaagattttggggtagcgtagggagcaaaaaaggcgggcgtaggagtattccagccagtgtcaaaatctggtgagatttccaagagaatatcaggaattttatgggggtgggggttgtcaaagggggaggtcaaatgccatgaagttttatttccccactcagaactccacatttcagaaccagtagtagggtcgcatacttctattgggaagatcaattcccaggaatgtggttgtgatttggtccacttacatgcatcaaaatgctccgtactgttgctgtttgttaaaagcacttgtaccaatgaggcccaatcactcgttttgactgctgcattcccagacatcgcaatctggaccattaaaatacaaatctgccaagcagcagctctcaacaagttactaattggagaattttgtataagtgtgatccaatctccagttttgtccactaaaattcctccaccgagaaggtcaatagaaaattgacaaaagctctgcttgctagaatcaaaattcaatggtgttctcactgttgccatttgattccaaacagtttgctgcgaaatgcactgaggaatggtgcccaaaagacgagaacctgaaataccaggattgagcccatatgcacacatattgtttatggttgtcgtcttaacaccaatgacataatcacctggtattgtagacactgaactatcatgcaccatagcatacaaatatgcacacccatcagccatcagagttgttgtagcacgcacctgagttgaccaagctgtaataaattcctcttgtgaaaatttcaatgcaactttttcttgaatctctccaaactacaccgtcgattttgaggcttttccccacaagctggtgcagtttggagagattcaggaaaaagttgtattgaaattttcacaagaagaatttcttacagcttggtcaactcaagtgcgtcctgcaacaactctgttagctgatgggtgtccatatttgtatgcaatggtgcatgatagttcagtgtctacaataccaggtgattttgtcattggtgttaagttgacaaccataaacaatatgtgtgcatatgggctcaatcctggtatttcaggttctcgtcttttgggcaccattcctcagtctatttcacagcagactgtttggaatcaaatggcaacagtgagaacaccattgaattttgattctagcaagcagagcttttgtcaattttctattgaccttctcggtggaggaattttagtggacaaaactggagattggatcacacttatacaaaattctccaattagtaacttgttgagagttgctgcttggaagaaaggctgtttaatggtcaagattgtgatgtctgggaatgcagcagtcaaaaggagtgattgggcctcattggtacaagtgtttttaacaaacagcaacagtacagagcattttgatgcatgtaagtggacaaaatcggaaccacattcctgggaattgatcttcccaatagaggtatgtggtcctaataatggttttgaaatgtggagttctgagtgggcaaatcaaacttcatggcatttgagtttccttattgacaatcccaaacagtctacagtttttgacattctcttgggaatttctcaagattttgaaattgctggtaatactcttatgccagctttttctgttccacaggctactgccagatcttctgaaaatgcggaatcctctgcatgatctggaatttgtgttttctttcatttgttcgtttgtttaattcaataaaggaaattaggcatgaccctcttgttgagtatgctctgcctatttgaaaatttccacacctcttttaattgtcgtaatgatgtgtgaagtgtgtgttattttaaaacaaaaacaaacacaaaaagaaaaataatatatacctaacactccgtctttccctcgctcttctcccacaattgcgctattccaaagaangctccgcccccattctccccttaaatagacttattatcctctctcactccctagttttcaacaccctcatacatgcaaacccattctcttccaacatatttccgtttaaaaaatatccgcttcccacaatgcttctatcaaataaacccctacattcgcccttcccctat

SEQ ID NO: 51264 - DNA, 3412 bp, Glycine max
  Clone ID: PAT_MRT3847_17303C.1
taaggctggctcgcccgccggtacgggcccggacttactggctggaccgacccatgcgtctttgttttcgtccacgcgtccgcgaaattttgataaaccgcgatcacaggttgccgcaccttaaaaccggaaacaaaagcaatcgttacttgatttcaagaatttctcaatttcttcctacttctttgtgtacgatttcttaagggaaagaaaatcactctctgtgctggccacagacttcgtgaatcattttcttttccactcttagtttatttgctgaacactctcctatttgatataggacttcgtgtcagatttaaactttttctgtctctttctcagttctctgttcaatttcaagttcaagctggtgaaatcttggattagtactcccactctcctatctggtataggatttcgtgggtagacttttctatttctttcctttctttcactctcttcttctcactgatccgcattggccgttcaaagtggtcttatttgaaaaacacttgggcgttggtgcaaatgtttgcttcgttaattttctctggagataacaggctcactgagaaaacaatttttacttgcagagatttggacatcttggttgtttattatacaatagcaactcaatttagaaaatttctaccgcattacattaggtggcatctgtataccttgttgatctacattctcccatctttcctcactgctgaaattaaatataagcggaatttgagtaacgttcatatttccggcttattttacgacggcagatacaaattctggactaaacacgagaaaaatcttgctttgacagaagaggaaaagatggaggtgattagaaatagaggcattcctgctgatgttcttgcaaagcgagctcatgaattagaaaaacatgttgctcatgaaagcctcaaggaccaaattcctgccgttgacaaggtgcattctactaaggttaataagtttgcaaaaattatgaaccttagacaaagtgttgttggtgatcttaaacttcttactgatgggaagttgtatgagggtaagcatattcctgtatctaatattagtgcaggggagaatcatgtagttcaaatacccctaatggcacaggaggaaattctgtcttctagtgcaagtgatttcagaactgcaatggtgagtaaaaatagcaagcctcaagctactggcaatggcatgtgggagctatagaaattatcattgatagtttcgcaaggtcctgactgcaacatagttggtgcaatgcttttggttgatacttatcataccaatcctgaaaatgcagatcgtagtatttttgttgcgcctttcagaggcggaaggcccattcgggtggttacatttccgaataccattgtgcagattgaaccagacatgaattcaaggtttcagcttttgagtaccactaccaatggtgattttgttcaaggaaaagatctcgcaatggttaaagttaatgtaacatgtgctgctgttggcttgacatcaagttacactccaacttcattgatggaatctggtttgcaaaaagacagagggttaattgcggagtattttggaaggatgtcttacgttgctcataacgttaatcagccccaagagaaagatttgtcggagggaaatatttccttcgatattaaatctcgctctagattggaaaaagtttcctctacaaaagcacaatttgttagtggaaaaaccttcaaatatgatataattggtgctggttcacattcttcagaagattttcctgaaaaggaagatcaagaaaaacccaacaagattgatgccagattgagacaaagaatacatcctcagtacaatgaggttcaggctcagatggaaacaaattcgtttaaattgtctcttgatgatgttgaaactcctaaaggttccatgttggatcttaaaatttctcaatctaaaattgcacttcccaagaacacagttggaggaaccattctacgtagtgatctattggcaaattttttgacagagggcaattttagagcaagtgttgatttgcagcgcaccttcatcgtattaaagggatgattaaaatggtggccacacgttggtatttcctgagaatacacggtattagcattggcctgtgctatgaatagttcttttagggggcgcgccagttctgatatttacacgcatctgctctcaagactgtgaattatggaatcctgcttgcacaaaagcaatgactatgtcatttaatccaaacccgtgttctgatgcatggagtttggaatttctgaagcgtaccggatttcattgtgatatcatttgtgtcactggatggactgccaccccaatgcaggatgttcaggttacaattgattggtttatttcctctcaggaatgtgttcccaggacctattgtgttttaaatccacaaaatccttttgtgttaaataggtggatgggaaaactgactttcccccagggcacttcccgaagtgttaagagaatgcctctttctatagggggaggagctggtgcaaagaatgctattctcatgaatatgccaaatgctgttctttcaatgtggagatattttgttggagatctcgtctttgaagtttctaagatgacttctccctacattaaatgtacagtctctttcttcatagcatttggaaatttggctgatgacaccatcaattttgaggcttttccccacaagctggtgcagtttggagagattcaggaaaaagttgtattgaaattttcacaagaggaatttcttacagcttggtcaactcaggtgcgtcctgcaacaactctgttggctgatgggtgtcccatatttgtatgccatggtgcatgatagttcagtgtctacaataccaggtgattttgtcattggtgttaagttgacaaccataaacaatatgtgtgcatatgggctcaatcctggtatttcaggttctcgtctcttgggcaccattcctcagtccatttcacagcaaactgtttggaatcaaatggcaacagtgagaacaccattgaattttgattctagcaagcagagcttttgtcaattttctattgaccttctcggtggaggaattttagtggacaaactggagattgtgtcacacttgtactatagtcttcaattagtaacttgttgagattgctgttggaagaaaagctgttaattgtcaaaaatggatgtctgggaatgcatagtcaaaggagtgattggccagatgggtccaaggttatacagacagcacagtacagaagctttgatgcagagagtggacgaataggaccacttcctggaatggatctccgaatgagtttgagcgcgagtatcgagatgcagcgtatatcgatgtctcgaacgcaacgtacccactac

SEQ ID NO: 51265 - DNA, 456 bp, Glycine max
  Clone ID: PAT_MRT3847_17305C.1
tgatataacatgccatttttttttccttattcaaacgatcatgatgattatggcatcgcacgatgtacgagctgggcgttatcattgttacaaatgtcctttgtagcatctatcattctcactttacttgaccagcactagcgcccacctgtgatttatcaacatattgcttactatagcattccccacttactctgcctttgcacatgaaactcttatacttttcactcaaaaaggaattccatagtcaaaggcgtgcatgcattgaaagcatttctatgagtctggatgcctctgtctccaagccatcaatgctcaccgatcttgctattgtccaaccccatttggcaaacctgatttgccggaatattcatcctggcctatttacccattccaagaacatgctgcatagggattattgctgtgtgagcaacacaagccactactctctggatt

SEQ ID NO: 51266 - DNA, 493 bp, Glycine max
  Clone ID: PAT_MRT3847_17307C.1
acgcgtccggtataatagatctttttctttttacaaaaaaacatgtgttttagttctttaaaattatttttaaggactaatattaattaagaataatttcaaatcatcgaatgcaaaaactttgttttttaatatttcaacacattaagtatacttactttttttatatacctattttaataaaataaaaagaaaattattaaaataatagtgtaagaggggatttaacatttaatcaaaatttctgtaaaaaacatttgaatcaaaattttaaaataataaccatggccatatatagtttaatcaaagcccatatgtttatttattgatatttatgtaaaattcaactaatttaaagataagattcgctaaataaagaatgtggctcacataaactatactcaaataaaaaggtattaaatagcatattagtaacatttttctaagtgaaatgtcactatatgtttaactattaagtgtaagtttgtgtgag

SEQ ID NO: 51267 - DNA, 410 bp, Glycine max
  unsure (1)..(410): unsure at all n locations
  Clone ID: PAT_MRT3847_17308C.1
ggaaaaaccgccgaaggctttccccatggcaaatatagaacggtccaacatattaacaggataaaaggtaaaatcttgccaacccccaaaaaaaggtcnttaaatagcttctaacctaaaaagggaatacggtttgttccctccccaccccccccaaagggaaaaaggaaaaaaaaaaaaaaaacctggccacccaaatccaaacccctctttggcttctggaagggcaagcagtaccctttcttccaaaggtggttaaaagggatccttgggcaattctaatggtttgaaccggggttgaccaaaaggtaagggatcagaccccccatatgccttatgtatttaaaacctcgggcccccggaaattccttgaagagcgctaaccccctccaaaggccccttggaggggc

SEQ ID NO: 51268 - DNA, 375 bp, Glycine max
  Clone ID: PAT_MRT3847_17309C.1
atccatgggaacgcggccttctagtatatgcttttttcaggatactaaaacccttttttgtacgagtaccgtctcaagtcgttaagccaaacggagacaaaaaataggaaactcctttggtgggccgcgttttgtacaagagaatagacagcagccagcgtcatgtaaaaaaaatacgcaggaatggcattctgcgggataacaagaatacgaacggggaattattaggcacgcacttatgatcaacacacggggatataaggcttaccaacgaacacaaataccgaaaacagggcaaaactaacgattccgatttccctgaaaaatgaaacatcgaaagttttgggttcatccagcaaagccattggcagacaa

SEQ ID NO: 51269 - DNA, 492 bp, Glycine max
  Clone ID: PAT_MRT3847_1730C.1
ctagagggggagagtgtcaccccctgctgatccaaaattcctcaaccaccactagctctccatcttgttctttagggccatggctccaatcccaggtgcaaaaactgttccacactccaattcattatttacttaacacagcctaatcgaaatctacatcttaacatattgtccaaaaatttttactggtgataaaaatccagtctctcgttacaaaattggcaaacaaaagtggctttactacaccatttgccacaaaacgcatatcctgatctaactcttacaattttaaccctttccctggggattagctccaacataacaatgttttaacacagctattaggtggcacataaaaaaaatgaacgacctttatcagttctgaaataaatactgatgcttatcgtctggaacattaaaacatataagttcactggcctgaatcaaactttccgcggcattaaaaatatgcggcgagggactcctgcaaaa

SEQ ID NO: 51270 - DNA, 583 bp, Glycine max
  Clone ID: PAT_MRT3847_17310C.1
cccaggtgccaagctggggttgtgtgtggcggatctgtgccacatttaagaaccgctgctaagtcctgtggttgctttcaatgcttgcttggatatccttcctgtctatgtctttcctccacctacttcgagttaagatcttgtgctaccctcacctgcgcccctagcctacgcgctgaacacactttccttacaccacctgctgagtgcgcctgtgctggacgtgaatgcacccggtgatgccaatatgattgactgatatataggaatggaagagttggctggaatcggcgtcaggattctgcctcatcctgaacgcgcatctcccgtgagtccgttcgtacgagctgcttgtacggctgcactgaatgggctatctgctgtgctttgcgtcttcaatctgctgcgacttctttaagcatctgccttgttgatctcgtcttttctcactatagtacgacacccatgttcgtgacatcgctgggtcatactctcggctccgttactcgctactgatagatcaccctgctttttgagcctgccctttgctgctttcaagatctacatgaagaggacttctgtg

SEQ ID NO: 51271 - DNA, 177 bp, Glycine max
  Clone ID: PAT_MRT3847_17311C.1
acaatatagagcagattctatcaatctagtgcttattccttgatgattgctcagcggatatatcgtataccttcactagatgcaggcacatcacaacttgacgatattgctcgtcaaaatccccatgtcaagagggtatcatcacataatactcttaaaggttgagcggcacaggga

SEQ ID NO: 51272 - DNA, 258 bp, Glycine max
  Clone ID: PAT_MRT3847_17312C.1
ttcgcattgccttcgcttctcttacatacgtggcggtgggatcacagtccacatggcctgccatatatgctacagtgatgggaagcttgatactgctctctgcgattggctcgatgtgccattgtgtcattttcacacgctcgtggagactacactgagacccgagagtctatcgttcgccatgtctcatgcatcagtccatgcgattttgaagagtgcatacaacagagtgtgcgcgctgcagtctgtagtgtagtt

SEQ ID NO: 51273 - DNA, 118 bp, Glycine max
  Clone ID: PAT_MRT3847_17313C.1
gagaaatgccttgcaggcaattgagggcttgaagagaccccttcataagtgaggatttctcgagtgcaaagaagggctaaattactgcccacagggatcagaagcttgtgaaaaataa

SEQ ID NO: 51274 - DNA, 405 bp, Glycine max
  Clone ID: PAT_MRT3847_17314C.1
aagccatgtttaaattcggtaaacaaaaacattggatatttaaattgtataatttaccgtttaaataataaatttcaattgtatataaatataatggtttcaagctcaatatatgaatccaaccaaattatttttttaaatacttttcattaacaaatgttaatttactctgaactggtcgatttatttttttaaagggtgaattcaattccattttttttgttttgaaatgcttctaagaaacttctatcaaaaacgccaatttccactagcaatgctttgaggaatttctttgtatcatttgaaggtgttttaaagaatcaatttaccactttttgattaaacaattcaatttgcttcaaattccaaaattgtcataactttatgcatgaaatttatttattt

SEQ ID NO: 51275 - DNA, 765 bp, Glycine max
  Clone ID: PAT_MRT3847_17315C.1
tgaagaaagaagtaattaaacaaaaacacaaaacacccacaacacaaacacagagtgagacagtattttcaatttctatataacaattttgctaaaatatgaaacagacaccatcttcctgaagaaacaacccaaccagtttaaaattttacaaccccatccatcataatcatcatcatcatcataacactacagccaaatataacaaatttaaactctgttttaatattcttttcaccttggaaagaaagataaatagctgaatgaataggattacagagctaagatcacgatcgatgtttctcaatcttcttctcgagctcgtccttctttgcgcccacaaccttgtcgacttccttccctttcttccacaacacgaaagtcggcatcgcctgcacctgaaactcctgcgccacatcaggtaattcgtcgacgtcgatcttgacgaagtcaacgtcgttgaacttgtcggccatggcgtgaatcgctggctctatgaatttgcaaggaccgcaccacgacgccgagaaatctatcacaacgagcttatcggtatctttgatctcgttgaagtagagctgccagcgcggcgacgagtggaaggaggagactctagaagtagaactctccggcgaagacgccgccgccgccgcgtcgccgccaagaagcgcagaaagtataccgcccattgctttgtggtggtaatcttggtattcctttctcaacagttatatccccttctgtcgtcttctcgcagccgaaaaa

SEQ ID NO: 51276 - DNA, 770 bp, Glycine max
  Clone ID: PAT_MRT3847_17316C.1
ggctcgagctgtaattagatgtgaaactttcatcatacttgtactcttcccacaggctataataaacagtgttctttctctctctgaactgcaccacactctcgcataatctaacgtatcaccttcttcccaatgtcaccgtgtctttgagacgcctcgctctgttccctcttccacgcgtctctctctctcctacccacttcatctcttcactcccttttctgacaatgagatcaaagtcttaacctttccctcttttcacttcctggggtggaccaaataataccatacaaaagaaaacaagaaaagaaaagagtttaatcagttcgttgaacaggcggctgagatattgaaaactttctggtatttatttttgattcctacgtgagttattgtaaattttttaagtaactgtgtttgattcctgcggataaaaaacaagaaaaagatattttttttttgttgaaatggcaacttcgttgaaatggtgggggaaggagagtcacaggggcaccccagtggtggtgaagatggagaatccaaaatggtcgatgttggaactcgagggtccttctgatgaagacttcatcattgggaatgataatgataacaataataacaatagagacaacaaaggtagagggaaaaacgcgaagcaactaacgtgggttctgctacttaaagctcacaaagccgcatgttgacttgcttctgtggctcctgcattattgggtctggtcgacgtcgtgaagcgccgagtggctgtcgga

SEQ ID NO: 51277 - DNA, 131 bp, Glycine max
  Clone ID: PAT_MRT3847_17317C.1
agactggattactcgatgtgcgatagtggaagaatatgtagtacgttgcaaccaccccattgttggggtggaatatactgtgatttcatttgaagcatcaatgaagagctcgattgctatgggggcagggg

SEQ ID NO: 51278 - DNA, 289 bp, Glycine max
  Clone ID: PAT_MRT3847_17318C.1
ccacgcgtccgtttacgcgtccgcccacgcgtccggctcggcatgtcaccgtgtgcaagtgcaacacaagtttgtaaaaatgactagctagtagtagcaatgctgttgctgtacgagtaggcctccctctgctttgtacaggggtagtccaacaagtatatggtttgctggtgccatgtaaaaatgtatatagaatcctacgttcacgcccaaaaaaaaaaaaaaaaaaaaaaaaaaaaaaaaaaaaaaaaaaaaaaaaaaaaaaaaaaagggcggccgttctagagga

SEQ ID NO: 51279 - DNA, 138 bp, Glycine max
  Clone ID: PAT_MRT3847_17319C.1
acgcgtcgggccacgcgtccgtgcagattgagtttgctaagtacaagagcatctcttctcggtttgtagtattgcttaaggagcacggattcacgggctctttccgtggctggatgcctaccttgctagcttacagtg

SEQ ID NO: 51280 - DNA, 412 bp, Glycine max
  Clone ID: PAT_MRT3847_1731C.1
gaaaaaaaaaaaaattggcctaaaaaaacccccgggttttttataaaaagtttttaaaagggccatgggtttttaacggcccccgttcgaaaaggggggagtttcagggtttggcccaatttcccgaaccccctttttttttttgttttcccctttttgggggccccaaagggcaaaggcggggcttttttaaacaccccggttttcctgatggggggggcccttaaataatgggggccccctttaaggggcccggttcccagggaagggggaaacgggggtgggcccggatacaccccccttgttttttggaacccggggagggtccctcccaaaggtttggggggggaaaaccaaaggggccggggtttgggttccttccccggcccccgggggacccaaaaaagggggg

SEQ ID NO: 51281 - DNA, 737 bp, Glycine max
  Clone ID: PAT_MRT3847_17320C.1
caaccattgattttcttgtcaacaactgagataatttactttatccttagaggagctggatcccctccctcactttagaggagctggatcccccactccctcttactttcaagaaggagacttgtgcaatgaaaagattgctgctttattttttggcaagaatatgaagattcgtcacatccttttggtgtggcttgtaagactaatctctaaagtgaattgctcactttagaggagctggatcccctactccctcttactttcaagagggagacttgtgcaatgaaaagattactgctttattttttggcaagaacatgaagattcctcacatccttttggtgtgacttgtgagactaatctctacttaggtgttgactttaacctcacccgttggtgttcctagagggttttgagcccttgcaccgcatgtcaaatttactgcctcttgacctggaaatcattggcctagatgtggaaacagcctctctgctcactcaatgggacgaaggctctctacatttggtattctcaattcctccccaaatcatggtagagccatgtgtgctaaattactctttttttcttatcagggccatggaggagggtgattttattttgttctctggaaaggagagcaaagtagacatttcctttcataacattggatagtgttgaaatcagtctcatttacttttgatattcaaataattaactacatattagcggacgcgtgg

SEQ ID NO: 51282 - DNA, 196 bp, Glycine max
  Clone ID: PAT_MRT3847_17321C.1
atcataaccacacactctagatcatatgctgcttatacggctagatcttaatctatctgatgacgagcattatggactctatagcagagctataggagactatatctgagcttccggccatgagttgaagtcattattccagcgaagaaccgttgctgcgttaaggatatattatactgagacctttgccgtgcta

SEQ ID NO: 51283 - DNA, 233 bp, Glycine max
  Clone ID: PAT_MRT3847_17322C.1
gcccctctaggtgtagcctccttttatatcttatattttatttattatatgaaaatgaaaaaaaaaggataagttatactttggtaaatccctaatgaggctaaatcattctaaccatgcgatgatgttgttcagacttcggattaattagggaaataaataatttttttaaaatgatcataaacggtattttttttaaattacaacaatagataagttatactttggtatac

SEQ ID NO: 51284 - DNA, 444 bp, Glycine max
  unsure (1)..(444): unsure at all n locations
  Clone ID: PAT_MRT3847_17323C.1
atagttttctaattcaaaatattacaatgaaagaagcaccgagtgttttccctgagttagnaataanaanaaatttaggtttttgttacttgagaaggcgtatcggcataacctaactaanctgaaatgtcaagcgctcatgatcgacctcgttgcttcttccattgtaatatttgtaattatatagctctctaattcctttaataatacatattgacaccttctctacaaaaaaaaaaaaaaaaatgtctaagacacaactttttaaactccttcaccgctggaaatttttcccggaccgttacccttgaggccgtaccatcttttacctattttgagtccttattatagctttgccgtaatcatggtcactagctgttttcagggactggaaagaagtgtttgattttttagccagagaccccactttcattccccttactt

SEQ ID NO: 51285 - DNA, 314 bp, Glycine max
  unsure (1)..(314): unsure at all n locations
  Clone ID: PAT_MRT3847_17324C.1
gtaccggtccggttttccttggtctttcccacgcgtccgctcttatcctaacaaaaagttgngaccaattaaactggtgtaccacttacaaatatattcattttagagttatactcccaagagtaattgcggctaatcagaacaggatacagtcttcaacacaagagaagcttttcaggggttttgatgcactgtttgattggatggtccgttccatcccttgctgcaactgttttctgtaaatcactagttattttgattcaattgcaaacagatttggatcttgttctcttaacagattagaatcgttacgt

SEQ ID NO: 51286 - DNA, 225 bp, Glycine max
  Clone ID: PAT_MRT3847_17325C.1
tcgcccttataaaccccggaacacagccgggactcttgtaaccggtaaaggacttcgcgggtagactctactattactggcctaactttcactcacttcaatttactgaaccgcaatgccgatcaaagtggccacatttgaaaaacactcgggcgttggagcaaatgattgcttccataaacccctttggggacaacaggctcactggaaaaacaatcttaacct

SEQ ID NO: 51287 - DNA, 150 bp, Glycine max
  Clone ID: PAT_MRT3847_17326C.1
atggtgaaaatcttgtgtcaggtgcctggtgaacattccttgatcgttgccttgcaaagggagatgaatggcatggtggagaatcaactccatcctttcattgatggcatcatggagacacggttaccacccaagtggaagatgctaatg

SEQ ID NO: 51288 - DNA, 298 bp, Glycine max
  Clone ID: PAT_MRT3847_17327C.1
tttctttcttatgattggtttttctagtttactaaagaaagtatatgaaattgaagaacatatgataattgagtccatttgaaggcttttatcatacaacatacaaatggactcaattatcatatgttgtatgataaaagccttcaaagttgaaagggctttctttttgttttactttattcaaatgtacatatgcttatttgttgaagataagtttgtagtgccaattttgtaaagttgagacaaaatgaaaacctttacctggttttcagtgaaattagtgattaaatgatcttaa

SEQ ID NO: 51289 - DNA, 104 bp, Glycine max
  Clone ID: PAT_MRT3847_17328C.1
gggcaatcgcagggagtggataggctacaacgaaagcagaggtggaggaggagtaccgatgcggcaatgagttccccttgcagttgcgcttgcgcttctactaa

SEQ ID NO: 51290 - DNA, 275 bp, Glycine max
  Clone ID: PAT_MRT3847_17329C.1
gttctggtgagtttacctcattctaaagtttttccgagaaaaaaaaaacccgaaaaaagggattgaatattgggtcagtttgtatctgcggtagaatccaggtagtgacacaagatcgacataggttaggtaaatttcgtttttccgtttagggaatggatacgggggattttcgatccattctggaaaatgccgaaaacaacatttgggcattgatggacgacgacatgggggtggcctcagtcgacaacacagacgagttaaagcgccggaga

SEQ ID NO: 51291 - DNA, 780 bp, Glycine max
  Clone ID: PAT_MRT3847_1732C.1
tttttaattaaatttctcatacttaatctactcacttagtataaactcatattacaagtatttaacacttgaataaaaataaagtataaacaccgtgtaagatggccaaataaaaactaaagctacgaaaggcaagaattaatatttaaggtagctggagtgtgagtatgtacaaatattcacacatgaagacttggccaccaaaatattagacaacaaatctccactgctacgggaatgaatcttctgcctgtttccctaaatgatgttgtatatggttgaattcattacagtaaaaagatggatacttatgaacgtattccatcaaaattgaactgagctgatgaacagttttttacacagttcaaccaacaggatgttaaacccccgaagctgtcatgacgtgatgaattgttgctttcccttctttgtacaactctcacaaactcggctgcacttaagcttccgtcacgatttgcatcaaacacatgaaagattatgtcaaccacttcatctgtaatgcaaacaccacacacttgtgatgctgcactctgaaaatcagattttgtcaatactccattaacttttccataactgaatatggccagagagaaggatttcaatttcttgcgtaattctgcaaaatcttgaaactccttgaatgtaattcttatgtgtcttaggttctggtcactgtttaattcttcgaccctatcaatagtttgtttatgtgattgatgtccgcagatgcaaccaaggacagggcaaaatctctggctg

SEQ ID NO: 51292 - DNA, 346 bp, Glycine max
  unsure (1)..(346): unsure at all n locations
  Clone ID: PAT_MRT3847_17330C.1
gcgcgtgcgtaccgctgcgagaagacaacagaaggggacaccaaaacgaaacaaagaagaaaaaaaaaactcgggcgcggtcaagaactgggagnnnnntgttggtaggatttggtactacaattttacattcttttcatctctacatatttcattaggcatggcgacctcaaggaggttccttcaaggccttcggcggtgctcttattggggcgcttttcttctccgcctccggtctggacttagtttcggggcaggccgcgggcctgcaccaggacctggactagatgccggaccagcttggtcctgatattactcaggcaacatgatcagggcttccgtaaag

SEQ ID NO: 51293 - DNA, 794 bp, Glycine max
  Clone ID: PAT_MRT3847_17331C.1
attttgtgttatgtattgtcttttaataaaaatagagtattggtataatgaactgggatttggagccatactagagcaggatttgtagtttgtttcatctgattgggaagtagtggttgtcttgtttcaaacttgatgggagacatgtatgtactaaatgataaaatgtaggggagttgtcagtagtttttcaatgacttccatttaaacaacatgaaattaaaattataaggaattaagcttctgtggctatgtactaagtttgatgtaaatactaatagacttcaaaatatccaaaataaagagaaagactactcacctttaggatacttgtgaatctgtcttttgtttttgatatagcttcaatttgtttctcctttgtccttaaataattttgatatctgttgctttcagcatacagtgaagcccggctcttacacatggatacatcacaggccaccacctcaacgtagacagaaccattttgatgtgcatgacatgttgaacatgctccaggatgttgacttaacaagtgcagaatatttttccatcatgagggactcggacctttatgatgatatggatccattcgagatgatggtatctgataggcttgctggtgattcaggtccttgtttaggtccttttgattctgatgaggaggacttggatatttttcagatggctgcattgacagaagtgctggcttctggtgtggatgattttggtcccgaagatttcggtgatgaagatttcaatcctatggaggctgccttgttatcaatgatgatgca

SEQ ID NO: 51294 - DNA, 380 bp, Glycine max
  Clone ID: PAT_MRT3847_17332C.1
cacgcgtccgaaaggagcaagaaaagggatcaatggggcaaatttttggtgatataactatacgcatgacgatgagaatgggagtgcttgtcatgattcagtgtgctacattttgggaataattggaatcccatttgctcacacgactaaaaattgcccctccatttaagggatttgtttggagggcaatacatcaataatgtggcatatgccatttgtacgtctcgcgtggaagcaaacaacgtactcaagtggaaaactgttcctgcatcttgcggagagtacatagttgactatgttctacgagaccaatatagatcagattccaaaacaattaaacagtaagcttagtttcatgccaaaacccttatgctcaccaa

SEQ ID NO: 51295 - DNA, 220 bp, Glycine max
  Clone ID: PAT_MRT3847_17333C.1
gtgtataaggaaaaaaaaacccctcggtgttagcaaccaattccttacaaagaaggggcaacaaatcccatattttttacttacaaattggttgcacccaaaaggaaaaataaacccaccctttaacataaaacatttttctaacagagacccctaaattgaagcgaaggggcctaataatcagttcaagagcttgggaacttggggacaggggaccccg

SEQ ID NO: 51296 - DNA, 342 bp, Glycine max
  unsure (1)..(342): unsure at all n locations
  Clone ID: PAT_MRT3847_17334C.1
aaaaaaaacagcccatacataaataaaaagggcccttatggggctatatccaacttttgaaatttactttactcccccaaatttggcataccaaattacaggccaatggcaaattggggggagaaaaaggcataattagttacttttgcacattatagggccttcaaatacaggggggggaaaaacattaacatacctttaatttttgatacaaaatgcatttggggactgcccagcttttttcattggtaattaattaccccacaaagggcctttaaaaagaaacttgaataccaaggggggcttttaactgggcaagggacttnggggggcctgggcctt

SEQ ID NO: 51297 - DNA, 448 bp, Glycine max
  Clone ID: PAT_MRT3847_17335C.1
ccggtccggaattcccgggtcgaccgcactcgtccgcccactcgtacgatgaatttcatggatcacgccaggtcaagatcggaatcaacggtaagtgttctccatccttcgatcggtgttctgtcgtttcagatcatcttagttattttttctactattccattttctctgctctttactatctcaattctatctaaatctacatttaacacgatccgtaagaattggcctgttggttgccaaagtcgctcttcaaagagactatgtgtagctcgatgccgttaacgaccctttcattaccaccgattacatgacatacatgtttaaatacgacagtgatcacggacactggaagcatcacgatgtcaccgtttatgactagaagacccttctattcggtgacaaacccgtcactgactatggacacaagaaccctgcagagatccca

SEQ ID NO: 51298 - DNA, 108 bp, Glycine max
  Clone ID: PAT_MRT3847_17336C.1
gaagcctaccaagttttccttttatggagtggattaaaagctggcggtattatgggcattagtggtttctgggggaaaatggtattccgttaacatttccttttacct

SEQ ID NO: 51299 - DNA, 272 bp, Glycine max
  unsure (1)..(272): unsure at all n locations
  Clone ID: PAT_MRT3847_17337C.1
nccacnngcgtccgctagaatataggatcgtgcaactgacagtctagcggatccaagcatcaatgccccagcctgcgacgtagtagctgtcgtataacgggcaatcagtgcattgaactggcgcggcgcttacaacgtaagaacagggaaaaccctggacctactgaacgcactcgccctgcatacatacatcaatggctagctgatgtagctgctaaaaggcccgatcctatcgttcaatgcatcagatgctctccttgtatggggaatga

SEQ ID NO: 51300 - DNA, 321 bp, Glycine max
  Clone ID: PAT_MRT3847_17338C.1
catgcctctctctgtggcatgcattgtgatctagctatcttcactgactgggggtttcgaatgctctcaccccagagagaaagacatggaccatgaaagggtggtaattcaacaaaaacagttttgtgaagcacaaagctttgggccgtgctgcgcccactattggacagagaaagaaccggtttttatgtgtactcgagcgccggttcccaatacctctatgcttgaaatctgttggtggagaactcttcggataacgtagaaaacgaaaaatgctgtgatcgatcaatgtctgtctgaatctttctcgctatcgacaaa

SEQ ID NO: 51301 - DNA, 762 bp, Glycine max
  Clone ID: PAT_MRT3847_17339C.1
tctcgagccgaatcggctcgagcggctcgagttccatcatatcttctcgaacttcaatctattctcaacacaaaagatcttaataacagcttcttcgtcatgggcatccttggaacaatggcaagaaatttggacacaatagtggggcctggagtgttgcttctttatcctttatacgcatcaatgagggcaattgagagtccttcaaccttagatgatcagcagtggctaacatattgggttttatactccttcaccgccctctttgagctttcatgttacaagatcctagcatggtttccaatttggccatacatgaagcttgtgttttgcctctggctggtgttgccaatgttcaatggagctgcttacatatatgagaactatgtgaggcaatatgtcaagcatataggaagctactatggaaattctaagtatcccgaggtgcaaaagaaagttcttcagatgatgagtttggatgcaaggaaagctgttgaacgttatatagatacatatggctctgatgcctttgagagagtagtcaaagcagctgatagagaagcaagcaggcactgaagattaatttgacgaaattgatacatacgtaaagaatctacatttattgtaatccataattgttgtgcatagatgagtaggtctcagaattattatcctttaattaaatgccaacaatcttgagctaatttttacattgtgtaaaattatctatatataatttctatgggatgaggaataagatgt

SEQ ID NO: 51302 - DNA, 465 bp, Glycine max
  Clone ID: PAT_MRT3847_1733C.1
tttttatgagaaaatccctggaacattgattcattaaaagtccatactatatgattgatctcgatacactatgaatcaacgtgggtgaaagtcgctagatggccccacctataagactcactatctagtaatgtactaacaaactatgccaaccagccaactgtatctgatccataaatagcactggatcgatgagggctgcacttcttaatcctgatcttcatactgccataatgtatgcttgcaccacccacaagttgacggcagtgtctaccgtgtacatacttccaatattcgggaaccagtttcaacggagaaactctaatattttgtactaactcattataagatgccatctctgaggcactagggttacttgccttcatgcctaatgggagatagtgatactatcactttgttcccaccttagtagcctgatccaagaaaaacatacctggctgctgg

SEQ ID NO: 51303 - DNA, 290 bp, Glycine max
  Clone ID: PAT_MRT3847_17340C.1
ggttcccaattcatcgtggcctccgcctcctttaacccccccctccaatcccaaatcgaaaaaaattcgttttaagttcccccaaaggaaccttaggttgcacaaccaaaggatttggaaccaatccccggtggaaaaattgcaaaacccaaatttcccccggccgttaaaaattatgaaaattaccatgtttgctatggaggtcaagaggaagagagaaaagctaattataccgatatggttaataaatactaagattctgttaccagcttttatgaatttggctgggg

SEQ ID NO: 51304 - DNA, 796 bp, Glycine max
  unsure (1)..(796): unsure at all n locations
  Clone ID: PAT_MRT3847_17341C.1
ccacgcgtccgcaaaaatgaagcttgcatccgtgtccaacataacccatgccaggttgttgcaccgctgctgccgccggactgccaacagaagtacttgccggaagatcatcagacgacaccccaagatttgtgtcacatacttgttggccgtggcaatcccaaacatatggtatttttttcagttcttgggatccataaccattgtttgtttcttattcatcttccctgctgcaatcgttctaaggtattgctacctatttctcttctctctatatatttgtttttttaaaaaaagaatacttacaatacattgatctttaacattttttagctccctttttattccaaattaaaattcactggacatcacaaaaaattgtgatcagtctcattaatgagtctaacttattattttgtagtttttaataatttttaactaataataataataagtaatatattaaaaagattgtgttgttagcattatttttacttaatttatatataagtgttgtgtttcataccacaatcacatcctcttttgagcacggggacatgcatggcatatcaaagacaaaaaatcaagtgatggcaatagtacgtggtggttgttttggctgtagggacaagcggaattaattgctatatggaccaacttgaatggttcagggattgatcagttattaaccatganngtatatatatatatatatatatatatatatatntntaagcaaccatgatgttataaatattatacccagtctttttcaagtttttagggaagcctaatc

SEQ ID NO: 51305 - DNA, 541 bp, Glycine max
  Clone ID: PAT_MRT3847_17342C.1
cccacgcgtccgtacggctgcgagaagacgacagaagggggcggtaggcgcagtacgccactgtccacaccacaccccctttgctgcttccaccactccctaaccttcgctctcacacactctctttcatccatcgtcatctctgaattggaaactcattattattaaatgaaattacgaaaacgaagaaaccaaacaatagtagcttagttaattgaattgaatgaatctcaatggaacctcttctcttcaacgactccacattctcttcagctaacccttctttgtctgagatttggccctctcatttcccctccgatcacactcccaggaagaggcgcctctccccctcgagtgattctgccagcaataaacatatcaagttatcagcaccagaatcccaggatcaaaacggtgcgttgaaggttggtgaagtagacgcgacttccgtggccggtaacaagctacctcaacaaaccccgaaacctagttcttcggagcaggcacctaagcatgactattacacgtgcgagccagaaga

SEQ ID NO: 51306 - DNA, 1308 bp, Glycine max
  Clone ID: PAT_MRT3847_17343C.1
ggctcgagcgtgatcttaccctcctttccttcttttttaaccatccaacccactttaatatctccaaaagataaaattatttgtatgttgatccatgtagcagacctcacctagtgggataaggctttgttgtagttgttacttgtttgtgtgttcattatatgctcattaattatactgtattcttttgtggtattctttcttgttggtttcattgaattagcatttgaaattggtgataagcctaatttgaatttcaatggtgattgttctaagaaaagaaattatgagatgttttgggcgaggttttaaaagactgtatgcaattgcgatttaggctgcaatgtcaaggtttttggtgtgtttgtgactgcaattgtagccgcattggtcacaatttcctgcaatatcaaggaatgtgataaaaatgtgaccgcaactgcaatttaaaaccttgccgagtaacatgttttgattgtgagatgttactatgtcttagaatttagataaagaatctgtgtttgtggttaaaaaatggtgtccggacgaaggcgatttcacgtgcaacaaaacgcagacacggtgcgtgaactgtgccgtgaccgaaccttacctgggatatttaggaatcgtcgaatctctctgtatggaaaaccaacaacttcgtgaagtttttaattgaggtgtcaatttgtggttcgggggacaagaaaaatagaaaaacacaagttgtgagagactaaatccaacaagaacaacctcgttacattcacaacactatgcaagcactgtgtccttcattcccagattgcagcactcttcgagtgcccagattctcaatcagtgccactcctccaaattttgcatcttttctgagcccctccaaggctggaatcaaattgagttgtgggattcacaaaccagtttggaggagtaggtgtgatggtttaagggtacagtgtgcagcctccaatggagaaaatgatgatgatgatgggttttacatcagaaggtgtgttgagcttgcaaggaaggctgttgggttcaccagccccaatccattggtggggtgtgttattgtaaaggatggcaaagttgttggtgaaggcttccaccctaaagcaggccaacctcatgctgaggttatgagattgtttgctctgcgcgatgctggtgagttggcacaaagtgcgacggcttatgtgagcttggagccttgttatcattttggcaggactccaccttgcactgaagctctaattaaagctagagtggctggggttgttgttgggatggtggatccaaatc

SEQ ID NO: 51307 - DNA, 2297 bp, Glycine max
  Clone ID: PAT_MRT3847_17344C.1
tttcaaccaattggatggactacttccagctaatctgctcacactgcccacattgcaagagctgcgtcttgaaaataatatgatctctggtggcatcaagttttcgtcttctcctgaccaatccgatcttcagattcttgatctttctcacaaccagcttaatggctattttcctgatgagtttgggtcattaactggcctaaaagtgctaaatattgccggaaataatttttctggttctcttccaactaccattgcagacatgagttcacttgactccctggatatatcagagaatcattttactggtcctctaccaagtaacatgccaaaggggctccaaaactttaatgcttcacaaaatgatctgtctggagttgtcccagaagttcttagaaagtttcccagttcttctttctttcctgggaataccaagttacattttccaaatggtcctcctggatcaatcagttcacctgctgaaagttccaagaggaagcatatgaacaccatagttaaagtcataatcatagtgtcatgcgtggttgcgctcttcatattaatcttgcttgctgtcttcatacactacatacgtatatcaagatctccaccagaatatgaaacaagtaaggatatccacaggcatcctcaaccaattatctcggctcctgttcgtacgacagatgggggtggcgctttggttgtttcagctgaggacctcgtgacctcacgcaaagagtcaccatcggagataatcagctctgatgactcaagccgctcgagccgagggttctctccatcaaaacaaagccacttttcatggtcaccagaatctggtgattcacttagtggtgaaaatcttgcaagactagatacgagatcgccagatcggttggttggcgagctacattttcttgatgatacgataacattgacgcctgaggagctctcaagggcccctgctgaagttttaggaagaagtagtcacggtacttcttacaaggcaactctggagaatggtttgttgttgagagtgaagtggttgagagaaggagtggcaaaacagagaaaagaatttgtaaaggagacgaagaaatttgcaaacatcagacatccaaatgttgtaggattgagaggatattattggggtcctacacagcacgagaagcttatactttcagattacatctcactaggaagtcttgcaagttttctttatgatcgaccaggaagaaaaggtccaccactaacttggacccagaggctcaaaatagcagttgatgtagcacgtggcctgaactatctccattttgatcgcgctgttcctcacgggaatctcaaagctacaaatgtgttgttagatacaactgatatgaatgcacgtgttgccgattactgccttcaccgactcatgactcaagctggtaccattgaacagattctcgatgctggggtcttgggttattgcgcaccagagttagctgcttccaagaagccaatgccctccttcaagtcagatgtttatgcttttggagtgatacttttggaacttctaactggaaggtgtgctggtgatgttatatctagtgaggagggaggtgttgatctgacagactgggtaaggttgcgtgtagcagaaggccgaggctcagaatgttttgaggctaccttgatgccggaaatgagcaatccagttgtagaaaagggaatgaaggaggtcctgggaatagcaatgcggtgcattcggtccatttctgaaaggcctggtatcaagactatttatgaagatctctcttctatatagtctgctcatgctaactgtttgaactttgacatattgtgggaattaatgtctcattagtgtcccatagttgttcagagcctggccttttaacatgtttgtattaaccatttttttagctgtaaaaatggggctgtgccaaaagcatatacatggatgatggatgttacttgatgggttataaccatctaattttgtctcgaaatggtatgtgttatgaatagtcatttgtttgccagtactataaaaaaaaactgtccaagttggtcatgtaaacgttagcacttagcagttatatttttttgttgatttaattgatcttttttagagttgatggccaaagatgttgaacatagttctccgcaaactcagctggttttcactttcaggaagttgcgtgccactaatgagtaacagtagctgttactattgtcatgtaatcacaatggttgtggaagccatgatttattaaattcaatctttgcctgtgttgatt

SEQ ID NO: 51308 - DNA, 471 bp, Glycine max
  Clone ID: PAT_MRT3847_17345C.1
tacggctgcgagaagacgacagaagggcatgaacaaaataaatgaataatacagtgagaaatttatccttttaaacagggcattcaagtcaaattaatcagatataaaatagcaagacactcaaacattccgagcgataattaaaagtgaaaattgacagatttttcgtgaagttttacgaatttgaagctgtctgatggatgagtttcatgttttttcttttcaaaggaacatatatacagctgtaatgcatggtaagcgggaaaggaaagtttatatagtttttaaaagaatttaacaaacgagtattattggtgtaaaagttttcacatcattaattaattaaaaaatacttttaacaattttaaaacaattactataaaaactaacaagcttattatacatatatcttgtgaaccaaaataatattgttaatctaaataaaaatgaattgaaattttttaaataaaa

SEQ ID NO: 51309 - DNA, 399 bp, Glycine max
  Clone ID: PAT_MRT3847_17346C.1
ttcacttttgcgcggagaacaccattgacgtgtgatccttgcaagagaagctcttgtcaatcctctattgaccgaatccgatgaggaactctcttgggcaactctatagattggatcacactcatacaaaagttctacattcagtaacattgtgagagtatgcatgcttgaaagaaaggctgttccatgttgagattgaaatgtctgaaactgcaacagttaaatcgagtgattgggcctcagtgttactagtgtttttcacacacaggtgctgtacagagccttctgactcttgtatgtggacattttcgcaaccacgctcctgggaaatgaacttcccaattaaggtgtttggcactaacaatgtttctgaaaagtccagtccttaatgggcatatg

SEQ ID NO: 51310 - DNA, 181 bp, Glycine max
  Clone ID: PAT_MRT3847_17347C.1
gtatccctatcatcactacatacgcggatacagtctgtcaaatcaatcatctctctctctctgtcttactgcctccttagcgaaacttaatatggcccgttatactttcctattcacatctgaatcaatggaaaaggagcacccagacagactgtgtgaccagattcccgatgctgtgctc

SEQ ID NO: 51311 - DNA, 894 bp, Glycine max
  Clone ID: PAT_MRT3847_17348C.1
aatatgaatggaaacaataattacttggctacaaattgttcttaaacattgccatcaaaatgatgagatcaaaacttaaaagacaattgagacttcagagaaaagtatttatcatactcaaccaccaactagcaggaagaaaatggggaaagaagatagattgggttaaaatatgattctgttataatatggtagagattaaaatatgattctgttcaccatattataacagaatcatatattatcatatctcccaaatcgctatcatatctcaacaaattgtaacagtacttaggcaattaaatgtgtcggaatacataatcacattcacacaggaaattttccaaattgtgctctatttttataataatgttgttcaacaaatagtggcagagaagaaaaggctataaacctttaaaagatcgatttcttatctgcctgattccttaagttcttcgaacgtatcaaagactatcaggaaaaagttgggtaagtagaaattttaaaaaccagcttttgttcaaaatatagtcagtctagacagacaagaaatgagcatcattcccatgtgctcaactaattaaacaaaatctagtttgcagtggaaaaaagtattcattgtattataaaagatccaaaggacatagctaaaaggcattttatacgtggaaaagagaaacccagatttagtgttgtgtatcataatgcatcataatgaagaagaccaacaattctcctcttcatttctctactttgatctacaccacgtttaaccactggtaattgcttaatgtccttggcctccatcaactctttggccatagccaaactagtatttggatagcaggttaagattcctcgctctcgtccactagctcatccctcgctcgagcc

SEQ ID NO: 51312 - DNA, 733 bp, Glycine max
  unsure (1)..(733): unsure at all n locations
  Clone ID: PAT_MRT3847_17349C.1
ctgcaggntaccccggtnccggnaannttcccgggtcgacccacgcgtccggtggtctatgttcttcttctacccttcgcgaatggattctttctctccctttttcgcgcattcgatccgtgtatttcacgccttgtgtttagcctctcaccccaaagcacttcatcacaatgcaaatcaccaaatcttcgtgtttttttttattcctctattgtcatgaatttctctagaggtgtgggcattcggcgccaagtatggccacccaaagatgttaaatctcatgatacagcacccctggatcaggacaacaggtttcaagcctcaagattcaccccattattcgtatcttatcctatactgcacaatcacctaaacggtctaattgggcctcattacttacctgcaatgctgcttcaagacaaaacaatgccctagattaccgcgaaaaagagagagagaanaaaagtaaactcgaaaatgcttaagtcaaagccaatagatgtgaatgggaaatggcgataggggcaatattggcataaggagcgtaacgctcactcccttctctcgtggccctcttctcttctctcaaaggactgaacgaaaacctttaggggtcctctgttcttcttcgccccaaanaaaattctcaggctcagaanaattcaacccgttctcgccattgcccaagctccagcccctcgcatttcaattcttcgcccaaacccttttgttg

SEQ ID NO: 51313 - DNA, 343 bp, Glycine max
  Clone ID: PAT_MRT3847_1734C.1
aacacccattaattattaaaatataaaccccccacaagggaaaaaaacaaaactcgggacagaaccaaccccaatgcataaaaaataaaaagaaaaactggtttactttaaaacatcaaaaaaccaaaaatttcaaagacatatcaagaccaagtaaaaaaactaatccaaaaaaaaaacctgggcaaaaaaaaaaaaaaaagtccaaccaaaattagggaaagagttccccaagctgaaggaacaggggaatccttgaccgagctacgccaaggggaccctttagaaccaaactgggccaaaaatataaaaaaaaaaagggggcgggccaaaaacaagcccc

SEQ ID NO: 51314 - DNA, 759 bp, Glycine max
  Clone ID: PAT_MRT3847_17350C.1
ccactgcgtccggctcgctcctctacggcatatcctttctccttcttcctgtatcctctgacttaatttactacaaacaggcaacaaggctcaaggaattagtattgtttccatcatgggaatttgtttgagcacccaaattgaagctgggctgaattcaaagcatgtgagtgtcgatgcaaaagatctcagcagtccaagcagtaaaattacaaaagatctcagcaatccaattagcaataaaattacagaagatctcagcacaccaattagcaataaaattacagaagatctcagcacaccaattagcaataaaattacagaagatctcagcacaccaattagcaataaaattacagaagatctcagcacaccaattagtaaggtctcagagatcttagtgcctctgactcctcagattgagggtgagatcttgcagtcatccaatctgaagaactttagtttgacagaactaacagctgccacaagaaatttccgtaaagacagtgtgttaggaggagaaggtgattttggatcagttttcaagggctggattgataaccactcactggctgctgcaaaacctggcacgggcgttgttgttgctgtgaaaagacttagtttggatagcttccaaggtcacaaggatcggttggcaaggcacggtatgactcatgaagcaagtctcgaggctgaagtgaactatctaggccagctttctcatcctcatctagtgaaattatttgggtattgctttga

SEQ ID NO: 51315 - DNA, 461 bp, Glycine max
  Clone ID: PAT_MRT3847_17351C.1
tcggtttatttgagttcggctgcgcacaatgcgtgcgtggagcaatacactgacacattttataccgaggaaagtatgcgtgtgagttacgaatcgatgcatgccgaggcatttttgacggcattggtaaacacgcggcagaccggacgaagttatgtgggagagttcgaagttgccaattactccaatcatgccaatgatatgtattttttcattgggttgcaccaaattccgatggaccgactcgacctgcgattgatggattggtattacccgcaaatgatcaaaaacttcgtgaaaggaaaagcgcccgacattgggtggaaaccccaaaattggaacggacgcaattactttcgcatcactttcaatgtcagcgacaacggcactctgacggattggccacacggagtggacggataccaggacgtggctgggcttgacttttggcttcacgaact

SEQ ID NO: 51316 - DNA, 448 bp, Glycine max
  Clone ID: PAT_MRT3847_17352C.1
gatttatgcttttttcgtgatcacgggatgtggtgccttttaactggggacaaatgcagtcggtacttgcttccaagaagcttttaatatgtttctacctttctgtgaacgatcagtcaatgtatagataatcactctatgtgctggtcacaacctcatgaaatttttttcttttccactcttagttgatttgctggacacgctcctattagatataggattgcgagtcagacttaaacaatttctgtcagtttgtcaaagctatgttcaatctcaagcacaagctgtggatgatgggggttcatactcgcactctactatgtgtgataggatagcgtggacagacccaggtaattctgtccttggtgtcactctgtcattctcactcatccggagtgcctttcggagcggtcttattatgacaacacttgggcgttggggcacaagt

SEQ ID NO: 51317 - DNA, 250 bp, Glycine max
  Clone ID: PAT_MRT3847_17353C.1
ggaattgttcattcagatatgtggtcccttgatcctaaaacttgggaatggaacaaggttaagaaaagtggaatgcctcctggtcctcgtgctgggttttccatgtgtgttcataagagaagggctctgctatttggtggtgttgtggatatagaagttgaaggtgatgtaatgatgagcttgtttttgaatgagctttatggactcagttagacaccaatcgctggtatcctctggagttaagaaagga

SEQ ID NO: 51318 - DNA, 613 bp, Glycine max
  Clone ID: PAT_MRT3847_17354C.1
ttcggcacgaggcctcgtgccgaattcggcacgaggaaactcctctgatgaggctgaatgctctggatccgaccaagttaaggagtatattgaaaatgtccttggacccaacgctgctgagctcgtctactggcgtgacgtgaagaactcgggcattgtctttggcagtggcctggtcattctcctctcactctccatcttctcggtcatctctgtggttgcgtacacacttctctttacccttctgggcacactttccttccgcatttacaagaatgtcatgcaagccgttcataagaccgatgacggacatccattcaaagagtaccttgaaatcgaaattgctccaccacaggaacgaattcatgaaatagtcgattcagttgttgctcacggtacctgcttcattaaccgaatgcgaagtgttcttctggttgaggacattgtcgattcactgaagtaccttcttatcttctgggctctcacctacattggagcctgtttcaatggcatgaccttaattcttttggcctaccttggtgcattctcgcttcccaaggtttacgagctaaacaaggttcagattgaccagtacctggatctggcaaacagt

SEQ ID NO: 51319 - DNA, 324 bp, Glycine max
  Clone ID: PAT_MRT3847_17355C.1
aaaccaaccttaaaaggtcattttttttaattttgcgaaatttaccatttattaagggttgatagtggctctataataaaaatattcccctttttttggtttttaaggaaaataattttacggttttttccaccagtaaaagtaaaaggaaaagaggtcgaaccaaacccctgcctttgaagttgcccttgcaaagccacggtattaaatgagattttcccccccattttaccccaggttaaaaataaattcatacccgtcgaaacttccaagcaggcttaccggcaccgttaaccgtttggaaaaataggctagttttttaac

SEQ ID NO: 51320 - DNA, 126 bp, Glycine max
  Clone ID: PAT_MRT3847_17356C.1
cttaatacagcctatgactcatgacaggaacaaacacgctcctctcctccataaccaaatccccggggctgggggcatgactgtggagcaaatcatgctaaatgtacttcttcacaaatccaatat

SEQ ID NO: 51321 - DNA, 1749 bp, Glycine max
  Clone ID: PAT_MRT3847_17357C.1
ccacgcgtccgccccctttggttgcacccatggaagaggatgcctattatcaaccccaaagtatcttatctgcatctatggacaagactatgatgatctggcaacctgaaaagacttctggtgtctggatgaatgtggtcactgttggggaactaagccactgtgctctggggttctatggtggccattggagcccgaatggagattcaattttagctcatggatatggtggatctttccatctttggaaaaatgttggtaatgataattggctgccacaaaaggttccctctggtcattttgcatcagtgactgatattgcatgggctagatctggtgattatattatgtccgtcagtcatgaccagacaactagaatttatgctccatggaaagttgaggctcctctccaagatggagaattttggcatgaaatatctcgccctcaagttcatggacatgatataaattgtatggcagttattcatagtaaggggaatcatcgttttctctgtggagctgaagaaaaagttgccagagtatttgaagccccattatcatttttgaagacattaagtaatgccactttgcagaagtcctgttcttccgatgatatcatgggagatgttcagattttgggtgcaaatatgtcagctcttggactatcacagaaacctatttatgttcaagctgtgcacgaggcccctgaaagaagtggggtcaatggcctcgacacccttgaaactattcctgacgcagttccaactgtgttcactgaaccaccaattgaagatcaactagcttggcatacactttggcctgaatcacacaaactctatggtcatggaaatgaactattttctttatgttgcgatcataagggtgagcttgttgcttcttcatgtaaggcccaatctgcagcagttgctgaggtatggctttggcaggtgggttcatggaaagcagttggccacctgcaatcccacagcttaacagtgacacagatggagttctcacatgacgacaactttcttttgactgtctcaagggatcgccagttctctgtcttttctatcacaagaacaggcaccggtgaaatcagttatagtcttcttgcgagacaggaggggcacaaacggattatctggtcatgttcttggaatccacatggtcacgaatttgcgacaggttcaagggataagacagtgaaaatctgggccatagagagggagtctgtcaagcagcttatgtctttacctcaatttacgagtagtgtaacagcattatcttgggttggtctccatcatcggaagaataatggacttctagctgttggaatggaaaatggccaaatagagttgtggaatctgtcttataacagagcagatgatgggagcatagcagcaccaggtttggctgcttctcttgcagtacgtatagatccttttatatgccatgcatctaccataaaccgtctagcatggaagaaaaatgaggatgatcacatgagtatgcaacttgcttcatgtggagctgataattgtgtgagagtgtttgatgtaactgttgagtaattagattattgtactgtaccccttcttttttgatatatctgtagaatgattttttgatcctcatagctatggctaagaaaatttgtccctgcttgcattgctcttctccagaaatacgaattattattgttaggtattgttagcaatgtctttttttggctaaataagcagagtt

SEQ ID NO: 51322 - DNA, 248 bp, Glycine max
  Clone ID: PAT_MRT3847_17358C.1
agcacgtaattcggctcgtggagtaccagacttttggtccaaaccaaaaaaaagcacccaaggggaagttttaattaaaaagacgttgcgttaacaccaaaactgatccactgggatggaacaccccaaagcaaactgaccaacggggcaaattacacgaacggccaacccacatgacaagacaaccgcatctgtcacctcattgagacaacacggccaccaacatctccccagaacacgaacagaca

SEQ ID NO: 51323 - DNA, 418 bp, Glycine max
  Clone ID: PAT_MRT3847_17359C.1
gtttggaatttttgaagcgtaccggatttttttgtgatatcatttgtgtctctggatggactgccaccccactgcaggatgttcaggttacaattgatttggtttattgtactctcaggaatgcgtccccagcacctattgtgtcttaaatccacaaaatcctctcgtgttcaataggtggatggggaaactgactttcccccacggcacttccctgagagttaaaagaatgcccctttctatactggcgaggacgcatgctgcaaagaatgctatcctcatgaatatgccaattgctgtactttcaatgtggcgatatcttgttggagattctcgtctctgaagtctcttagatgacttctgcctacattaaatgctcagtctctttctttatagcatttggaaatttggctgatga

SEQ ID NO: 51324 - DNA, 617 bp, Glycine max
  unsure (1)..(617): unsure at all n locations
  Clone ID: PAT_MRT3847_1735C.1
ccacgcgtccgctaaacgttttgtccataaacagcgcacatgctccacatacaaaacccagaccctataccttactccactttgtgcaccctaaatggcctctgccacagccactgcgctgaggctgcaacccattatcaaggtggctacaaggactactaaccatggagcgttacagaaccttaaggtacccggcagctgatgaggaatggaataatacaacctctgcctctgtgagagcctcccgctcacgcacttgtgcagctccggcccaacgcagactacaacgcacaaggacggacatattgggaggagacatcctgctgtagcctgctgacactgagcttaccccagacagcctagctctatgacttgcgcagctgagtcccgttgacacgcanggaaatagtcgagcgtactaaggaggaaagagtcaagccataggtggagaacgcagaacggaccgtcagaccaacggaaccgatcaagaagctcatgacagatatcagaagctggctgatgacactggtgatactagaaagnangaagatgccattgatggtgaagacaacagatgggagactcactagagcatctgagcgaggtgaactagcaac

SEQ ID NO: 51325 - DNA, 526 bp, Glycine max
  unsure (1)..(526): unsure at all n locations
  Clone ID: PAT_MRT3847_17360C.1
gtttttctaacccaagcaaatacatgcttgcattgttatgtaaagatgattgcactcaaatcccttcatcctttcttcactcctaccaatatcaaatatggtatcaaccgaagcagatgcctcaacacaaaaggttctgttttgtgcctctgcaagtccaatgaatctgaatctcaagctccccaaccaggagatattcgtaaacaagaactgctagcccaaattgccatgcttcaaactcagaaagtccgtctcacagattattttgatgagagatctgaatacttaacccagtttggtgaagaagccaaggccgagtttgacaagattggaaaagatgccctccaaggattagatgaagctagtgccattgtatgcttcaacttttgagctaacaatgtagtgtatttttggtttttgcatttggaaagtctcaaaccatggttttggtaaaaagtctgtctntttgtgccgtacacactagcccatcaatcatcaagcacgggcatggaggaaaatcgatatg

SEQ ID NO: 51326 - DNA, 330 bp, Glycine max
  Clone ID: PAT_MRT3847_17361C.1
gggaagccaaaagacccccctttgtttttttaaaattaaaaacaggttttgcaagaaaacaattggtggtttttgcctaccaaagatccttaaaagaaacaaacattttcaactcaaatggtggcctggccgacaattaagcaaacaaccaaaacccatttttaatcatttgggggccccaactccagtcccacttttgggggggagctttgtccacttggtttgaaaagccccggggggatcaaccctttctttagtttgcgccccaaacaagtccctttgagcctgaacaaggtttggcgggagccttgccctccggttgggtttaaa

SEQ ID NO: 51327 - DNA, 266 bp, Glycine max
  Clone ID: PAT_MRT3847_17362C.1
ccacaaatactgtcctgatctttattagaatagatctaaaatatatgtattggggggagggggtttggatggcctgctcactttaggacacgcctttcccatccaggaatggcacgtgcactgacggcggagactcgtacatggacccagagccatacaatgacccttcctatcttgaaattgaaccctttcataccacatctgtttctggtgtaccacccccccccccccgatagccggaaccccccctttttgaaccccacccc

SEQ ID NO: 51328 - DNA, 334 bp, Glycine max
  Clone ID: PAT_MRT3847_17363C.1
caaacaaaaacatgatcttgaaaaaaaaaaagctgaggttgctaggattaggaaaaaatacccaaacaggattccggaaatggggaaaaaggccaaaaaaagggacatcccaagaattgacaaaaaaaagaaccttgtccctgctgacttgactgaaggacagtttgcctacgggatccgcaaaaggattaaattaagggcaaaaaaggcaatcttaatattgggggacaaggtccttcctcctacaggagcaataatgcctgccttatatgatgaaaaaaaggacaaggatggatttctctatgttacatacaggggcaagaacacctttggg

SEQ ID NO: 51329 - DNA, 520 bp, Glycine max
  Clone ID: PAT_MRT3847_17364C.1
gttcttttttttaaccatggcatacaaatgcatatttgtaatacacaaaccaatatatggatcgatcgtacaggacattccaaatcaaactattgatcctaaagaataacagacaatacagtcaactacatttgtgctcttgtgaggggaagagaaggaacaccaaaatattctcgttacataatccaaatacatgtgatatacaaagaaactttaaggccataaatttattgggaatgtaaatataaatcacatgctttggaaagcttatccttttaaagcaccgcatataatgcttgcatccttacagaagaagatcctttagcattttcagaactcaatcagttaggctagaaaggagctacacgagtgtttgactattacttctcatttccaatttggattttggctagataacagttaaatcaagggtcagcactgatccaattggaagtcatgctaggcagtgtagatataataatgatctcagctatgtgaattcaatgtctacaagaggatc

SEQ ID NO: 51330 - DNA, 2708 bp, Glycine max
  unsure (1)..(2708): unsure at all n locations
  Clone ID: PAT_MRT3847_17365C.1
acggctgcgagaaggttacttattggagtgcaaaaagaatatggatgctgcagcagaatcaactgctgccacagaagaagtaattgaacttttatttaaaacaatggaatctttaaatgttttgagagaaactattgtaaagggacttgaaagtggcctcaggaatgatgctccagattctgcaatagctatgcgtcaaaagtggcgcctctgtgagattggacttgaggattactcattcgttcttttaagcagatttctcaatgagtttgaagttatgggaggtgctcatcggctggctgaaagcattcagtcaaaaaatctaaactcatggaatgatccacttggagcacttattattggagtccaccagctgaagttatctggttggaagccagaagaatgtggtgctattgaaaatgagctcatcacctggagtaaaagaggcctttctgaaacggaaggaaatgaagatggcaagactatttggacattgagactgaaagctactcttgatagatcaaagaggctaactgatgaatatactgaagaacttcttaacatattccctcagaaagtccagatactaggataagccctaggaattcctgaaaacagtgtcaggacatatacagaagctgagattcgagctggtgtgatttttcaggtttcaaaactatgtactcttcttctaaaagcagttagaaacacacttggttctcaaggttgggatgttcttgttccaggaactgctttaggaaaacttgttcaggttgaaaaaattgttcctggttcactaccatcatcagttgaaggacctattatccttgttgttaacaaagcggatggtgatgaagaggtaacagctgctgggaggaacatagtgggagttatacttcagcaagagctgcctcacttatctcatctcggtgttagggcacggcaggaaaaggtcatctttgtcacgtgtgaagatgatgaaaaggttgctgatatacaaaggctgattgggtcatatgtgagattggaagcatcaactgctggggttaatctgaagttgtcctcttcagttgacatagaagacaattcttccattagaagttcttctgatgactgtgtctctggagttgaggttccttctttttcttctggtagaatctccaattttgatcagggtgcttcttctggaagagttatcttgcttcctgatgcagagctacagacttcaggtgcaaaggctgctgcatgtggtcacttatcatcattgtctgcagtttctgataaagtttacagtgatcagggagtgcctgcttcttttcgagttccttctggggcagttttaccatttggatccatggaattggagctagagaagagcaattcgactgaagcattcaggtctatcctggaaaagatagaaacagccaagctggagggtggtgaacttgatgttctatgccatcaactccaggaattaatttcttccctgaagccatcaaaagacataattcaaagcattgggagaatattcccaagcaatgcacgtttaattgttcgatccagtgccaatgttgaggacttagctggaatgtcagcagctggactttatgaatcaatacccaacgttagtccttccaatccaacagtttttggaaatgcagttagccaagtatgggcttcactgtacactcggagagcagttttgagccgccgtgctgctggtgttcctcagaaggaagcttcgatggcaatactgatccaagaaatgctttcaccggatttatcatttgtactacataccgtgagcccaacaaaccaggataataattgtgtggaggctgaaattgcttctggccttggtgaaactctagcttctggaacccggggtacaccatggcgtatatcatctgggaaatttgacgggcaagtgcaaacattggcttttgcaaacttcagtgaggaattgctggtacgaggtgcagggcctgcagatggggaggttatccgtttgactgttgattacagcaagaaaccactgacagttgactcagttttccgtggacaacttggtcaacgtctttgtgcagttgggtttttcctggagagaaagtttggttgcccacaggatgtggaaggatgtcttgttggaaaagacatctttatcgtacagacaaggccccaacccctgtagagatctcctgtttctctctcgatacggctgcatcgcaccgtagttgctgggagtacacatttaatacaggaagcacatgcttatctattgcaccagagctatgttctccagcatgtacgtgatggaaatggaatgaagttcgacttcgacaaattgttggatatgaaatcagccgttacggttggtctgtctacgattgtatcttgtgtaaactacgtagatttatttcttgaattacatttttgtgacatcatgatatttaaaaagctagcttaatacgcatcaagtgtctaatctcttttattagtccctccatgttgaacacacttttacctcttctgtttttcagaagacctcgtgttcatatctcatttcttatgtaaatgtaaccaataaatatatctttcaccaaggatttccaaaaaaaagaacgaaggccggccaccgagcagtgagctcgtcgactcggttaattnntgcctntcagcnatcctgatctcggctagcgccacgtcct

SEQ ID NO: 51331 - DNA, 539 bp, Glycine max
  Clone ID: PAT_MRT3847_17366C.1
ggctcgagccttcctctccttcttttctcttctttcttcttcttccatctctttttttctgcttaaggtctacaaaagttctcttcttcttctcctcctattgaactttggtcatcacacgagaaaacccacgtctggatcttctggtgtaaaggcccattagaagcctcttagaaattttcaaattgagttggtgtatagtgttgaagggggtgaaatttggagcccagtttgttacttcatttgaaaggtcatagtttgaaccctctttttctggagatttacctgggaaaagatgatgatgtttgaagatatgggattctgtggcgatttggatatgttatgtggttctcttggggatggggatattgctgtgagacaaactgaaccggatcctgtagttgaggatgactacagtgatgaagaaattgatgtggattttcctctgctgtagctaatggatccatggtgatcaacgattgcagtgagtatgatgttgatggggctgaagaagagccgaacttcgatgttgaggaccg

SEQ ID NO: 51332 - DNA, 2500 bp, Glycine max
  Clone ID: PAT_MRT3847_17367C.1
ggctcgagctctttcttcccaccttcctctccttctttctttctgcttaaggtctacacaagttctctgcttcttctccccctattgacctttggtcatcacaagcgaaaacccacttctggatcttctggtgtaaaggccattagaagctttagaaattttctaattgagttggtgtatagtgttgaagggggtgaaatctggagcccagtttgttagttgttactcacttcatctgtaagctcataggttgaaccctctttttttggagacttacctgggaaaagatgatgatgtttgaagatatggggttttgtggcgatttggatatgttatgtgtttctcttggagagggggatattgctgtgagacaaactgaaccggatcctgtagttgaggatgactacagtgatgaagaaattgatgtggatgaacttgagaagaggatgtggagggacaaaatgcgtcacaagcgattgaaagaacaaaccaagtccaaggaagggactgatgcaacaaagcaaaggcaatcccaagagcaggcaaggaggaaaaagatgtcaagagctcaagatggaatactgaagtacatgctgaaaatgatggaggtttgcaaggcacaagggtttgtttatgggataattcctgagaaggggaagccagtgactggagcatcagacaatcttcgtgaatggtggaaggacaaggtcaggttcgatcgaaatggtcctgctgccatagtgaagtatcaagctgataatgcaatccctggaaagaatgatggatgcaattccattggtccaactccacacaccttgcaagagttacaggatacaaccttgggttctctcttgtcagcacttatgcagcactgtgatccccctcagaggagattcccattagagaagggtgttcctccaccatggtggccaactgggaatgaagaatggtggcctcaaattggtctacctaaagatcaaagccctccaccttacaagaaaccacatgacctaaagaaggcatggaaggttggtgttctcactgcggtcatcaagcatatgtcccctgatattgccaaaattcgcaagcttgtgaggcagtctaagtgtcttcaagacaaaatgactgcaaaggaaagtgcaacctggcttgccatcatcaaccaagaggaagccttggctagagagctttaccctgactattgccctccattttcctctgctggaggtaatggatccttggtgatcaatgattgcagcgagtatgatgttgatggggccgaagaagagctgaactttgatgtggaggaccggaagcctgaccatcttcttccatcaaacctcgggatggagagaatgaggggaaggatgccaattcagcaaccttctcatccaatgaagggagatgttgtcacaaacctagatttcatccggaagaggaagatttctagtgacttcaacatgatgatggatcagaaaatatacacatgtgagcatccccaatgcccttatagcgaagttcgccttggtttccatgataggtctgctagggacaatcatcaattgaattgtgcatacagaaacagttctgcagattatggtggtggtcccaatttccatgctactgaggataagccagtcatattcccccagtcctttgttcaacccaacactacaacacagtctgcaagtttggttgcaccttcatttgatctaactggtcttggagttccggaggatggacagaaaatgattagtgaccttatgacaatctatgatacgaatgttgtaggaaacaagaacttaagttcctccaactgtgtagctgtagaaaatcataacctttctcaggccagcttacaacaacaagaaagttatttccctggtcaaggaatggtgttggaagggaacttctttgcacgagaggaaggtcaatttgaccggttcaaggccaccatgaacatgaacactcataccccttttgataccaaccatagcaacaataataatatccatttgatgtttaattccccttgtgatttgtcatcctttgatttcaaggaggatatacaaggaggagtaggaatggatcctcttcacaaacagcaagaggtttcaatttggtaccagtgaaaatgacaagaggggaaactcgtgtatcaagggcttttattgtgtcattaaaaggggacatgtgaaagtcccttgactcaaaaggcagttaatgcatttttcttcccatgtaatcgtttaggtctttagatatttttatgctttggcaggtctggtctggtggtactatattatgggttaataaatcatgggtgttcccataatgtaacccttttaatgtgtgtctttatgtgttagccctatgttgttacttactatcatatatgtacgactgtgacataaataaaagatttttattctcttataaaatcatatttccattgctacattcatagttaacgaatctgaatatatggctcttttattat

SEQ ID NO: 51333 - DNA, 2616 bp, Glycine max
  Clone ID: PAT_MRT3847_17368C.1
cgtactcgtgggtttttatcaatgttttaatcccaccaataatgaatgacacccccacttcacgttcaccaagagcacaccaccatgaccaataataaaagcaagataatgctcaacactctgttcctttcctcactcactctttcttcccaccttcctctccttcttttctcttctttcttcttcttccatctctttttttctgcttaaggtctacaaaagttctcttcttcttctcctcctattgaactttggtcatcacacgagaaaacccacgtctggatcttctggtgtaaaggccattagaagccttttagaaattttcaaattgagttggtgtatagtgttgaagggggtgaaatttggagcccagtttgttacttcatttgaaaggtcatagtttgaaccctctttttctggagatttacctgggaaaagatgatgatgtttgaagatatgggattctgtggcgatttggatatgttatgtggttctcttggggatggggatattgctgtgagacaaactgaaccggatcctgtagttgaggatgactacagtgatgaagaaattgatgtggatgaactcgagaagaggatgtggagggacaaaatgcgtctcaagcgattgaaagaacaaaccaagtccaaggaagggactgatgcagcaaagcaaaggcaatcccaagagcaggcaaggaggaaaaagatgtcaagagcccaagatggaatactgaagtacatgctgaagatgatggaggtttgcaaggcacaagggtttgtttatgggataattcctgagaaggggaagccagtgaccggagcatcagataatcttcgcgaatggtggaaggataaggtcaggtttgatcgaaatggtcctgctgccatagccaagtatcaagccgataatgcaattcctggaaagaatgatggatgcaattccattggtcctacaccacacaccttgcaagagttacaggacacaaccttgggttctctcttgtcagcacttatgcagcactgtgatcctcctcagaggaggttcccactagagaagggtgttcctccaccatggtggccaactgggaatgaagaatggtggcctcaaattggtctacctaaagatcaaggccctccaccttacaagaaaccacatgacttaaagaaggcgtggaaggttggtgttctcactgcagtcatcaagcatatgtcccctgatatcgccaaaattcgcaagcttgtgaggcagtccaaatgccttcaagacaaaatgacagcaaaggaaagtgcaacctggcttgccatcatcaaccaagaggaagccttggctagagagctttaccctgattattgccctccattttcctctgctgtagctaatggatccatggtgatcaacgattgcagtgagtatgatgttgatggggctgaagaagagccgaacttcgatgttgaggaccggaagcccgaccatcttcatccatcaaaccttgggatggagagaatgatgggaaggatgccaattcagcaaccttctcatcccatgaagggagatgttgtcacaaacctagatttcatccggaagaggaagatttctagtgacttcaacatgatgatggatcagaaaatctacacatgcgagcatccccaatgcccttacagcgaagttcgccttggtttccatgataggtctgctagggacaatcatcaattgaattgtgcatatagaaacagttctgcagattatggtggtggtcccaatttccatgctactgaggttaagccagtcatattcccccagtcctttgttcaacccaacactacagctcagtctgcaagtttggttgcaccttcatttgatctaactggtcttggagttcctgaggatggccagaaaatgattagtgaccttatgacaatctatgatacaaatgttgtaggaaacaaaaacctaagctccaccaactgtgttactgctgaaaatcataacctttctcaggccagcttacaacgacaggacagttttttccctggtcaaggaatggtgttggaagggaacttgtttgcacgagaggaaggtcaatttgaccggttcaaggccaccatgaacatgaacatgaacatgaacatgaacactccttttgataccaaccacaacaacaataatatccatttgatgtttaattccccttgtgatttgtcatcctttgatttcaaggaggatatacaaggagtaggaatggattctcttcaaaaacagcaagaggtttcaatttggtaccagtgaaaatgcgaagagggaaactcgtgtatcacggacttttattgtgtcattaaagagggtcatgtgaaagtcccttgactcaaaaagcagttaatgcatttttcttcccatgtaatagtttaggtcttagatattttatgctttgggaggtctggtctggtctggtggcattatattatgggttaataaatcatgggtgttcccataatgtaaccctttttatgtgtctctttatgtgttagccctatgttacttatatcatatgtacgactgtgatataaataaaagatttttattctcttataaaatcatctgctaccttcccagttt

SEQ ID NO: 51334 - DNA, 457 bp, Glycine max
  Clone ID: PAT_MRT3847_17369C.1
aaaaaacagaagcattaagttggaaggcagcctggttattggtgcaatcaatacaactagctggtgacatgacccaatatattggtgggatttgggtatcattattatttttgttattacatacttctttcttacagtgtcatttttctagtaatgatcacccattgtttgctccattttcttgcaatctactcatttgactttttatgcacgatataaaatttcttgtttctctgggtcacgcgtgcaccttgtgatttggatcaatgagcttgaatttgagagttgacattgttctaaatgtttggctgctgctgtttaagtgcttacatgtgttgctttactatttatgtttgacacttgttagtttagtggcgctatcttctcctgtttagcagttctatattcagttaaatgtctctagcaaaatgagcatgcaagattcctcttttttccc

SEQ ID NO: 51335 - DNA, 462 bp, Glycine max
  Clone ID: PAT_MRT3847_1736C.1
atgaaactgaaacttacaggagcctatcatatggtcatatgggtgaccttcgtttaggagtgttcttgttgaggcaacaagtggcaacacgggcattggaatggcattcgtagcaacattaaaggggtataaagttatagtggctatgccagcttctgtgagtcttgagagaaaaattgtacttggagccttcggagctgaggtctatctcaccgaccctaccaaaggaaccaatgctgttcttaggaaggccgaggagatagtgaataacacgcccgggagttatatgctccgccagattgataatcctgctaatccaaaaattcattacgagaccactgggcctgagatttggagagactcgggagggaaagttgatgctttggttgcaggggtaggaacaaggggtaccataacgggtgctggcagattcctcaaggagagaaaccccaatgtcaagct

SEQ ID NO: 51336 - DNA, 148 bp, Glycine max
  Clone ID: PAT_MRT3847_17370C.1
gggtccgtggctcgcagtgggtcatgtgaacgcttatttggagctgtcaaagattcttggtcaaaagggacactttgttacctttataagcagtccaaagaacattgatggtatggccaaaatcccggaaaccttacagccatccatc

SEQ ID NO: 51337 - DNA, 334 bp, Glycine max
  Clone ID: PAT_MRT3847_17371C.1
tcctcatccactttcccgattgaaatgaaagaacagtacagacagctctattctggaagattgccgagaacagaggcatcccaccagacgagagcgtttattttccaatccgagcgatgagagttcccgcatccccatatgctagcattagcaatgtccgccacacatgtaccaacccgaacaccttcacctactaacacacctcggtcctcgacatatgccggagcgccaagccactaacggaagctcactgattccatgcatgacccagttcagaacaaccagctagacctgtatgatcacgttctgccaaattctgaatggtgggaatcca

SEQ ID NO: 51338 - DNA, 204 bp, Glycine max
  Clone ID: PAT_MRT3847_17372C.1
cctcttttaattttttcaatcaaaacatctattaattttcacccaaacaaaatatttgggaaagagggtcccattatccaagattgacactacactactgacttggcttttcaattctgcttccatcaaacaacacatctataacacttgcaaattactaaagcaaaacaacctacagctactcagctgcttaatgaattttat

SEQ ID NO: 51339 - DNA, 268 bp, Glycine max
  Clone ID: PAT_MRT3847_17373C.1
gagcaataaagacaagacactcgcatcattgatgtcttcaatgagtttaatggcgaactcaatatcccacttaacaaacgctggatcccacgtacctaagcctacccttgatgatacggatgatgacttttaatttccgatagagacatatcatgtaccactttaccacctaagccagctagcacagtctcttcttaaagctccagacgctgcacacatcaacggtatattcacctttgccggtgagctatcaagacgtatatgatcc

SEQ ID NO: 51340 - DNA, 926 bp, Glycine max
  unsure (1)..(926): unsure at all n locations
  Clone ID: PAT_MRT3847_17374C.1
ggctcgagatttgatagcttgcttaggtggtgaggagaaaacaattcaatttatggagaacatgagcctaacagaatccagcattcctcttctgaaagaagcctatgcatatggagttgtagagcacccatttcccttaaatatcttcttggaggattggaatctaggccctgagttctatcaatctgtgaaaattggcattgtacaatatatgatactgaagatgatttgtgcaatagtggcaataattcttgaatcttttggggtttatggagaggggaagtttgaatggaaatatgggtatccttacttggcactagttcttaactttagtcagacatgggccctatattgccttgtacagttctatgctgttattaaagataagttgaaaccaatcaaaccattggcaaagtttctaacttttaagtcaattgtcttcctgacatggtggcaaagtgtggctgttgcatttcttttttatatgggagcttttaggggatcattggctcaggagttgaaagcacgtattcaagactacatcatctgtatagagatggctgtggctgctgttgtgcacctttatgtcttcccagcagaaccttacaaaatgggagagagatgtattcgtaacgtagcagtgatggacgactatgcatcgctaggatcgcctctggaccctgaggaagttcaagacagtcagcgctcaacaagaacgtggctgggagcacataataatcagagagaaaaaaatcctatgaaatttacccagagtgttcgtgatgtggttgttggaagcggtgaaattattgttgatgacatgaagtttacagtttcacatgtggtggagcctgttgaaaggggcattgcaaagataaacaaaaccttncatcagatatcagaaaatgtgaaacgccacgagcagc

SEQ ID NO: 51341 - DNA, 277 bp, Glycine max
  Clone ID: PAT_MRT3847_17375C.1
ggtccaggctgtagaaggagtgattgggcctgattggtacaagtgtttggaacaaacaggaacggtacatagcattttgatgcatggaagcggacaaaatcaaaaccacattcctgggaattgatcttaccaatagaggaatgcggtcctaataatgggattgaaatgtggagttcttagtgggcaaatcaaactttatggcgtctgagtttccttattggcgagacaaaacagcatacagtttgtgatatactcttgggaatctggcacgattttg

SEQ ID NO: 51342 - DNA, 616 bp, Glycine max
  Clone ID: PAT_MRT3847_17376C.1
ttccgttataatatactgaagctgagttttgggcattgtttgcagagagatagtcaagttgatgcagcacaactttcacaagttttcaaccccgccaatttacaaggaacagtagtagaattgcttgctatttacggtgtcaggatatcaaaattcaaatataaagaaatgtctattacgttattctatctaactgttggtggctagtacacggtgtgcctttgtgttgagaaagatcaggaattgaagttgccaagtctgcttaatcttgaagacttctgtagttttctcacttgttgatgtcatttgttttttctgtaattgatgtcttcctcatctcggcgaagcattttcacacacatttttgtaagcactaatagtgcaagctgtattaactctttcttcttttggagtactttgtatatagtataagttcaaaacttgtataggttttgtattagtgactggtatcggatgcagcattttaattagtttagaactgggtaaattgggcatctggttattaagataataggatatagccattgttgctaatgatcttgtatgaggaaagtcaattatgatgaaatggacaatttggttatgaatttcaccc

SEQ ID NO: 51343 - DNA, 593 bp, Glycine max
  Clone ID: PAT_MRT3847_17377C.1
gcacgaggttttgtttacaatacagagcttccagcattatttgtccgttttcttacgttggacaccaattaattatgtgacagaacttcttccagggttatttgaggtttgattttgatcgtctgattcggtttcattcgtaaaacccaatcaaaagcgattattggagctgacagtagtgaaattagctactttgatttcaattgcgttttgaaaacaaatgccatggaaattaatagatctgggttgcttatatgcaagcaatcggttcttgtataagaactcaactctatttgttccaatggttaacataagaactttaagagttcataaaaattgagttaatcaaccaactccagcgaagagactgttatattcgtctttttttcattatcgaggaaatagaaaggttagaaaataatttataatttttgaactatacaaataattgtcgtaagatttatacttttctcgtcttttctattaatttttataagtgtaatagtttattattcatatcttttactaccaaaaattttcatttttacaaactaaataagataacactttttatgtgagcattaaactaaata

SEQ ID NO: 51344 - DNA, 182 bp, Glycine max
  Clone ID: PAT_MRT3847_17378C.1
ctcgagccgaataggctcgaggatctggcggtatgaaacttgccgccactgtcaatattacgtaaaagcctgtgatgccacacccactacttacactactaccggcactgagtcaaactcgtgttcactgagtagcgtctgaccagttgggggtatgttgattgatgcgtccatcacttact

SEQ ID NO: 51345 - DNA, 313 bp, Glycine max
  Clone ID: PAT_MRT3847_17379C.1
tctgtttcttctctctctcttaggcatctctaccaccaatgtctacttccaaaagagctcagatgacgggtgggaataccgatgggtgcaatcatattggaaataagatgaaaacgtggcgtggggagtggaaccacacctttcgccattgcaatggagacacttatgacgacatatccataccaaagaggattacgaacactgtgctacatgatgtgaataccctgactccacctacaaaggtaagacactatactcccactcatctgttcagcgcgaacggaagctacactgtatgggccgctccatgaag

SEQ ID NO: 51346 - DNA, 190 bp, Glycine max
  Clone ID: PAT_MRT3847_1737C.1
caggctggactgtgtgacagaagctctcactttggcgctgaaaggcagttcatcatttacgattgctgagtgctatagcagtttctttaccaggacacattagttatagggcatgcaacaactccatcaacaacctgtgttactgctactctatatgcattcgagaggcaattatttaagcatataactt

SEQ ID NO: 51347 - DNA, 383 bp, Glycine max
  Clone ID: PAT_MRT3847_17380C.1
tgactcgtgtttatcataaaaaaatggaagatctatctactgcttttatgtggacaacatgttcatagcatctcaaaatttgttggtaattcaaaggttgaagtcactacttaatggtgaactttagatgaaggacatgtgagctattagaaagattatgggcatggagatcaagagggatcaagtctaaaagaagatctttttgtgttagaaagaatacattttgaaagtgtttaatcattttgggatggcattcacaaaatcagtatgttttcctctaacaccgtccattcgtctatctgaactcaatactactcgatcaaaattagagaaggaatacatgttttgttccttatgcaagtgttgtaagttggctcatatat

SEQ ID NO: 51348 - DNA, 300 bp, Glycine max
  unsure (1)..(300): unsure at all n locations
  Clone ID: PAT_MRT3847_17381C.1
gttcccgggggcacccacgcgtccggagataaggctgccgtgtcnatcttgggggggcgggggcgaacacaacgtggttccatttcgatttctcgggtggcattgccattgccattgccgtgttaattgcgagtgaaaaaaaaagcgaaagggggaaaagtggggatnagcatnggggcgnggattngggtgaggggcaccaantgtgggggggggggcgtatttccaatccgagggggagggggttcctgtcactgtgggggggttcaaagaagggacatcgtgacccanatcaaaact

SEQ ID NO: 51349 - DNA, 359 bp, Glycine max
  Clone ID: PAT_MRT3847_17382C.1
gttacgcgtacggcgaaataaggggaaaaaatggcgtcgctgaaactgcttaagcggctgatcgcaagcatgctcaagtgtggaaaaagaaaggggaggcttgaccccaatgaagtcaacagaaatctctatggacaattctcggcaaaacatcaggaagctcgttaaggatgggtttataattaggaagccaaccaagattcactcacgctagcgtgctcgtaggatgaaggaggcaaagaagaacggccggcactctggttattgtaagagaaagggtacaaaggaagcgatgcttcccaccaagatacttaggatgagaaggatgcgtgtgctcaagcagttgctttggaagttca

SEQ ID NO: 51350 - DNA, 310 bp, Glycine max
  unsure (1)..(310): unsure at all n locations
  Clone ID: PAT_MRT3847_17383C.1
ttttttttttttttttttnnnnnnnnnnnnnnnnnnnnnnnnnnnnnnnnnnnnnnnnnnnnnnnnnnnnnnttttttttttttaagtagaacccctttatttagcatttgtgtagtaatgttgtatcctcagaaaacgagtacaaatcatgataatatagttgcttgagtggtaactctcattaggataatggcaatgtttgtcaacgtcatgacagtgctgagaagccactggagattgatcatcccttatatgaatttgggtcagtggagtatcatattcaggtaaaactcttaacttgctcaaagc

SEQ ID NO: 51351 - DNA, 296 bp, Glycine max
  Clone ID: PAT_MRT3847_17384C.1
ggcagaagtaaggttgcagctcacgcatgctgaagacattgttctaaagatgagagtctgtgtatatcctctcatgcatacaatatgtagaagcaaggccatgtcattcctaggaaaggttgcatctcgaaacaccgactgcatactgtacgactcagtaatgccgtgaagcatcccacattagcggcttgccgttgacacatacaacaccgtgtgcttcggcaccgttcgtgtgcactactttcacacactccgcgactacatctacgctcagatactcagaatagactcgctct

SEQ ID NO: 51352 - DNA, 271 bp, Glycine max
  Clone ID: PAT_MRT3847_17385C.1
gatagtttgagtgctcctgactcagctaccctttaccttggttattcactactggtggccggggaacacatgttgtcaaccagcaccattggctcacttatggcattctactttgtgcactacttggtcttatcaaagatgatagatcgtggatctagccttcattgcacattaactatgactatggctgattgatactacttgatcacattgcatgatacggcaaccaatgcataatccaatgaatgaaagcatcttgcgatggcatctg

SEQ ID NO: 51353 - DNA, 312 bp, Glycine max
  Clone ID: PAT_MRT3847_17386C.1
tgtcggattgagtgtgagggtgccaggttacctattatgctggcacctatatcgcatgattctcttgttaggatggcagtatacaaccatcagccaacatgaggtcgagcttaacgacgaggtggcactagactggcctacagccttaggtccaagctagggaattgctgagaggcccaggaatgggcctagtgtgcactgacctcaccactgggataccacgaacttacagcgatcagttacccacctccctgcatatcaccggtactagcatatggcgtgaacaatcagagcctgtcccgtatgtccact

SEQ ID NO: 51354 - DNA, 315 bp, Glycine max
  Clone ID: PAT_MRT3847_17387C.1
agtggttcaacattgaagacatcatagcgatgttctggcatagcaggctcatgactgggaaaaacatgctgcttatgaaggtcgcaagggccaaattcgtgccaccggccacaggtattgtactagggataatatcttcgcacaaatcacatgccttacactaggtgaagggggtgatagcaaactctatactggaggatagaggtttagagtttaagcatgacactgacatagcattagtctcggttgaaataatgatggtcactaccgccatgaggacacggcgaattgctgaaccatattgcacatgacatc

SEQ ID NO: 51355 - DNA, 1137 bp, Glycine max
  Clone ID: PAT_MRT3847_17388C.1
ggggggctgaagaaatatgttgatctaatttaagttatcagatgaattgagatctttacagggaaaaaaaatagttttatttgtttgaacggaatctgaagaagggttcaattttaagtgaaattggatggttaaatctagaaaggctttgtcttttgttggatggaattcgctgactatcatgttcttcttggaggttttatgtggaggaacattgaattatttaagagaatgttaaatgtgatcgattttcttgaatggccctctcggcattcagctcgacttcaacggggcgcaagttggtggtggtttcgtcgaccccattaccattaagaaaaatattcatggaattctaaatgctgtgagttggggcgttctgtttccccttggagtgatcatagcaaggtatatgagaactttcccatctgcagatccagcttggttctatcttcatgttggttgccaggtatctgcttacgccattggggttgctggctggggaactggcatgaaacttggaagcgaatcagtggggattcaatatagaagtcatcgctatattggaattgccctcttttgttttgcaacactacagatttttgcattgttcctgaggccagtgaaggatcacaagtataggtacatctggaacatatatcaccacagcgtcggatacagcatagttatcctgggaatcatcaacatcttcaggggctttagcatcttgcatcctgatcagaaatggaaatcaacttacactgcagttcttattgcacttggtgcagttgccttgttcttggaagtgatcacatggattgttgtgttgaagagaaagtcttacaagtccaccaaaacctatgatggatacaacaatggacaatctagggaagagccccttaacatataaaaatagagtgaacaaatttggcttggatgtgttttacttcttcccctccctctttcccgtccccttcttttacctttttttcttctatttatgacatatctttgtataatgcttgcgtatataatatagatttttcattctgtctttaaataggttgaagaaaacttttaccattgaaaacttattcacaagaggattgaattatgttctctccgtgcgggtgtttcttt

SEQ ID NO: 51356 - DNA, 657 bp, Glycine max
  unsure (1)..(657): unsure at all n locations
  Clone ID: PAT_MRT3847_17389C.1
gcgcaactagttatagtgcaagaactttgaagtaaaacctagatctgttggttgttccttgcgaggtacctaccgaagttatagtagaggaaagaagagaaaggaagcgggaaaaagcatagcacaccaaattgatgctctgctcttatgttcggacccgtgaatctgtaatcactttctctcagcttcctgcgttaggttttcttcatcnttttctattgaagaaaaaaaaactagtttttgtgattttgaagaaattattaaaatttgatcttgatgtagctgattttttttattcgacgattttgcatttctttgttatttttagacaagcaggacaaatgaagtgatgaataggcaatgtatatggttaatttgtatgggactgcttttctgctgaagatagaccttgacaaggaaatactatctcggtattttactaccccgtgtatttggaataatctagattcttctgactgttttgatttttgaaactatcttagactcttagtcaccgtggcattggtgcatggtatctccttgaaatgatatatgggtttgtatttagtagtggtttctgaacctagttacactttgtgtgantaaaatttgaggaacatgcattgatatatacataaaccataagtataagtatgt

SEQ ID NO: 51357 - DNA, 433 bp, Glycine max
  Clone ID: PAT_MRT3847_1738C.1
agacaaatcacttttaccaagaaaaactcaaaagtcacttcatcgccaaaatgactaccgagcagaccttcatcgctgtcaagcctgatggtgttcagcgtggcctcatcggtcccatcatcacccgcttcgagaaccgtggcttcaagcttgcgggtatcaagatggtcactccctccaaggagcacctcgagaagcactacgccgacttgagcgacaagcccttcttccccggtctaattgcctacatgggctctggccccgtctgcgccatggtctgggagggctgtgacgccgtcaagaccggccgctccatcctcggtgccaccaaccccctcgtcttcagccccgggaccatccgtggcgactacgccctcgacgttggccggatcgtatgccacggctgcgactccggtgagaacagcaagaagga

SEQ ID NO: 51358 - DNA, 626 bp, Glycine max
  Clone ID: PAT_MRT3847_17390C.1
aaagacacaatgaaaattttatattttatacgcaagcattatacaaagatatcatatgtgtcatataaatagaaggaaaaaaaagggggggaaagaagggaaaggggaagtagaacacattcaagccaaatttgttcactttatttttatatggttagggggtcttccctagattgtccattgttgtgtccatcataggttttggtggacttgccagactttctcttcaacacaacaatccatgtgatcacttccaagaacaaggcaactgcaccaagtgcaatgagcactgcagtgtaagttgatttccatttctgatcaggatgcaagatgctaaaccccctgaagatgttgatgattcccaggataattatgctgtatccaatgctgtggtgatagatgttccagatgtacctatacttgtgatccttcactggcctcaggaacaatgcgaaaatctgtagagttgcaaacgaaaagaggaagattccaatatagcgatgagcactgtattgaatcccctctgattggcttccaagtttcatgccagttccccagccagcaaccccaatggcgtaagacgatacctggcaaccaacatgaagatagaaccacgctggatctgc

SEQ ID NO: 51359 - DNA, 1455 bp, Glycine max
  Clone ID: PAT_MRT3847_17391C.1
atgttgtctattgtcaggtcctagcttcactttgttcattttaagacatatttcacattattactagttcataaacgaatatactaagcataaacaaatccaattccaaaatttgagaaacttggaaaacaacaacataacataaacctatcaacaccacgcgcaactcttgattaccgttacattaatcggaactcaacccataaaaatgaagcaatatactctccattttctaatatagtgacacaataacaataataataatggtaaatgtctccctcaatttcacaccatctctgcaaaaggagagtgaaatttcaagggaccaaaattacagggcagaaggggcaggtgctgatgcaataatggcctctgacacgtcagaaacagggccaggggcagctcctgagctcacaagttcaaccatggcacgacgagggttggtcttgtgcttttcacacagttctggcaaaaataccccctctccagcagccaagttgaagaaaaggtcaacaatgttggggcacttctggtaacatgcaggagagcaaagcttgccggtgaattgaggctcaaagaaggcatcagatgaaatcccaacagagttcctatcaaccccacatgcctccacacattggtctgtctctatgtagtctgccatcctctccaccaccacttccgatgtccggcattggtactcgacgccaccgtcggctgccttctcagtctccaacaaacacctcttccctgatgaagctactgagaaagcacacacttcctttggcaggtcctcacacaccatctcagccaaagatgcatggatgaaaagggatgaaaataataggaccaaaggcaatttggtagagaaagacatggttctaaatgatgtgtgtagtttggaaaatagagatattgttcttttgtgaaagagggagtaaaatgggttttgcgtatgtaatgaaaagaaaggaagaaaagagttcggtattggattttttttcacattattactagttcataaacgaatatactaagcactcgagcccaagtataggtacatctggaacatctatcaccacagcattggatacagcataattatcctgggaatcatcaacatcttcagggggtttagcatcttgcatcctgatcagaaatggaaatcaacttacactgcagtgctcattgcacttggtgcagttgccttgttcttggaagtgatcacatggattgttgtgttgaagagaaagtctggcaagtccaccaaaacctatgatggacacaacaatggacaatctagggaagaccccctaaccatataaaaataaagtgaacaaatttggcttgaatgtgttctacttcccctttcccttccccttccccctttttttcgcagccatttatatgacacatatgatatctttgtataatgcttgcgtataaaatataaaattt

SEQ ID NO: 51360 - DNA, 316 bp, Glycine max
  Clone ID: PAT_MRT3847_17392C.1
cacttgcggtgtggggtgtactatttaatctttagagcaggtgaagtgagaaaaagggattgatacgtttagggatggtaggattacgaagactggcccacctttttgtgacagatgtttgcgaccgggtagggcggtgtaataaagctatacgcaatcaacagaaacaccatggctgaactttgctctggacaagattaatgctgagttggcatagacctctatggctttcaacaagcttttgctggagctgggtcaatggagatgacaccattcataggaaacttgaaagaccgatatggctgaaaagcgttgc

SEQ ID NO: 51361 - DNA, 423 bp, Glycine max
  unsure (1)..(423): unsure at all n locations
  Clone ID: PAT_MRT3847_17393C.1
gtgcgattcctctgcttcctgtttatggtggagtcatcgtggagattgtgagttccatgttggacctctgtgtgccgcaggtacgggccctcatgcgcgccctagctcgtgaagatgatcgtggcgctccccgacgccaagcacaagaccctcatgcatctatgtgtgttcactttcgnaaaaatggatttgtgtagagagcgttgtgaatcaatgtttcgaaactaagattgtgtgttaacactgtaagtgatagaacacttgatgatcggctatgtaattttgagaataaagactcaaactgcttgttggtaaaaaaaaaaaaggtttctttagacaaaagcatatttttgggtggttttcaaccgcggaaaattgtttactttattctagcaaaataatttatgactgttttttaccgtc

SEQ ID NO: 51362 - DNA, 550 bp, Glycine max
  unsure (1)..(550): unsure at all n locations
  Clone ID: PAT_MRT3847_17394C.1
ggaannncggctgcgaggtaacanccaccaccaatatatatgaaaccatcaggacnntagaaagggtatacactcatgnccacnnctgttctaattgtgaggtggccgaccttcttgcagcataccaagtggtgatnaccagacgaagcanntaatattttngaaatcggcccctttcatatagtgtacatccgatttctatgtatgaatgcatggnnctggcgccagagtggacnntgaagannaattgtcccaagttcctgggttaagatgtcacacagcccttggtcttctgtccgtgcaatatgaacaatatacttttgctaccaattgtcctcgtcatacttccaacggtgataaccatgaggtgaaaaagccagtncctgcagaactgttcatnnccattcacctagagtggcaaagctgttggcttccttccactttccaaggtgggcagccctctgggcccgtttcttccgaaagaaagtgccttgatcccggcgtgtgaactaagcagtgtgcagacattgggagagagcatcaatgaaac

SEQ ID NO: 51363 - DNA, 320 bp, Glycine max
  Clone ID: PAT_MRT3847_17395C.1
cacgcgtccgctcatctacatgaagcttaaaggcaaaggaaacataagggactacatctattgagatgttgcaatctctcactcaaaactacaagtacacttaaggtagagcttgggaaacacctactcgagcacttggttttgatctcgcttcctgctcacttaaaaggacacatggtccctcaatgagcttatatctcactgtgtgcaagataacgagacgctgcttagagataggactaaaagtgctcacttgacttcgacctctgagaggaagatgaggaagaacactaagggtgttggggaaatgacttcttagc

SEQ ID NO: 51364 - DNA, 417 bp, Glycine max
  Clone ID: PAT_MRT3847_17396C.1
ctataaaaacccaattactactttttgccctcattacaaaacgagtgcgtcggggacttattaaaacagatataaccaaaataatccccctccttctattcatcaaaaacctatactcaataacacaaatgtacacctccccactacattatgttagcaacctaactaaataacacaccccccttgataataaaataaatgattcatggtgaaaaatgacatagtctatattatcacttaataaatgagaaagcccaacctccaatacaagataatgaaaatgaccatcatccgcctctaatatattcttccctaaagcaaaatccatttccccattttttttcaataaccattgactatttttgtccacaactactcaattaactactcatatataaatcaactttgaaaaagtta

SEQ ID NO: 51365 - DNA, 1181 bp, Glycine max
  Clone ID: PAT_MRT3847_17397C.1
aattcccggtgcgacgagcgcgtatgctcggctgctagaagacgacagaagaggaacgcatagtcacatagtacactctggtctgaactctgaatctttctggtgtcgtgtcccatttgaattgaattgcatcttgaaagatggcggaggaggagaagccaaatggagaagaacaagtgaaggacaacaacaacaacaacttatacgacgccgttcagcgtctgatcttggaaccttccaagatcaaggcctccctcatccctctcttccccgaagcttctagaacctactctcgccaactcctccactggtcccgtcaaggttctcccctccgacgcatcctcttcatctccattgggatagttgcacttgttgctctctcaggacttgttgcttttacgctcttttttctggctgctactgtaaatgccattttcgtctcccttctcatttctttggctgtggctggaggcttcttggttctgttctttgcttttgtgacagctatatatattggagcactatcactggccatctttgctatttccaccgtcactttttgggctgttgtggctattatcattactgctggatgggttggattcctttataccgtgtggctggtaactagcaagagccttggattggcaaagcaatctttgagtgtgactggctctgcaattactacttactcagctgcttggggtacccgtaaccttgcagacaaaaattcaatttaggtgccggtcacataaagaaggttgtgcacaaatcttacacaaacatgttttttggatggcaaaagcttcttctgttgactggtagagtctcatatccttcatcttgctcatggtttggtttcagtggctttcaatagcatgcttgtattatgttaataaaatgccacagtttggtttcatgtgttttagtcggagtagtgttgataaaattcctggttgtatgtattgtgcttcaaatttcaatttttaagttggaaaaccaagtgcttttactttatttacctatgttgccacctggtgttgtacaacttgtagacttgatgaaattggactgctgtgttaaatgatgtaattttggaacgagttgtaaattgtaattgctgcatttgtgtgagcaagaatgtttatgcaatattagagcagctaacagtcaaatatggc

SEQ ID NO: 51366 - DNA, 566 bp, Glycine max
  Clone ID: PAT_MRT3847_17398C.1
atgtgcatatggataggcttcatccattcaaaagaaaatgaaaacaagaaacctatcacaaacgggggagcaaccacctgtcatgcaagcgagatttctgtccttgacaaaactccaaaattgtggtgttagtctatatcctccccagttcttaggtttagggatcaaacttctgcaagcaaaaaatatgaggattatttccagctcccctagagttagcatgggagaatagggtatatttgtggccaaatgagatgattagctaaccagatttccaagtccaagtcaaggggagatgtggaattattgaccatctggtgggactatcatattttatcagaatttgctgataacagagtcaaaagtagatgttcaataacttacccatcaggtatttttcttccagctctttgaactcctgataaagaacatgcactacagcactctaatgttccaagaaattgaattataagtatacataccatatcatttccatacataacaatttgatttgaagcgaggcagaagtagacctgcttgctgactattgctcccatctgactttc

SEQ ID NO: 51367 - DNA, 316 bp, Glycine max
  Clone ID: PAT_MRT3847_17399C.1
gcgccatcttccttgagactcctgcgccatgagagcgaagtggcggaagaagagaatgcgcaggctgaagcgcaagagaagaaagatgaggcagaggtccaagtaaaccatcttgtgcacccacgaagcctgcgggagcagaagtaagggatgctgaagcccggaacaagtggttggactgtatgctgctgtcggtaataagtctcagtagacccggaatgtcacctcgccgagatcagctgggaaaatgactaccttcctcacaaccaaaacagtcccgctggccctctgccctggacctttggcattctggact

SEQ ID NO: 51368 - DNA, 325 bp, Glycine max
  Clone ID: PAT_MRT3847_1739C.1
gtacctgccacagtggtgctatgctgccattcctgagtagaggtggtgcactgatgcctcctcttgtttgctggttactagatgcattactttcttcgctaatctatgctgctttgaacggcaacaaattgtcactaatttcttcctgcattgcaactgcaactgcaactgcattttacagtaatgtagccagtctcagtgtaggcttaatgcatggtaacttactgattcggtgagtgatgcatggaatggaaaatgtcacacatgacatgtatgtaatcccatcctaaactgcagacaatcggagacctaaaaagaaaactgc

SEQ ID NO: 51369 - DNA, 1459 bp, Glycine max
  Clone ID: PAT_MRT3847_173C.1
caaattcagcacatcacatggtagctgctgccagttcctaattcctaatttatttgccttgcactctaccaaccaactagaaagaagatttttatttggtgaatggctcgcctaatatcttcaaaccccatcgccctccacagatttcaaccatgccttccaatttctcgtcacttctccgcaaatcctcgccgccgccgtcccaccaacacccgcaaattacagaccttagcgtgccaaacaaaccccaaccttgatcaaaaggatacccctaccacggatgaagaaaaacttgtggtcgagcccagcacgagtacaacaacaagttctcttcctcaattgccgaccaaaaacatcaacaacaaaatcgcacttgtttctaccttagcggccttggggcttttcttatctgccaggttggatttcggtgtttccctcaaggatctctctgccaatgcaatgccttacgaagaggctctctccaatgggaagcccactgtggtggagttttatgcagattggtgtgaggtatgccgggaattagctcctgacgtctacaaagtagagcagcaattcaaggatcgagttaattttgtgatgttgaatgttgataacacaaagtgggagcaagagcttgacgagtttggcgtggagggtattccacactttgcattcctggataaagaaggaaatgaggagggcaatgtggtcggtaggctaccaagacagtacttgcttgaaaatgtggatgcccttgctcgtggagaagcatctgttcctcatgctcgtgttgtaggtcaatattcaagtgctgaggcaaggaaggtgcatcaagttgctgatccaagaagtcatggttagatgaccaaatatacagtaccttcttttactgtttcacagtaactggttcatttgtcagtgagcaaacaactcattgctcttgtttttttacccttcacaagcccactatattataaacattgtgcgagtctgtcatagactaggatccgaatctaggtatcaactgaaattgttagctcaaatgtgtctatattcttgcaatcttgttataggtgaagatgcacttgaatgtttacaaatctgctactctattcaatactcatcatctgtttcataacaatttatatcttcccgcccccccctcacactgtaaatacatggaattcttagtctatcagaaagttatggttttggtggaaacaatatgattgttctgccccaatcatggtttactacccacgacaaagaaatttaaacgacatctgatgacataggttgttcgcattattaccccacgcgagtctggatcggacagtggatctttgatgttttctccaatatttgtatcttccttttgcttggactctcttcgagttctagtgtcaatgtcttaagattcaaaacatcactggcttaatagaaataatgtttttttttt

SEQ ID NO: 51370 - DNA, 924 bp, Glycine max
  Clone ID: PAT_MRT3847_17400C.1
gctgaataaaacaaacagtgagaaatgaattgaagaaagtttttgtaatattgatgttggttgtgtaattggcaccatgtattacagtattagttgcacagcatccatatattgattatgtaatctttccctgctttgggcagttgtacaaaaacacgttgagcaacttgatagaccagaaaatttctctacatccattaaccctttcaattgaagaatctgcttctcctgtgagttgcagttgtacaaaaacacgttgagcaacttgatagaccttttcataaaatttctctacatccattaaccctttcaattgaagaatgcatttatgctgccaaggaagctgatgatgaaataaagtaaaaactgagattgcaagaaactgaaggttgttttgtagatatgaaaaagcgagcattgaatgatagactaatgcttgcagaaaaaggcttcctggatgcagatggacttcagggaaagcaatggtttaagcatcttgtgtttgggccttccagcgaccatgaaaggatcaatttcttcccagggatttctgattctaccattacgtcagcaggtgtaagtgaaagagaaaggctagcatcaattcaacacgaaatctggagggttgccagagccattcgaagagctgcttctgcactcagaggagaattcacctaaaaaactaaatgtgaaaaaaaaagttaagttagaggagaatggagatggatgaaatcatctccgtttgagttacctgtaaatatagtagtgtttctttttaacacgagcagagttacctgcattttgaggtatataactgtacattaagttgtaaaaaaggagatgaatgaacatgccagcagtttgaagacacaaaaaaagtaatgatagcagattttgtgcttaacttataatgaatgatctgca

SEQ ID NO: 51371 - DNA, 288 bp, Glycine max
  Clone ID: PAT_MRT3847_17401C.1
caggcgtttggttgaatggaagcgcgtgggcgggtggctcgtgttttcggtcacaacagtgacaatgtcctactctcttgtttaaccttgtaagtgatcactttccccttcccttaaaattttcctcaaaccctacctacctttacccgcccctcttcgcggcttttcgcataccgactgcgtcttggatactggaatagggcgccaatatgagctttggggcaggcaatggacctgccgacacaaggtctcggaggagaaagacagcgttgggccctgaccttaacc

SEQ ID NO: 51372 - DNA, 510 bp, Glycine max
  Clone ID: PAT_MRT3847_17402C.1
aattcggctcgagctcctttgtccccaatgcctgaaatggatggctcctccgccaaaccccctcaaatctccgaaatgtttcagaaattcgccctcgctttcaagaccaaaaccttcgaattcttctccgaggaagaaaacaacgcttcccctctcctcgacgacatcgacggtttctccctccttgactccaccgaagaaatcatcaccgaccagaaagttgtcgtcatcaaacccgaccccgatccctccctaaaatcccccccatctccgccgccggaatcccctcctcctccgcctccgccgccgccgccacagatcacccatcctcctccgcccccggaattccgcgagcccgaaacgccgcctccgccgccgctaaccgaagctcagatcagagaaacgacacacgccctgatctcctcggtcttcgccgcagtctccgctttcgaagcctcctacttccagctccagagcgcccacggtgccgtcgtggaggaacacgtgacg

SEQ ID NO: 51373 - DNA, 952 bp, Glycine max
  Clone ID: PAT_MRT3847_17403C.1
ccagcgtccgatttggagctacagcaaaatcaaattctaatacgcttttcgattcttctaattttctcagctattaagagaaccaataacaagcaccattacaagattcgaggtgcacatccaattgtttcccttgtaatatagatttgccctttatgtgctttagtcagtgtagtgctaaatctttgtcatgcaccaatctctgttctgtgtatttggctcaagagatgtgtgggaattagtgctatggcaacatccaccaagtttgacatatcttctagcagcccagatagaccattgtactctgggcagcgtggatcccacatagttccttcgttagatagatcaggtagcttccgtgaaagcatggaaagtccaattctgtcttctcttccaagcatgtcaagaagcagttcttcagcaacacaaggggatgtggtgagcttcttcagttgtgtgcgttttaatctaaagttggtggctccagagcataagtctaatcgtcaaatagattataaacgacttgtcagtgctgcttttggaatttctcctgatgattctccatctagttctggataatccaagcagctatcatccccagtaccagatgatatcaaacgactcagggatagtcaacacacaagtttttagatggcaagggatcgtgctgaggggaatagtgagggctaaactgtttactacagagatgtccagattatacaaagatttccaaaatataattctgaagaaaaggtctcgggccgcaactttttctaatgaacgctctggtttcacgttgaatgatcgatcagtcttgggaacaagtacaggtaaggttggagttgaaggtcatgcagtcacaggtggttttgaacatgaccaaccgaagttggaagaaagaaccaaaaatgtttctaacaagcgcactcgaacttctttggttgatgtaagg

SEQ ID NO: 51374 - DNA, 460 bp, Glycine max
  Clone ID: PAT_MRT3847_17404C.1
gcgagaaaggcacactggttaacttagttattagtgacaaaacacaatggttatatttcctccgacacatccagatttaacatagctgccaacacactcaaaagcatactggtaaagtcctatttaggagaaatgatacgccttcttattatctgcgagggtgggaaatgcatcaccgttaatcttgtccgtaaatgaatagtccctaaaaaccttcaccttctctgcctaaaaggcattcttgagatgatcaagttccctgtccaaattattaatagactcgttatatgcctgcttggcccaaaactgattaggggtgcgtaccctgacgagaatttccaattgcatagggggaggcactttgtatgcgacttacaaaccgttggggtcactgtgaagctgtatgccgaggatgttgccgatagagtgctcctttctctcgaccgcgaaggtctgggga

SEQ ID NO: 51375 - DNA, 455 bp, Glycine max
  Clone ID: PAT_MRT3847_17405C.1
tttcttattctaatacgcttttcgattcttctaattttctcagttattaagagaaccaataacaagcaccattacaagattcgagggttttgattttgaagttcgtagtattttatcgcgttaataggatggcgcacatccaattgcttcccttgtaatatagatttgccctttatgtgctttagtcagtgtagtgctaaatctttgtcatgcaccaatctctgttctgtgtatttggctcaagagatgtgtgggaattagtgctatggcaacatccaccaaggttgacatatcttctagcagcccagatagaccattgtactctgggcagcgaggatcccacatggttccttcgttagatagatcaggtagcttgcgtgaaagcatggaaaggccaattctgtcttctcttccaagcatgtcaggaagcagttctttagcaacacaagggggat

SEQ ID NO: 51376 - DNA, 659 bp, Glycine max
  unsure (1)..(659): unsure at all n locations
  Clone ID: PAT_MRT3847_17406C.1
cacgcgtacgaagcttggcgttcganagcggccgcccttattttcttttttttttttttttttttttttttttttttttttttttttttttttttttttttttttttttttttttttttttttttttttttttttttgggggggggggaaaaaatttcggggtttcccctttttttttttctcccggtccctggggggggggcgggggaaaccccccgtttttgcccccaaagggggggggggtttcccccggggagtctccaacggggggggggcccgggggttgggggccttaggagggggcccctggtttaagttggggccgcccggggttggggcggggacctggccgggcctttgttccctttggggctttttccccggggtccttttggggggcgtcttccccgggccccttgggggaggggcttttttttctttgggccggcccccccggcctggttcctttggacccccttcccccccccttttgccccttggcgggggcccgttttgggccccccctttggcgtttggtgggggccgccctttcccccgggggcggtggggggggggctcccaaatttttgaaggggtatccttggagcctcccactgcctaagggggggtgtggggggtttttttctcttttttttttt

SEQ ID NO: 51377 - DNA, 495 bp, Glycine max
  Clone ID: PAT_MRT3847_17407C.1
agcgtctcttcttcttttctccagaagcttccccctctcttctctatcttcttcctgtccttctctctatctttttcctctcttccatggccacattcgtcaacacctccggccaccatcgtaacacctccagccatggtctcgcctccggccatggttgcgtctccggccatggtcgcatctcgcatctccattacggttgcatgtcgcgtctccgaccatggtcgcatctcgcgtctctagccatgctctcgtctccgtcatggtatggtttcttatataagaaacgattctcagccatgaaggaacgcactctgctaggtcaacccattccaatgcaaaaaagaaattaagaaacggcttcttcccattaagcacctgagaagaaacctgcattggagatgctctaatacctttttttattatataaaagtatttttgctgaaaaaaaaacacaagtaaactatttccaatcttttcatagtggacacattt

SEQ ID NO: 51378 - DNA, 321 bp, Glycine max
  Clone ID: PAT_MRT3847_17408C.1
attcggggttcttgataaaaacactttcctttggggacatgatatagacaaatgggcgcccatccctatgatttattgaatggagcgtgccctcgccacttgggaaattatagttgctgcttgcgcaacagcattgtttggcagactacataaaggtataccaccggggggtccttctaagggatttgagaaaacaacttataagcgacttcaagatgaaggtgtagaaagaaaaacacgcgctttatcgaggttgaaagctaaagaaggtctttggcctgaagcctaaatttcaagtcatgccctatttttttaggctag

SEQ ID NO: 51379 - DNA, 225 bp, Glycine max
  Clone ID: PAT_MRT3847_17409C.1
ttttcttttttttttcttttgttttttttttttttaatgaaaattttggttattgggtttttttgttttgacaatctatggggtttcagctcctcgtgcgatagatttaattgcccacattgcattcgtggcaaaaacagtagacgctgactatggatgatcaaggttaaaccggtccaatcgaaaaaacaatcgagtatattttagtgtgaattacggaaaacc

SEQ ID NO: 51380 - DNA, 250 bp, Glycine max
  Clone ID: PAT_MRT3847_1740C.1
gaacaaagccaacaaacaaccaccgatgcacacactgaaacccaacatcaaccaacccacacaaacccaaccacctacatcaacccaaacccaaccccaaacccatcaagctgaaattcaagagggtagaccgtttaggaaaaagctggaaacaaggggaaaagcttagccactgccaaatggagttcaaaacctggatgtttatgttttttgtttaatatcgttagctacctttgaaaatatttatttt

SEQ ID NO: 51381 - DNA, 526 bp, Glycine max
  Clone ID: PAT_MRT3847_17410C.1
ctagctatgtcgatcgaacctgtccaaaggtcactgtcaccgactcctgtaggcgatcatagcaatttgcacacacagttcgtgccctacgtttacatcacgcagttactcctaatataagttcctaaagatgcccattttatagttatacatccccgaggccctttttccaccaccgccattaaatgcatggtgcgttacggtatggtgcagcatgtgccaccgacaaccttgccgggtcttttattacgtgtcactagggtcacaacttgtatatttggttggaataattaggccaccatagtagaggagaagatgaaaggaaagaaatatgcacgtacttgtgtactgcgcgatggccgggttggttgttaatgctgcgggaaggatgttgtactggtaaatcgtatcgtacgtgttctgcgattccactagattacgaatagcaatgattggacgtggagcgagggtgtggggagcatatgggaacggacatggaggaagaggagtacctggagcctgatgg

SEQ ID NO: 51382 - DNA, 269 bp, Glycine max
  Clone ID: PAT_MRT3847_17411C.1
accaagcgtccgatgcggcgataggataaggcttaacgtggagtgtaagactttggctaccaggaactcgttagacatcggctaagcactcaagctgttctagagccattcgtgatacaatctaatcgacatgtaacttggactgatcctatttaaaaactgtggcttacttactatagtaccaccatgaaaatgaattgaattgaccgctaatactcgttcattgtttacggcataacggataaaccattttggcgaggaatctacac

SEQ ID NO: 51383 - DNA, 766 bp, Glycine max
  Clone ID: PAT_MRT3847_17412C.1
ggctcgagctttcacgagggcatttggtagtgctatgttttttttctgctttcgtatgacaagtgtataattctcctgaatacccagcagaagctatcaacaaaagccacaccatgtctggacccctgtctccaaagacatctcttgaaaagagtgaccgtgttggttcattgaagaaaatgctgaggaattctctaacaaggagtaagaggcgaagcagcagcaaggtcatgtcggttgaaatcgaggatatccgcgatgctgaagagtccaaagctgttgatgagttccgtcaagctcttgtcttggacgagctactccctgagaagcacgatgactatcacatgttgcttagattcttgaaggccaggaaatttgaccttgagaaatctaagcaaatgtggtctgacatgcttcaatggaggaaggaatttggtgctgacaccatcactgaggattttgaattcaaggaactcgatgaagtcctgcaatattatcctcaaggacatcatggagttgataaagatggacgaccaatttacattgagagattgggtcaagtagatgccaccaagttgatgcaagtcacaaccatggatcgctatatcaaataccatgtcaaggagttcgagaggacatttgatgtgaaattcgcggcttgcaccattgctgcaaagaaacacatcgatcaaagcacaaccatccttgatgtgcaaggagtggggcttaagaacttcaacaagcatgccagggagctcatcacccg

SEQ ID NO: 51384 - DNA, 424 bp, Glycine max
  Clone ID: PAT_MRT3847_17413C.1
ggtgagacgagggtaaggtcgcgttgtggcgcgtcgtgtcgcgcgctgtttctgtgtgtgtcgtttgtgtttacagaccaaactatatctgcgtatcgcaaccatgtagaccaagcaaggtggaaaagctaaccctgtgaagaaacccaagtgtgataagagggattacgacgagggtgacatgtctcacattcagaagaaaagggaagaagagaacgctctaagggagttgagagccaacgcgcaacagaggggaagctttagaggttctgctctcaagaagagtggagagatatagggtctctatatcatgagtgtacacatacaatagtgagccgtgtagtatattaccatgatcacttgtgtcatagtgtggtcttctatagcgctataatgatagctctgaactgatgtatttcgagat

SEQ ID NO: 51385 - DNA, 867 bp, Glycine max
  Clone ID: PAT_MRT3847_17414C.1
ctgcatctgcactaaaatatactattttgttgatttgtttttctgtttctgtcaatccggccgaaattctgcagaaaaaatgtcaaaagcaaacgcaaagaacaaatccccctccaccgagctccaccctccttacttcgagatgattgcggatgcgatatcgtccttgaaagaccgcacgggttcgagccagccagcgatagccaagttcatcgaggacaagcacagcaaagtgctccctcccaacttccggaaacttctctccgttcagttgaagaaactcgtcaaatcggagaagctttacaaggtcaaaaactcttacaaactttcttccgccacggacaaagagacccagaagaataccgaaaccgagcccaaacagaaggttgaaaagaagaagaagaagaagaagaaggtgggtgagaagattaagaggctgagccaagtgaagacacccgaaactctgaagaagaaagcacccaccaagaaggacgcggcggcaactaagaagaaatctgcgtcggcggtggaaggttcaggaggagggaaagtgaagtgtttgagtcaggtgaagacccctgaggccttgaagaagaagaagcccaatttgacacccaaaccttccaggcccaacaggaatgctaggaaatgaaaccaccacttgtgtcgtatgtatgttaatgcttttttttttttttaagttctgttgccttgaagtggattattgttatgatcaacttataacagttgacgattgcaatgtggtagtttctgcgattatttattcgatgtgggattttttcctcctaatcatttttttgggtgtgcgtttattttagttttatataacaccggaaaatgttcctg

SEQ ID NO: 51386 - DNA, 793 bp, Glycine max
  Clone ID: PAT_MRT3847_17415C.1
acgggaacgcaccctcggattttcgctcgagcttattttcaagtctaagcctgatatggatccaacgaaacttcattggatgatcggaattatggtgtgtgtgactgtagtgaagttcattcttatggtctactgtcgaagattcaaaaatgaaattgttagagcatatgcacaagatcacttttttgatgtcattactaattctgttggattagctgctgctgtgctagctgtcaagttctactggtggattgatccaacaggagctattattatagcattgtatacaatcaatacatgggccaagactgtcattgagaatgtttggtcactcataggaaggacagcaccacctgattttctagccaagttaacgttcctcatatggaatcaccatgaacagatcaagcacatagatactgttagagcttacacctttggtgcacattactttgtggaagttgacattgtgttgccggaagacatgcttctccaccaagcacacaacattggtgagacactccaagagaagctggagcagcttccagaagtcgaaagggcttttgtgcacgtagattttgagttcactcacaggccagagcacaagaccatggtgtgatgatatgccatgggacaatgatggcatagcttagctttgctaattttcttagttattttatgcaagtcaagtagcaatttttctttctgacgtttatagttgctgaaacctctgaatggtacttctaatttggttgactcaaaataattaatagtattttttttctaccaaaaa

SEQ ID NO: 51387 - DNA, 299 bp, Glycine max
  Clone ID: PAT_MRT3847_17416C.1
ggaaatcgtttttctgctcttcatttttgagaccgaagaaccaaaccagcgcgagaacatgatatctcttgctccgctccttctacacacaatccacctcatacttactctacgctccgtgtatgacttcaccccagagcgtttttcacaccctcacacgcacgctctgattaacaaccccacccttctttctcaccaaaatcaggcggagtatgtgcgtgctcttattctgcggaactcgtacacaaattttccaaaaccacttactttgccactttaaaccatctcctatacattct

SEQ ID NO: 51388 - DNA, 1904 bp, Glycine max
  Clone ID: PAT_MRT3847_17417C.1
ttttcccccatctgtagtttgtggggctagaagtttctatttctgggcattcagaagattgcaggaaaagttatcagctttatttccatattgaacagagttgttgatctaggtagtgttgggttggaatcggtgatctgtctttgggccaaatttggagggtgaatgctggttaatatattttatttttgtgtttaaatggttgatattcgaatatggaaatgttaggggtgtttacttacacttttgttttctgctttcattacttgttttcactttttaattataaaactgtcacactttgttttctatctgtttcgtgcgagcaaagatttgtaagaaaaaaactgaaaacaactttctttttttctctgtacaagtatgtggattttccattattggtaccaatgggggtattggagtgccccagttaaacctatactgaagaagtatctgagatttcgttttctgggctactttctgaattaactaagctttctgacaccaaatagatgaagtagtttgttgattctaagattgttctatggatttaaaatatttcatcttcctgtgaaacaatactactactactactactactaatcttgcgatttatgtgtgtatcttagattctttttacataagtgtgcataaatatcttactatcttctctatatttcattcatgtttttttaatccgcatttctttcaattcaagattccagtatggatagtttttgttcctctctagcagaggtgttctccccaagagtttttaaaaacaatttctataagccagaaaactctattaaaacaaaacaatattaaaggtgtcgtttcgctagttcattcatatttcaaggttctcccccgtcttttttattcttatgtaaataaaaatcaaacttattggttcattgattcttgaacttaaaagaaaaaaagagttgatctttttttagtaacttgaatgcacaagtgatgcgggtagcaaatgacaagattagaagacaatataaaattttccttgttctatgtaatggagatcactagaataggccaatggttaagtcttctgatatgtgtactactattactgcagacagaaggggttcctgtgggaatcacttttaaaatgcagtggcaaaaggggctgtttgtttggatgggagtcctccagcttaccacttccacaagggatctggagcagggattaacaactggatagcactttgagggaggaggatgcaacaacgttactacttctttccgtaggacactcgattacatctagaaaatggatacatcactttacataatctattcatcttagtatttcctgatttcactatgaatgttttgttttcaaaagagaactctgaaatatacctgaataaagcgtagtcatatttgccaacttaaaataagcttagtaaagtctttttttctgatctcaagatattttgattcagattcgaaacatctttatacctggctccgctgatctcagtaatagttggcatagcttaaatttaaaacactggcatgagagaaaatataacatgcaaaagggtcatccatttgagtaagagcttctagtagagctcaaaacaacaatatttttcaccacttctatgccgttggagtgaaaatatagctttgtgattttcaggcttcaagagtgaattcgaaagggcattgagtgaggtaggagattctccatgtaaaggaatgtttattgtctctgtctatcaactcttaacgcgtccggaatggtgcacacaaagtgaaactcgaagtggtgtcaagtcgaaatcggatatacgttctctataatcccacgatagacctcacaagtcagcagaacatgaggataagtaacataggctccgtgaaatgaaggt

SEQ ID NO: 51389 - DNA, 483 bp, Glycine max
  Clone ID: PAT_MRT3847_17418C.1
aaaccagaaaccgggaaaatttattcatccatcaaaaaaaaacccatccacggggggctaatactaagccaaaaaacacaaagggggcaaaaaataaacccccagggggacgggaacatgggtaccctatcacccaacttttaaatttaaaggaaggatggccaactataggggagcatcaggacccaaccttttctggaaagcaaaagcagcccaaaagtttccaagcttggacgggaaagccatcccccccctaaggggagctggctttttcattggcggggccattccagttgggaaaaaggggttaaacgccaaaactgggtcttccttaagcgtttaaagagcttgaaaaaatttttgccggggctggtcttcataattgaaaaaagggggctctggggccgggaccttttaaaaaccttttttaaactccttttccatttcacgcctggggaaagcaaaaaaattggaacacttttt

SEQ ID NO: 51390 - DNA, 392 bp, Glycine max
  Clone ID: PAT_MRT3847_17419C.1
ctcccatgatgcccctagatgaaaaaattctttttaaggtggcccagaatttggttgaggaatggttcaattgtgttgataaggagaattcctttgaggaagtttttttaaggccaccacttaatggggttgagggtttggcctttttggaaagaattccctttgccacatttgagggattacctaatggcctttcacccaaaaatggtgaaaaaggcaaaaggaaattggtctttggggatggggaagagatgacactgattccgggaaccagtgttgaagaggctaacaccaagctaatagttgaacttgaaaaaagtgttcctacattggttggcattgaatgtcccaaggatgagaaacttcctcgtcgcaaaatttttgacaaacct

SEQ ID NO: 51391 - DNA, 1116 bp, Glycine max
  Clone ID: PAT_MRT3847_1741C.1
caattaacaaactctaacaacatcatggtgcaatcaaagaagttcagaggtgtcaggcaacgccattggggttcatgggtatccgaaattcgccacccgcttctgaagagaagggtgtggctagggacatttgaaacagcagaagaagctgctagagcctatgatcaagctgcgattctgatgagtgggagaaatgccaagaccaatttcccaataactcaaactccagaaggtgatccaaagagcactaccagtgaggacactccctccaccacctcgaaggatctggaggaaatcttacatgcaaagcttcgaaaatgtgggaaggtaccttcaccttctatgacttgtttgaggcttgacccggagaactcccacatcggagtgtggcaaaaacgtgctgggaggcgttctgattcaaattgggtcatgacggttcaactgggaaagaagagtgttaatgttaataataatgacactcatcatcaagctgatagtagcagtagtagttctctttcttcttctctaccttcttctgaacatcaccacattgagtctccatcactggctgtgacaggtaatcttcatcatcaagaagttgtgagaggagagattgacgaagaggagagaattgcccttcagatgattgaggaactcctcaacgacagaaactgccctagcccatcatttaacaacaacattcaagaaagggatggtgctgatcatgaccacttttttctttaagcttcttttttccacacagcgttatggtattcacatgcatgtttaatcttcatcttcaacaagggttgtcattatttgggaaaaaaagggaagtggtagttataggctaattatatataaccacatcatatctatcatatcatatctgttttcatgtatgtcatatttattataagtgtagataatatatatatacacatacatattacatgcatgcataggaaaatatacataagaaaataagagagatgtatacagaatattattttcagagttcatatgtaaaggccctatcgtctgctgcttgtttgaaacgttcatggtttatttatcataaataataaatatattttcagttaaaaaaaaaaaaaa

SEQ ID NO: 51392 - DNA, 546 bp, Glycine max
  unsure (1)..(546): unsure at all n locations
  Clone ID: PAT_MRT3847_17420C.1
cgggattgttttttgctgtgcccgacgcaaagtggacgacatttgcggttcttggtactactattttgtgctctcctttgattttttctgagagaagtttgatgaggtaatgcttcccgagtgtttggctcgttcctcctctgattgcgtcttgctttgtgtcgtcaaaggtggtagccaccgccctgctgtgagcccttttcttatagtctgccacttccctcggatgaatgggaggccatcctcctgtcaaatttgggagttgaccaagtttgatagagtgcaattttggnagcaacatctatgatttttcaatcgatgaattaggcatctatccacacttcttttacagcgtgggcccacgcgtccgtagaaacagaagagggtcactgctgataattgttcaggggcaattagtctattccttagaccttgagacacagatccttatacaacttccaattgcagaggggggtttatggactctataccctgcttattacgctgagagcctgtttctacttgacaaaatgttctacatcgcga

SEQ ID NO: 51393 - DNA, 207 bp, Glycine max
  Clone ID: PAT_MRT3847_17421C.1
cagaaatgttcatttcggtctcaatcttttgacagtctgtacctaattgactacattatgattttcctcttttgggggggggggggagatttcccaatttgtttgaggaaaactaagggttacactttgtggcagaaaatctgtgaacaaatgccgcttaatactgattttccaaatttgtttgaggaaaacccgaatttggaattt

SEQ ID NO: 51394 - DNA, 408 bp, Glycine max
  Clone ID: PAT_MRT3847_17422C.1
gaaccattccaaggcccgttgaaggtggttcttatttgaaagggttgaccaattaatttgccgggattattttttaaatggttggggttaaactcccatccattgggggaaggtccccatgggcctaataaaatttttgggttatatgttggacctaagctggggtattccaattttaaggaaaccgcttttgttgaaaaaaaaaaaaaaaaaaaaaaaataaaaaaaaaaaaatggggcggccgtttagggggttccaggttacctacccctggcttgcaacgtattagtttttttttgggggccccaaattcaaattaattggccggtgttttaaaccattaggcttggataacccttggtgttcccaatcttaatggctttgtaaaaattcccttttttcaggtt

SEQ ID NO: 51395 - DNA, 185 bp, Glycine max
  unsure (1)..(185): unsure at all n locations
  Clone ID: PAT_MRT3847_17423C.1
gccgggcttgtgnaacacacccctgcgtatttcatttacaatacgcaatacaacttttgagtcgaggacgttcctaacaactctcgaatctctttaatcaacattatcagttcatttacaaacctatcctctaactatacgatctagttaaccgaaggctttaccaaaaatttcaaagaatgtat

SEQ ID NO: 51396 - DNA, 117 bp, Glycine max
  Clone ID: PAT_MRT3847_17424C.1
gccaatccgtttctgctgaatcttctcgtcgaccccatttgctagatctgcgtggttcttccatcatcaactaatcatggttcttcacagagaactcgatcagctgcgtgcatcccc

SEQ ID NO: 51397 - DNA, 2118 bp, Glycine max
  Clone ID: PAT_MRT3847_17425C.1
ttgaaacaattcatcagctcatacacgtaatttcttttcctcttttcctcttatccaattctaatcacgatcagacattaaatgtaaacacttctctatcaaaaatttgaacttagttcgcctcacacttttgttttgtcaccttgtgagagactaattccctctaataaacgcaacgttgttcatcagtggcacatacatatacagcatcacaattctttgaagggtgaaaaaccttgatcaagaattgaagcattaatcttcaaccatggccacacccttggcctaccaagagcaccttccggcggcacccagttggctgaacaaaggtgacaacgcatggcagttaacagcagccaccctcgttggtcttcaaagcatgccgggtctcgtgatcctctacgcaagcatagtgaagaagaaatgggcagtgaattcagctttcatggctctctatgcctttgcagcagttctaatatgttgggtgcttgtgtgttaccgcatggcctttggagaagaacttttacccttctggggtaaggggtgctccagcactaggccagaagttcctcacaaaaagagccatagtcaatgaaaccatccaccactttgataatggcactgttgaatcccctccagaagaacccttttaccctatggcctcacttgtgtatttccaattcacttttgctgctattacccttattttgttggctggctctgtcctcggccgaatgaacatcaaggcttggatggcttttgtgcctctttgatagatcttttcctacacagtcggggcttttagtctttggggtggtggctttctctaccaatggggggttattgactattctggcggctatgtcatccacctttcttctggaatcgctggtttaactgctgcttactgggttggaccaaggttgaagagtgacagggagaggtttccaccaaacaacgtgctacttatgcttgctggtgctgggttgttgtggatggggtggacagggttcaacggtggagcaccatatgctgcaaacattgcatcttcaattgcggtgttgaacacaaacatttgtgcagccacttacggctttgtgaagacaactttgggggtcattttttttgggaaaccttcggtgattggagctgtgcagggcatgatgactggacttgtatgcatcaccccaggggcagggcttgtgcaatcatgggctgctatagtgatgggaatattatctgggagcattccatgggtgactatgatgattttgcataaaaagtcaactttgctacagaaggtagatgacacccttggtgtgtttcacacacatgctgtggctggccttttgggtggtctcctcacaggtctattagcagaaccagccctttgtagacttctattgccagttacaaattcaaggggtgcattctatggtggtggtggtggtatgcagttcttcaagcaattggtggcggccatgtttgtcattggatggaacttggtgtccaccaccatcattctccttgtcataaaattgttcatacccttgaggatgccggatgagcagctggaaatcggcgacgacgccgtccacggcgaggaagcttatgccctttggggtgatggagaaaaatatgacccaactaggcatggttccttgcaaagtggcaacactactgtctcaccttatgttaatggtgcaagaggggtgactataaacttatgagtcaagaaattaggctgtgccttgctcacacatgcatgtgtataaatttatatgattaacaaatgtgatgaatccgtgagtggtataagtagatatttgattttgtcatgaaagaaaatttccaaattttgagatctgatgttcctctggtcatcttgcattcgaagacctggtcatatatttctggcacagaatgtcttggcatgtgtataaaatttagatttgtcaaattttaaaggaacttatgattagtttttttcacttagaagaagaacaaaaaaaaaaattaaataaataaaattttatggggcggccgccctttttttagcttttttactcagttattaattcctgtctctgtcctgtaggcgtactcatcttttttatt

SEQ ID NO: 51398 - DNA, 224 bp, Glycine max
  Clone ID: PAT_MRT3847_17426C.1
accgctgcgagaagaccacagaaaggggctcccattatatctgacgaatcaccggcaaaaagtgagtagtttaagtgtagaatccctttccatctctactcttctttcactttccatttccattcccattttttctgattcactttcttaatggcctacaataaccccaccgccgacgtacccgtcaacggcttaaatcggccgaaaatgttctaggaaaaccc

SEQ ID NO: 51399 - DNA, 272 bp, Glycine max
  Clone ID: PAT_MRT3847_17427C.1
gctatgctgaagatggagaatttcgtgatggatatgttcacaatgtcaatgtagataaagctctttgtaaaggtacagatttgtgaaagccattttgtcgtacgagagacaaagggaaataaaatgtgtcaccttcaattattgcacacctcatcatcatggatgtatacataccgcggtcgccccagaggatacaatctcatgtacccctgcatgtcacgtctgagctcttcgagattgtcacccaaagtcacttcatcgggcgtcgattt

SEQ ID NO: 51400 - DNA, 481 bp, Glycine max
  Clone ID: PAT_MRT3847_17428C.1
gggagcgcaacccaaacttattttcaagggtcattacagacccattacacataacatttttttttaaaaggttgggaaaaatccaacatcgaacatcacacaaaaatcagttccagtttaaaaccccccacaaaaacccaacaccaagggcaaagttgactctttttggatgttgaagtcagggagggtccttccatcctttagctgttggccagcaaaaataaccctttgttggcccggggggattccttccttgccctgaatcttcgccttaacattgtcaagggggtcggacctctccacctcgggggtaatagtcttacccgtaagggtcttgacaaaaatttgcatacccccacaaaaacccaaccccagggggagagttgactccttttggatgttgaagtcaaaaagggtacgtccgtccttaagctgtttgccggaaaaaaaaaacctttggtggtctggggggataccctcc

SEQ ID NO: 51401 - DNA, 240 bp, Glycine max
  Clone ID: PAT_MRT3847_17429C.1
ggaaccaactatttgaaatgggttggaaaacaccaattcaggccggtttgggccaaaacaaagtcctcgacaattcatgggaggaaacaaatcgttagcttggggaatgggatcaaatcctgcctttttaacccctttgaaagaatttacaaacccccccgtaagccaccctgggcaactgggggatttggcagctgaaatttcaggttttcccccaaagggggaattttacggcccccg

SEQ ID NO: 51402 - DNA, 1071 bp, Glycine max
  Clone ID: PAT_MRT3847_1742C.1
gaacacagaaaaataacattaaataaatagtaagaatattacatcaagatggttcagtagaactccccaacaaaggagcttagccttccattacaagcaaaaactcaaaactacaggaaagaagctatttttgttgaaagaacttggaagaagatgattgaggatgtctcctccagcctttaaacactaattctcttagtttttctggactaagctctccttgttgctcaaaaatcatctctctcttcttgttgttgttttatttccgccaacctcagtgttttaaaagctcttggacctttcagctttcgaaggctcgcttagcgagcatggctcgctaagcgagagttagtgaattttcacttagcaagtgcgggcatgctgagtgtgagaagagacaacatcctcgctgggtgggctgcctgtgcactgggcaagcacatctctggcttatcatcttctagggtttcccaatccgctaagcaagttggatgcctcgctaagcagatgcatctcgctgagcgaatctgcctcgctaagcgagtcatcaactgcttaaaccttgtattctttggcctgaaactgttgaatgcggtcagctacatcatcttgcataaactttttcccatttggatctttgtttttacctgtgtttataaacaatgccttcactataactaggattcttaattcctaccatggttaagcctaacactttgcaaaatcaccccacattccaaaactgcgttggactctgtcaagttcacgtttacgagaagcatcaaagtttgcaactttgcaaattgatgtatataataacaacctcgtcgttgcggtgcttgaagatgttacgttccatttggaagtcgcagttcttggtgtcgaggtggacgtcggcggccaacatcatctggatgtcggcttctttttggaagagttggcgtggtggggcggcgacggcatttgtagcagtggccatgggtgtgtaaagtccctaactctgaaacaacgagagctcccaaagccctctccccaatctttttttattagaagaaaatacttgttatgtgc

SEQ ID NO: 51403 - DNA, 457 bp, Glycine max
  Clone ID: PAT_MRT3847_17430C.1
ccacgcgtccgaagagttgtagcttttaagaccgtgagttgcagaggactaagagggaggctgtctgtaaagcctactttgcggctgggaagaacaggggctctctaacgaatagtttgtgggggatcaacaacacatacactctttctcgtcatggatggaggtgaatggagattaatggatttatagtccttaactatacaggaatatactatcgtaatttacctttgttctttaactgtagtgatttactagataggatatggccttttaccccattaacatcattacacaccttcttaggacagttagaactctactgatgtggagccctccataacttattgttatcgaaccttccattttctccttgctataagggaggcatgacccatccaccctatcatgtctctgctgaatatgctcgttgaagctccaactcttcggacgcgtgggt

SEQ ID NO: 51404 - DNA, 199 bp, Glycine max
  Clone ID: PAT_MRT3847_17431C.1
ttccggggtcgaccagagcgtccgtccacccttcctacgggtgggaaaagaaccacgaacgggggaactagggttagtccccccccctactcgagggggaggtcggaggaaattgggggttgtgatcgtttgaagtttcgtacccaaaggtggccgacggatggggcgttttatccgatgattttgttctagtacccgg

SEQ ID NO: 51405 - DNA, 281 bp, Glycine max
  Clone ID: PAT_MRT3847_17432C.1
acgatggcctaagccgcatccttcaccattttgtctctcctactcctccaccgccacctgcgcctccccctcgccctggcgcgtgcagctcacctcctccctccgcgcccgcccgctgcgccggctgggcttcgccgcggcggacccgctgctcgcggcgagtgtatcggtgcgcgtggcggcggtgagaggaggaagaaagggcgccaggggggcggtgtctatggcgaataagagcgtgggggacctgaacgcggcggacctgaatgggaagaaagtct

SEQ ID NO: 51406 - DNA, 226 bp, Glycine max
  Clone ID: PAT_MRT3847_17433C.1
ggacgtctggcggacgcatgggggacgcggggaaaaaacgagagacttaatgctctatactgggcattggaaattcaaccatttttacggacactacgcgtacgggaagtggttcctttgtagccttatcggatgtatgttgtggccctcatttgtaatggcaagcttgtacctggatatagattgagatgaaatttgatgccttaaaaaccgcctgagtgccatc

SEQ ID NO: 51407 - DNA, 218 bp, Glycine max
  Clone ID: PAT_MRT3847_17434C.1
tttctagcatgtcttattttttttttgactagattggcaagcatgacttgatgggtatgaaagtgattccactggacagagattactcctgatgaacctaaagtggtgactcttattttacttatgaccatggtccctaatgactcttagaatgagaagttgcccggtcacttatctgttgtacgttttgacacacctattatgggggatgggttccc

SEQ ID NO: 51408 - DNA, 306 bp, Glycine max
  unsure (1)..(306): unsure at all n locations
  Clone ID: PAT_MRT3847_17435C.1
gncgtcacntcgagngcgtccgngaagatcannattcggcnagaggtagagaantagctaatgaanaggatgaacnagncngttaagngagtatnntgccnatttnnatgnntcnatgngcatctnggagnaaattnccnatgcanancactgtctntgcngataaagaaacntngagnagcgcngtctgatncatgtnttaaagcttaccangttgntttncagcacangatgacttcctaaaactngtgttccngctgttatanctcctgagnttcagncaaggnnnannctgactncnnaggg

SEQ ID NO: 51409 - DNA, 268 bp, Glycine max
  unsure (1)..(268): unsure at all n locations
  Clone ID: PAT_MRT3847_17436C.1
gagaacacggagagagtntcagagcaataaccacccatcantggctaccactaaagtnancattgtttactattctacgnggcgganatgttgagaagttagntgaagagattaaagggggagctggctccggngngggtgtgggagcanngntatgngaggnccctganacactttctgnagaggtccgtgngaagatgggtacaccnccagagagtgatgncccnnttatcacacccnacgatntcncngngggtgatgncttatt

SEQ ID NO: 51410 - DNA, 431 bp, Glycine max
  unsure (1)..(431): unsure at all n locations
  Clone ID: PAT_MRT3847_17437C.1
cttgcgacaatgaagtccttctttggagctgtcgaagactcgtctgcaccaggtggctggcgtcacgtccccgagcgcattcctgacaactggttctcgcgtgtcgagccctacaaaaacatggatgttaccaacgagattctggcccagtatctcaagtatcccaagctattcggaggtaacgtgggcacgaacaacttcgatgccttgtccacaccattcgatattcttgtcgacggcaagctacccaacgatgttacagcggcgcagctgctttgcttgctttaccagctgggtgtcatggctgttcccagcactctgagtaccgtcactgatatcactggtgccgtgctggatttcggtatcggaaagctgaacccggtgttcaagaacgctggatgcccctngaaggttggctaaacttgaaacac

SEQ ID NO: 51411 - DNA, 350 bp, Glycine max
  Clone ID: PAT_MRT3847_17438C.1
catattgagaaggcgtctgtcatttcatattccgagggatcagaccatctaaagcatgagctacacacaaacttgtaactttttatacccgttaaatgccgttagacaaaccccctaataggaaaacacattaaaaggaaacaagacatagaggtagtaaaaaaacgcgcacccagtctatcataaatgccgcaaatgttaccgttgttcgcagccccgcaattcacagcacacgccctgggtatactgcatctgcgccttttttttcttctcctcgctcacgcccctgcatcaacaagcaatctaacggttagaaaaaaaccttggtgacaacccttttgagggccaac

SEQ ID NO: 51412 - DNA, 135 bp, Glycine max
  unsure (1)..(135): unsure at all n locations
  Clone ID: PAT_MRT3847_17439C.1
gggattgaagaacccnntcagagaatgcaccctcgctcttttcaaggggtcaatgctctnntgaatcactgaagccaggggcccttagttcattaccatcaggagaacctgggccaggnngcattgttatggatg

SEQ ID NO: 51413 - DNA, 137 bp, Glycine max
  Clone ID: PAT_MRT3847_1743C.1
tccggaatagcgggcgcgatccacgctatcgccaagcaaaggttttattttcttcgcggaccgcacaaaacaccaactgtggcggaatattatatattaaacactgcctttacatgcccaaattatggcttaaagag

SEQ ID NO: 51414 - DNA, 130 bp, Glycine max
  Clone ID: PAT_MRT3847_17440C.1
agctcatacaactgatgcctgctatctactccagttgctggtataacctttcatgggaatgccatacatgcacgaggaagagactcctactatataagccatgctttacacctaccatgccttctaactc

SEQ ID NO: 51415 - DNA, 293 bp, Glycine max
  Clone ID: PAT_MRT3847_17441C.1
gcaccagtgaagtgttcgttttgcggcgacgtgagcggttcgctgcccgcgacgttgtgagaagtccactgaaccttatcatctagaggaaggaggaacagccgaggatttagggtttgatgtgataaaatagcgtgctattctctgaaattcaaattttccttatatcttagacagttgaggcagttttcttgttatttgtgttctgataatacgattttctgtatgaagttttcattcttggctcctttattctccaaaaaaaaataaaaaaaaaaaaaaaaaaaaaaaaa

SEQ ID NO: 51416 - DNA, 444 bp, Glycine max
  unsure (1)..(444): unsure at all n locations
  Clone ID: PAT_MRT3847_17442C.1
ctaaacacggaacccggctcgaggtaacatttggatttatnaattannacatnnccacaccctattctatataacnttccctcccttgcgccaccttcctaactcacatttattatttccctctttgccccaaatgtcttcaaccttctcacccctcctcaatctcattgcagtcttcctcctcctcttctnttttcttcacacctgcgaggcacatgacccattcccgttcgaccctaaaaatctctccacccagaacatccccttttgcaacgcttcacttccgataccacagagggttaaacatcttctttcaaggttgacgctgcaagacaaacttaaacttcttgttaacaatccctccacccttccaaaacttttgattaaaacctactaattctctttcctacccactccacctactttcaaatctttcttccccca

SEQ ID NO: 51417 - DNA, 554 bp, Glycine max
  Clone ID: PAT_MRT3847_17443C.1
tgggatgggcaggtttcaacggcggagatccgtacgcggcaaacacggactcgtcgatggcggtgcttaacaccaacatttgcgccgccaccagcctcctcgtatggacgtggttggacgttattttcttcaagaaaccctcagttattggagccgttcagggcatgataactggccttgtttgcatcactcccggagctggtctggttcaaggatgggctgccatagtgatgggagttctttcaggcagtgtcccatggttcagcatgatggtattagggaaaaagctgaaattgtttcaaatggttgatgacacccttgctgtgttccacactcatgctgtggctggccttcttggaggcatactcactggcctatttgccgaacctcgtctgtgtgcactctttctacctgtcacccactccaaaagaggagtctatggaggccctggtggagttcaaattccttaacaaatcgtgggagctttgttcatcattggggtgggacctttggtggtcactttcaattatttgtggggggtattaagtttcata

SEQ ID NO: 51418 - DNA, 216 bp, Glycine max
  Clone ID: PAT_MRT3847_17444C.1
aacgtgaaaggctatcttcttattattattgctatgcggacattgtatcagaaatgcaaattgggggcactttatctcagggaatatcatatactttattttgagggtcacttatacattattgatgtttctcaagctgatgatcctgaacatcctcatgcctttgtttttctgagtgaacactgctttcataaaacttactttttttaaaaagca

SEQ ID NO: 51419 - DNA, 2121 bp, Glycine max
  Clone ID: PAT_MRT3847_17445C.1
cggcccggcgccgatggttgctcttgtccatcattttagtccttacttgcaagattggggtacatttgaccatttgcagaaacaacatttggataatccaaaggatgataatattgctcagcaagctgcaaagcagagattcacactggaaaattttgttaggctttcagagtcgcttaagacaagttcttgtggagagagaataaaggacattatcctggagaagggtataactaaaactgcaatgacacatttgaaagatagttttgccaatactgggcaggctggctttaagaacagtgctgaatgggcacagggtttaacactgccatctgttcctcttatattgtctatgctgagaggtttgtcaatggggcatctgctcactcaaaagtgtattgatgaggaaggtatcttacctttgttgcatgccttggaaggagtttctggagaaaatgaaatttgggaaagggctgaaaatttgttggacacattatctaacaaggagggaaaaggagatggattcttggaggagaaggtgtgtaagctgcgagatgcaactagggatgaaatgaagcgtcgtgctttgcggaagagagaggaattgcttcaggggcttagaatgcgtctagaaccgtcttcagatggaggagaacgtattgttgtttcccagcctgtccttgaaggtttagaagatgtccaggaggaggacgggctggcatgcatggtatgccaggaaggatacagtttaagacctgctgatttattgggtgcttactcttatagtaagcgtgtgaatctaggggttggttcttcgggaaagtgctcgtggaggagagtgtgtttatcccatctgcaagtgactcccaacttaccccggggacagaagaaattgtccaatttagaactgatgctgctttgaagaatccgaagaaagagtgggatggagcaacacgtagaaacaatgaatgtctctgtaattctttattccctgtcagaggtccatctgttcctctggcacagtatgttcgctatgttgaccagtattgggacaaccttaatgctcttggacgtgctgatggaagtagactccgcctgctgacttatgacattgttctgatgttagctcggtttgcaacaggagcatcattcagtgcagattgccgaggtggtggacgagaaagtaattcccggttcctcccatttatgatccaaatggcatgccatctccttgatcaaggaaacccctcccagtgtcgaaccatggccagggccgtatcagcatacatatcctcttcctcatcagatctcagaccctcttctccatctggcacccaacctatgccggggactgaagagactgtccaatttatgatggtaaactcatttctctcagagtcgtacgggtcctggctgcagcatcgttgtgcttttctgcagcgtggaatttaccatgcatacatgcagcacacacattctcggtctgctacccgtgcaccatccgttacagctcctgcacaaggtgtggaatctggaagcatggaccaaactgctactaccgaaacagggcagagtgatcttttgtctattatacgtccaatgcttgtttatacaggcttgattgaacagttacaacgtttcttcaaggtcaagaaatcaactagtgcaacaccacctgcaaggactgaaggggcttcatctactatagaaggggaagatgaaagtggaaatctggaaggctgggaagtggtaatgaaagagcgactcttgaatgtaaaagaactgctcgagttccccaaggagatgctgtcatggcttgatgagattaattctgccactgacttgcaggaagcctttgacatagttggtgttctagctgaggtcctgtccggcgggttcacccggtgtgaagattttgtgcaggctgcaattaacgcagggaaaagctgaaagattttgtgtccctttttgtaataatgaaatattaaaagcataacatatattccgagggaatgtaaaacgcttggctactatgttcttttgaacgtatgaagctgatggagaatgcaagggcggatatttatgatggtgtggtgaaaaaaaaaaaaaaaaaaaccctcc

SEQ ID NO: 51420 - DNA, 1385 bp, Glycine max
  Clone ID: PAT_MRT3847_17446C.1
ttttttttttttttttttttttttttttttttttttttttttttttttttgttttttattttttctaataacaacatatgtatggtattaattcaaatagaaacattctctactacattacagagtcacaaacaagatgaattaatgataaattgaccacggatacaagaacaatagattcgatcagactcaacagctattagaatggaaaaaaaaaaagagggtcgtattgaaagaactacatataaactaaaattattgattaaagattataaacaaacatttctacaatttgtattgaccagatggaaaattactacaatgagaacaaaggttacaccaacattacataaaatccttgtttcatgttcactttctcaacaaagagaaacaacaaaatgaatcacacaagggtaaaattaagagactttttcttttctcttctctcaggcaacaaactcacaattaaccttgtgataataatccaaaagtatacaacaactaatggctaaattaaaaaaaaggtaaaaagaaagatacgaacagtgtttttttgaagtcatcgttgatggagtttggttaggttttcggcgaatttggcgagagattggaggttgcagcggaggatggtgtcgacgaagacgcgcgtgtcctcggtggtgttgccgggggggacgtcaacgacgtaggactcgacgacgacggtgccggcggcggagcgggggtggagagtggtgacagagcggtagttgaagaggcggtggtcgccgccgaccatgctgaagccgatgacgtggcgctcgtcgtcgaggacgtcgaggcgctcggtgctgacggcggcagggaggccggagatcacgcggacctcgcggagggtcccgacgtcgccgtcgccgaggatgacgtggcagctcttgacgaagtgcttgtaggcctgcgggttgtcgaagcgccgcacgacggaccagacggtggagaccggggcggcgatctcctggaccacggcggagcagcactggtgcggggacacgacgtgggtgtggtgccgggccaccgcgtcgggaacaatagtggaaggattgttaggtaacattttttgatttgttgtatgaataataacaatgaatgaatgttttggtgtgtattgagagaaagaaagagagggagaagttaagtgaagttggagggaccagcggacgcgtgggcggatgcgtgggccaccaccggccagcagttggtcgcgacgccatccggcaccgtcataaagacggtgtcgtgggacagttggtggccgtggttgcaccaccgccacggttgatccggtggaggaggagggaagacatggaggaattttgtaggtgcattattgaacaaacacgaccacc

SEQ ID NO: 51421 - DNA, 418 bp, Glycine max
  Clone ID: PAT_MRT3847_17447C.1
ggcacccctaccaggggattttttaaaatccattcgaggttcaaatggtaatagtaaaacaattaaaggtccaaaggccccaacaatgggttaacttaaaggggtaaaaacaccaacaataaacactccgtgtttggaaaaccggacttttttttccaggggcattataaaaacccttaagaaaactacccttcttaatcttcctctttccagcccttaagaggtgctttaggtgaaccaccttcccaggtgttggccaatttttggtcaacaagagaaccccccattccaagcccttcttgggttcctttttcgggacaggttcccttaacatccaaaaaacacgtctgatcaaacaacttggttgctccatccacatgaactggaacagaaaacttagttgggagaaaaaatgcca

SEQ ID NO: 51422 - DNA, 1913 bp, Glycine max
  Clone ID: PAT_MRT3847_17448C.1
gcctcgccccacgcgtccgcaaaaaccatggtgtcaccaatctcacttattgtcctcttgttatcagtttctttagcagattcagcttcagttcaagaaagttttgtccaatgtctcaacttgaattcggacaaaacatttccattttactcatcaatctacactgcaagcaacccttcattcaccagcatccttgactcctccgcacagaacctaaggcttttggtgccttcagtgccaaaacccgagttcatattcacaccctctcgtgattcccatgttcaagcagcagtaatctgctccaagaaacttgggattcacattagagtgcgaagtggcggccatgactatgagggaatttcgtacgtctccgaaattgaaacccccttcatagttgtggatttggtcaagctccgcggcatcgatgtggatgtaaaaagcaacactgcttgggttcaagctggtgccacaactggtgaagtttactacagaatatatgagaagagttcagttcatgggttccctgcaggcctttgcacaagcttaggcattggagggcacatcactggaggagcatatggaaccatgatgagaaaatatggccttggagttgataatgtcctagatgctcaaattgttgatgccaatggaagagttcttgatagggaagccatgggggaagacctattttgggctataagaggaggtggaggtggaagctttgggatccttctttggtggaagataaagcttgttcctgtgccaccaactgtgacagtttttacagttaccaagagccttgagcaaggtgcaaccctagattcttgccaaatggcaagaagtggcaccttatattgatgaaaacctcttcatcagagtcatcattcagccatctagtgatgcaagaaacaagactcagagaaccatcgcaacttcttacaatgctctcttccttggtggggccagaacactcctccaagtcatgaagacaagttttcctgaattggggttgacaataaaggattgcttggaaactagttggatcaaatctgtgctctatattgcaggctttccaagtgacacccccccagaagttctgctcaaaggaaagtcaacattcaagaacttcttcaaggcaaaatcagattttgtgagggaaccgataccggaaaccgggctcgaggggttgtggcaaaggttgctggttgaagacagccccttgatgatttggaacccatatggtggaaggatgagccagttttcagaatctgagaccccatttcctcacagaaatggaacactatacaaaattcagtacttgtctttgtggcaagagggagacaagaatgctgcaaagcacatagattggattaggaagctttacaactacatgggtccttatgtttctagcttgccaagggaagcatatgtgaattaccgggatcttgatttggggataaacaccaagaacagcacaagttacattcaagcaagtgcttggggttataggtattacaagaacaactttgacaggttggtgaagattaagaccaaagtggatcctgaaaacgtgtttaggcacgagcagagtatcccaccacttccactctgaatgaaaaaggaaagaaatgggggaatacggcaccatgctgctacaatcattaagactggttactataaaatttgtgaaagggttaatatgctagtttagagcaaaaaggatacagtacaaatatataattagttgctttgtttttggtcaagttaatgttgtgagatacagattatgttgctaatcgtttgctgtttctgtgatttgtgtatttcactagattgtgtatttatgtatgagtgactgaagtgttgtttctcaagcaaaaactgtgttatatccctaatggtcttgttcttgg

SEQ ID NO: 51423 - DNA, 578 bp, Glycine max
  Clone ID: PAT_MRT3847_17449C.1
ttttttttctggtttaattcaatataaaatgctatttgatgattattgcagtcaaaaagtctaaattttcctatactttcaaatggactatctatgctgcttcaatcaaaagcagggtgtgccatttacaccaatcgctgtaattccatttacatatgaaaaaaaatggacttcagaataaaaatccatcaaaatcattgatgccttttttttttgcttgaagggacttggatgctgacaccaggatttgaattcaactgccatgcattgttgttccatgaaccagtggtttgaccagcaaagttaagcattgaagctgaacacgaggagggagcatttgaataatgcaagggtggaagcttcggtttcagaagtgaattgccaatttctccaaaagtattaggcacaatgcaagtggcatcacattttttgatggctagaggtggaactttgatgttttgtaaatgaggggggtttctccatgtaggaagtggccctgcaaagagcaatgatttgagcaatggaccagcatctatcacagccctgagtaattacccctttgaggcaaacctctctcc

SEQ ID NO: 51424 - DNA, 256 bp, Glycine max
  Clone ID: PAT_MRT3847_1744C.1
ttcggctctagggaagctcgaatccaatgtcaatgtttgtgctggactgtgatgcatagtgaaatactcaacgctattcatcaatctccagtgttgcactgggatcaatgtccactaccatttcttcccttcccttctctctgccccttcgtcaaaagtctagggttaggcttttaatcgattctcgtctgctggtgcatccctgtcgtcagtcacctttcctaaaagatcatgtggtcttctgttgttgaggcat

SEQ ID NO: 51425 - DNA, 290 bp, Glycine max
  Clone ID: PAT_MRT3847_17450C.1
gtgatgcgcgcgcaaacgcgtggggtggagcctaggactcacgctgagcatatgtctctgattgcacaccacggtgagaccgattcctggcgtgtgacgacattagggaactctaaacactgggctgactctgggtaggatatacagtcgtgcgattaagatttacatagcgaggaatcgcatggagaacacacaaagacggacgctagagggaccatgactaaataggaacaagatggtccgttatcacagctggacattgagttcagtgagccgagtactaaggtagg

SEQ ID NO: 51426 - DNA, 444 bp, Glycine max
  unsure (1)..(444): unsure at all n locations
  Clone ID: PAT_MRT3847_17451C.1
tttttactnattggggggggacataaaaaatcccatctaatatttcncgggcttgtttcatgtgtagtattgcatgctatgttatttattntaattntcatcantgtgggggggaganggggggtttttggncctttcngagnnncatatatgcangtggggaataaataaaaatatcatttttntatgctccccagaggaattctcttttattacaaaatttaattttaattaggcttacaagggtctaaaaactttttgtctgacccatatggggtatgggtggactcggttggtcttgacagttttatcttaactggaactttcattcacctttntgcattgaagtactctgcctcctagggtgtgatgactactacttgttttcctttcatacctgggtgggtgtcttcctggtaaacctcaagttggttctggaaacta

SEQ ID NO: 51427 - DNA, 511 bp, Glycine max
  Clone ID: PAT_MRT3847_17452C.1
atttatcaggagaaatacccaagagttatggcagattggctcagctaaattttcttgatttatcaaataacaacttcaatggaagcattactagatagctcggtgattgcaatcgcttaccgagtctgaatttaagccataacaatctatccggggagataccatttgaacttggcaatctgttctcagcccaaatcatgttggacctcagcagcaactctctttctggagctatcccccaaaaccttgagaagttagcatcattggagattctcaatgtctcacacaaccatctatcagggacaatcccacaatcattttccagcatgctcagccttcagtctattgatttttcttacaacaacttgagtggttcaatctccacaggtcgtgctttcctgacagcaacagctgaagcctatgttggcaactcaggtttgtgcggtgaggtaaaaggattaacttgtcccaaagtgtttttgccagacaaatccagaggggttaacaaaaa

SEQ ID NO: 51428 - DNA, 615 bp, Glycine max
  unsure (1)..(615): unsure at all n locations
  Clone ID: PAT_MRT3847_17453C.1
tcgaccatctcctagtacgcggccgctatanaatcgacttattgtttttttttttttgccgcaaagtctggtctatgccggggctttacttcattttacgccaaactggcactttgatgcgcataatttaaggactctaaccacaaaatctattccggccacattatggttctgcaccccttaatagcacatctataaacacaaacaaccctgaacgcttacttattgctcttctttctaaaaaccactaaagaccaatctccttaggattctattacccattgactcatgacgtccattaaccttgtggttgggggcgaatctgactgcagcatgacatttgtctcatggaacccggaggattgggccaatgaaaataccttacagcccttactagatcattgaagcttacggaaatattttcctgcttgccacaaagacaacaccaatgttgtctctcgtgctgaccaattgcgggacctagagaagcttggtactgtgtaacacatagaccctccttttgaaaaagaaccgggatacatccaacttgatgaacctgtagctgctcataaacttgaactgctgcagactcttctgaatcgaggacttatgtgc

SEQ ID NO: 51429 - DNA, 623 bp, Glycine max
  Clone ID: PAT_MRT3847_17454C.1
ggctcgagcggctcgagatctcctttaatttaataattctagtaccctgtattttgttctcaaaacttgctggtgaaaatggaggcatacagaaagagccacagagggtcgtccatgagaggaaaatccttgcctttctatagaaatgcaccaaaattagcttcctcaaccaccgtgcaatacacaacaacagcttcagatattaagacaaatcactattcttcttctcctgcctcagtagggttcgttgtccacgaggactatgcaaccacaaagcgaaatccgaagcttcgcattgtggttgcagacagtaggagcaatttggatgagttgtatcgccagccagccgatgaaagcgtggacaccaaagctgaaatatatattgctatggttcagaaacgtttgatgcttgagcgataaaaacacataaagcaaattttgtgaatttcatgctttcgacatccatgcatctatcattttagtgtagacactatatgtattttagtagctagcatttaataaaataatagtaccctttttaaatttgttttgtcatggcacttcgtgtagatgcaatgatgttatgctgtaataagtatgaattttacatagtagagtttgtg

SEQ ID NO: 51430 - DNA, 751 bp, Glycine max
  Clone ID: PAT_MRT3847_17455C.1
tggagcatcaaatcttgaaaaggaatcttcttggggcaataactttgtcccagatactcatccactacctaatgcagataaaggagcatcagatataggtggtgaaaataattttaccagagaaactcagcctctgcctaatgcagataaagaagtgttgcatattggtggtgaggagaactctgccagagaaactcagtctcttgctattgcagataatcaagcattacaacatgttggaaaaaatgttcctggtcacctaaaaaggcatcaacctaagatgcccccaaccttgaatgagtctaagaaggcaagagagcatatagctgttgcagtaacatcactaacccagaaagcaaagaaagaagataatttttctgtagataatgttatcagggtgcttcaggctataccagacctggatgatgatttaatattagatgcctgtgattttttggaagatgagacaagagggaggatgtttctggcactggcttctcctttgagaaagaaatggttattgagaaagcttcgttcacagtgattggtgaacctcaggctggttcatttgtagtcaggtttttcaagtttgttagactgcatgcacaaaccaagccatatctttatgtgttcacatgtacatatttgaaactagaagattattctttgtttatctttgtcaacattgatataacaagagattaaagtggaaaaataacttctgtctgttaaaataatgtttaaataaaaa

SEQ ID NO: 51431 - DNA, 422 bp, Glycine max
  Clone ID: PAT_MRT3847_17456C.1
aaaggaccattgatggatatattaattaacttaagaaagccaaaccatgtaattactgagagcacatgcacctgagagcttacttaactagggtccatgatgctaattcttcatacatggatagctctggcaggtatcttattggatggacatgcatgccattaaacggattctcatgagcccgcttaagtatgatccggggtgaccccattaatcttgtgctcaatcctcttatgattcaagaatccatagcccagtctgttgacctaactgaaatcaggacgtttgcgccaatgaccgaaattgaatcgttgtagcaccggattcctggtccagtcacatgtgcctgctggtggcggcgcgggcctgcttacaaactggcctggcccattttgatgggccttgttttaatattcaggcca

SEQ ID NO: 51432 - DNA, 299 bp, Glycine max
  unsure (1)..(299): unsure at all n locations
  Clone ID: PAT_MRT3847_17457C.1
cccactcgttcttacataattccatattttatttacaaatatgcctataaaaacatcccgccgtctttattactaggagtgttaactacactaacttcttntctttaaattcttaatcatatttcaaatgctactacttatacaccatctaagttccctccaaaaccttttaaattatactcatatttaaattcttctttctaaaaacctttattttaactactattttaattatgaccttccatactttttttttaaattttcaaatacttatcccaaataaaacatatacttttatc

SEQ ID NO: 51433 - DNA, 199 bp, Glycine max
  unsure (1)..(199): unsure at all n locations
  Clone ID: PAT_MRT3847_17458C.1
ncgtcgcangcacgcgtacgtnagctcggaattcggctcgagcttgtntgcnaccactctgtcnaattcnnaanccttggtagcanangancatagtnattnctatccacaaaananaagattcaactcttccanccatnctnaatgcggntgagatnatgtagcaagacagcgagatgcccttgcnacatttgangaa

SEQ ID NO: 51434 - DNA, 387 bp, Glycine max
  Clone ID: PAT_MRT3847_17459C.1
acgaggaggctttctaaggggggcaccgaaatgaggtttgggatagtgcaaacactactgagttccatcaaacacaacgacgatgagctctgcccggacctaaggacatgatgtctgctaactcagtcggcatcattagcatgctccacagcgctctccgcgtctatgtcacgactctcttctgtgatctccgtgctgcttagaatgccatcgaactccacaatgaatctgatggaaatcagctccatgaatcagtactcttatggcatgactagcgaaccgttcagtacgtgtgtagcggtggaaaccacattggtggctgtgaaacaacaactgcccggcacacacattggaagctggttcctcagctgataccagctggagctg

SEQ ID NO: 51435 - DNA, 453 bp, Glycine max
  Clone ID: PAT_MRT3847_1745C.1
accttgaaaccctgaagttaactcatataataggtgcttcgagtcgatcgtgtatttaccggaacgaataattgccactggggggaaacaccgtaattattgcagcgatagaaagtcaaggtgatagacccagaaaaagagatctgaagaagaaatgtctcgctttctgcgacccactaagagtatggccgtgatctctgcgtgagtcttttacaggatagggctgttaactcgctaggccgcatagaaccacttgccataattgcagaaaactctccgagaattttattgaggaccttgcagcgtgcatttcctggagggtttgctgacaccacactaaacgaaggcttttgtgcgcgccctgcggagattgctcaccgtggctgcttatagtgtactatagaagcccttaactctctctgtggactatggtggggccccactcttactgga

SEQ ID NO: 51436 - DNA, 529 bp, Glycine max
  Clone ID: PAT_MRT3847_17460C.1
ggctcgagacctaacccatgatctgaactcgcgcagccatcatcaccgccgacaacctccgcatcgcgcgaccgtcataccccgtctcctccacgacgcgcaccaccaccactcaccaaataccagaaccacggcgcacagccccactccggccagatccacgtgggacctcctcaacgcgcacaccccaccccggtccgatctgaccccaacgccactctcggctccagccccgcgactaccgcaaaaccacccttgcacctccgtcctctccgccgcgcgtcctcactaccaccatgtccaaacaccactgtggcgcttctccttctcaatgagttcggtgcagcgacattcgtctttttgcaaaaaaaaaaaaaaaaaacattacataacagtagtacgattctggtgtacaatatgcaataaaatcatacttatgctgtggtattttcttttttcaccccacttgtacaaagaaagtaccatcccattgcacaatggaggaatgaatgggtttgaatatttaaaa

SEQ ID NO: 51437 - DNA, 217 bp, Glycine max
  Clone ID: PAT_MRT3847_17461C.1
tactcaccccgacacgttgaaagcggggttggctgagttcatctccaccttaatcttcggagtcaccgattcaagttccggcatcacctacaacaaactgaccgacaacaacaccaccactcccgccaacctgatctccgcttccatcacccatactttcgccctcttcatcaccagctccgtcgacaccaacatctccaacgaccacatcaacccg

SEQ ID NO: 51438 - DNA, 270 bp, Glycine max
  Clone ID: PAT_MRT3847_17462C.1
tttttccagtgctgaagaggcttacaacacgctaacggttgaacttgataaaagtgctcctacattgattggtattgaacgttccaaggatgataatcctttcttgggcataatttgtgacaaacctaagacacgctgtttgagtattctacacgtggagcctaatcttccgggtctgcataagcttccaaattctgtgaggctcattatgaataaaagggacaagctcaattgacaagttgtaatcaacccatactccatggattggtc

SEQ ID NO: 51439 - DNA, 448 bp, Glycine max
  Clone ID: PAT_MRT3847_17463C.1
atgattctcattgaatgactaaaaacactaatctaagccacccaaaaatgggactaagggccagaatccccagcaaattgcaatactgattacactaaatgaaatcgtctacatgctgcggcctcttttttaacctaaattagagcagatctgacaattttttttcttttacctactgctaatgccctaaattacctaaacctacagaggacaggattctcatgaaacatctcattactattagctgttaaacacatcacaattgttacacctgactgccaatcaaatctcatactttttttttaaaaactttaagttaaccttgagagctagaacagtccattaaacccgcctattttgttaaagggcagcaataaaaaaactttacactggaaacaacaacataaattgcctatctactgccacaaacagtgctaatgacccaact

SEQ ID NO: 51440 - DNA, 290 bp, Glycine max
  unsure (1)..(290): unsure at all n locations
  Clone ID: PAT_MRT3847_17464C.1
aaaaagntgagccgcggaggaaaacgcaaggtggaagagcgttgccgccgccgccaagggcccctccgcctcctcccccctcttcgccctcgcctcgaacccgtcgatcgcgaaaagcctgtccgttactggctgcgagtggttccctaagattgggagtcccctttccttggaagaccttgccgtcagaaggcaaagagcccaaagccgaggttcaaatttaccccctggaaagacccctacctctccgagacctcaccgatctttgtcaaaaaaagtgctccggctgg

SEQ ID NO: 51441 - DNA, 468 bp, Glycine max
  unsure (1)..(468): unsure at all n locations
  Clone ID: PAT_MRT3847_17465C.1
tcgcgagtctagagccaattgtggacctagtcagttggggggacccttaatgccaggtggccttgaaggacaaattgggctccctagagtacatatctgcctcnnnccantntacacatggcancctctggccacattgtgacacatgaagctgcnnttggctttgtnnncggacaaccntccagtctgtttttnatnttggacaggaatgtggggttggtnttgaattctggttttcagatttacccattgttcggtgcttttgtgatccgtgnacttntctcaggtgttttgagtgctcattgggaaggggccggatcgtgcccagccccatgatgttaacattctttcctggggtaaccagtcgttggcctgcctngaatctgccccgtgtgacccatcgtggtttgcgcatagttgcctgttttggagcctggcaccctgcccgtgtcgctttctctgtggctc

SEQ ID NO: 51442 - DNA, 164 bp, Glycine max
  unsure (1)..(164): unsure at all n locations
  Clone ID: PAT_MRT3847_17466C.1
angactctttttcngtctcttttaaggacgcccaaacaagaaagggcggcttaagccagaaatagtgaaaaggggggggcctcaaccaatccatggccaactaggaacaaaactagaagacatgggaaccaaaacagggggcaacaaaacgcacacaaaacagg

SEQ ID NO: 51443 - DNA, 374 bp, Glycine max
  Clone ID: PAT_MRT3847_17467C.1
cttttatatattttcccttcggaaagaaaaaaggattaacggggcattgttacaaactctccgcacactttacaagtcaacatcaatacagattagttaaaggggggcagagattcacctctaggccaataatgaaattagaatggggataaaatgggatcggcccttaaattgggaaaccaaaattcatgacgatgccaagccctaaatcagcgtctacaagactacttcccgataaacggccagcaaataaacaggaacctatggccacttcctttggatgaatgaagctccaagcttttcaaaccccggaattgggaaaccacaccttgctcgaaggagccaaagagaagccaaatgaactaccccccgat

SEQ ID NO: 51444 - DNA, 428 bp, Glycine max
  Clone ID: PAT_MRT3847_17468C.1
cccacgcgtccgcccacgcgttcggcaaaagcttcgtggagacttaatatgaaagagtttcatttgtcaagccaaacaaatgatcactaaaatcattaatccttcactttccgtgcctttctttataaacccagaggcattctttcttccttcttttttctgttgaaagttgaaacgtttcttttccttttttgtgttcagttgtgcaaatccaggtagtcatccttcacctttttcctctttttcattatttgaatgtttaagtttctgtactttgtaatggatttgctttgctataatggtgatatgttgaattgtgatgggtctgattttggtctaagtgttggtgtgttgctttgggtaaatctaatggatctttgggtactcttttaaactttagaacctaaattatggatatattattaaat

SEQ ID NO: 51445 - DNA, 1362 bp, Glycine max
  Clone ID: PAT_MRT3847_17469C.1
gactaaaagctgcgaatcaacgtggaccactcaccttcttgtctttcccctttcatctcttcaattcaatactcacacacaaagttccctcctctccaaacatggcggcaattttctcttcttcactcttcgcttcctcgcctcttcccaaaccactttcttcctcctattctcgaatccataccgctccacaacttttcagggctcgatcttctctccttcaggataacgagaaaaaagtgatcgtgcatgattccttcccctccaaaacctctcctcttcacaccgctgataaatcaactggtggaaactcaattaacacctctgcgttcgagaaacggattatcaaggtcgaacaatcggtcaatatctttcttacggattccgtgataaagatacttgatactctgtaccatgatagacactatgcaaggttttttgtgcttgaaactattgcgagggttccttactttgcctttatgtcagttctccacatgtatgagagttttggctggtggaggcgggcggactatctgaaagtgcattttgctgagagctggaatgaaatgcatcatttgctcatcatggaagaactaggggggaatgcttggtggtttgaccgctttctcgctcaacatattgcaatattttattatattatgacagtgttaatgtatgcagtaagcccaagaatggcatatcacttttcggaatgtgtagagagtcatgcatttgaaacttatgacaaatttatcaaggtccaaggagatgaatttgaaaaaaatgccagctccagaggttgctgtgaattattatacaggagatgacttgtatttatttgatgaatttcaaacttccagagttcctaattcaagaagacctaagataaagaatctgtccgatgtatttgtaaacatcagagatgatgaagctgtacattgtaagacaatgaaggcttgtcaaacccatgggaacctccggtcccctcattcatatgcagaggatgatgacagctcagtctgtgctcttgaagcagattgtgaaggaatagtagactgtataaagaaatctgttacttttaatgcagctaaggtgaagtaagataagtggcccaatacatagtacattcatttaataagataggaggcagagaataataattggaggtagtaaatagttgaaatttggataaggttgctctccggtgtaattgtctttatagaaagtaaaggtgtattcacccttaaattttctaagatcaagatcatgaaatatcttatagtgacaaccttctgttaggttaaatgttcataccacactctgaggattatcaaagaaaataatattttggagattgtctat

SEQ ID NO: 51446 - DNA, 1334 bp, Glycine max
  Clone ID: PAT_MRT3847_1746C.1
ccaacccttctgctctacgtggtcctgtgcttctcacgccctgggtcggcgggggtgaggctggtgggcgggaaattgttgacagggctcgccgtgcggctccacgtgtcccattcgttcaccctctaaaatttgagaagtttggaatgtcaccttcgaagggagtcctcttttatggacctcctggttgtggtaaaacgcttttggcaaaagctattgccaatgaatgtcaagcaaacttcattagtgtcaaaggtcctgagctactaacaatgtggtttccagctcgtgaggctaatgtgagggaaatttttgacaaggctcgtggttctgctccatgtgtcctattctttgatgaacttgactctattgcaactcagaggggtagtagtgtcggagatgctggtggtgctgctgacagggttttgaaccaactgcttacagaaatggacggaatgtcggcaaagaaaactgtgttcatcattggggccactaatcgaccagatattattgacccagctcttctgcgtcctggtcgtctcgaccagttgatttatatccccctcccagatgaggattcccgtcatcagatatttaaagcctgcttgaggaaatcccccgtgtcgaaagatgttgatcttagagcacttgcaaagtacactcagggtttcagtggtgctgatatcacggagatttgccagcgtgcgtgcaagtatgccattagagagaacattgagaaggacattgagagagaaaggaggaaaagagataaccctgaagcaatggaagaggatgatgttgaagatgaaatagcagaaatcaaggctgctcattttgaggaatcaatgaaatatgctcgaaggagtgttagcgatgctgacattcgcaagtaccaggcattcgcccaaacattacagcagtctagaggatttggaagtgagttcaggtttgcagattccacctccgccggtggtacagctgctgcatctgacccattttcctctgctggtggagctgacgaggatgatctttacaattagataaacttgtatgcctgttatttgttcgtatatgccgtgctatcttaattatctacttctcatttcgtgtatgcaaatgaggtctgtaaacgcttcctttggattattattgtctattgtttttgcaaacggcatttgttcatatggccagagcattaggttcgagcctcttcgaaagttgacaaaaatttatttcagttttattgtattacttgacagcttttgtagctttgctgctcaatttccaagtgttaacactttatatgaacataattttacacacaaatttatgct

SEQ ID NO: 51447 - DNA, 213 bp, Glycine max
  Clone ID: PAT_MRT3847_17470C.1
cttaattgttaattctggtaaattatagtgtatgaacttttaaaaacaaaaaaaaaaaaaaaaaaaaaaaaaaaaaaaaaaaagaaaaatagaaaaaacaatagaaaagacatagtcccaggggggacgaacactgggctatggtgccgtactccggatgtgaaatgcgcaagttggcggcgtgctgtcgtacgccacaacatctgtcgcttc

SEQ ID NO: 51448 - DNA, 289 bp, Glycine max
  unsure (1)..(289): unsure at all n locations
  Clone ID: PAT_MRT3847_17471C.1
tcgcangcacgcgtacgtaagctcggaattcggctcgagccagcatggattacttgacaaagagacacngtgcagagggtgaccacagactgtaactccccacttcaacacaaagggtgtcgttcttttccaacaaaatagccaccccttctccttcattgcttttgacttttcaatgggtgtcctaggaaccttctagaaagaaatggacttgcatcctgtaaatatattaactgttaaaaagaaaacattgaaaatgtgtttgggcaacgtcatcccctggcaggct

SEQ ID NO: 51449 - DNA, 383 bp, Glycine max
  Clone ID: PAT_MRT3847_17472C.1
gtggtcaatgagtgaaaaaaagaaagaaagaggtgaggtagaataactaccaaaagtaattagtcaaagtgtcaaaccataattctattttacctgttaatgctacgacttatgggataagagataatgggggcagaaatctttttctatttcagtttttttaatattaattagtacaataatgttgtgaatagaaagcagtactgctataaatttaaattaatgttagtacagttttgaaataagaaagtcgcacctatatcatttagttgacttcaaacgaattttgaatattccaaacaactgcttgtgcttttatcttttttcaatttcatgattgatacattatcaataatttacgtccgtgtttctacttttcaatc

SEQ ID NO: 51450 - DNA, 671 bp, Glycine max
  Clone ID: PAT_MRT3847_17473C.1
actgccctcgccgccgaccgccgcgctcccggtgactcgattctcgccgccgcccccgtccctcgcattgcgcggagccattccttcgccgcgccgccccgggttgctgcaacttgccgccgcccccctcgcctccggtgattttcgtcaccgcaccaccaccttctctgctcgctgaagctttgttttttctgggtttggtctttataagaaagaagtatgcctcatagaacccgacccatgacggcactcttgttgttcaccgcactaaatacagttttatgtgcaaccattactccagtctatgattttgtttgctttcatccgtattgggaaagaagggtgcgatttttgctcacttccttttcgacgtaactatttgttttacttttctttgttccgttcccatcttctggtttccttatgtcaatgaataattgaaaattatgtgagattaccccagttcagctggagcactgttgttattgtcctaatctttccatagaggcatcgagcagatctcaatttcattaattcttcaacttggttatcgactaccatgactcttttttatgttaaattggttacaaaagacaacgcaaaaagaccaataatctcaaaatcctctcttggcttcatgatcggataattgcattcagcaacatgaaaat

SEQ ID NO: 51451 - DNA, 259 bp, Glycine max
  Clone ID: PAT_MRT3847_17474C.1
ttccggtcgacacgcgtcgcgaccggcaacattgagtatctgtggggtgtacagagtggacttcatatagctgtcgtgatactcttcctacactagagatgccatctctaagagaactcttcttatagaagcataccatactatattgtgtgaggtggcatgcataatctattgactcagatgacactgtacacacctactgtatgaatcttgactctagagtactttatgacgggaatgtcaatgatcaccatgaaaa

SEQ ID NO: 51452 - DNA, 232 bp, Glycine max
  Clone ID: PAT_MRT3847_17475C.1
gggaaaaaggaaggcaaaggcaaagcctcctccaaaaaagcaaagggataagctcaataccgccttcagttgccctttctgcaatcatggcagcagcgtcaaatgccgccttgacatgaaaaacttgatagggaaagctatttgcggaatatgccaaaaaagctttagcactaccatcacagttttatcaaagccaataaacatatacagggaggggattgatgaatgtgaa

SEQ ID NO: 51453 - DNA, 434 bp, Glycine max
  Clone ID: PAT_MRT3847_17476C.1
ccccccgattgcggggaaaaaaaaggaggggggtttttttttatccatttccccagacaaatccaacatttttttttgcaatcaaaaaatttttttttgactaatccattgggggggatatcccttttttttttcccaaacacatttttttgggccgaaccaaccaggggccaacttggggtaatggcaatttaaactagcacccagatggcccattgtttttgtcgaaataactggcctaggttttttttgaaaggggttattacatgcactgttgcataatgaacacaagtttgagcaatgccaggaaaacctcgaatttttgcattagtctcaagctcattttgtttaaccacttttttttgtggaatcatttttagaccggcattatctggatccggtattacctgtttttcttccacgttgtcagtttt

SEQ ID NO: 51454 - DNA, 326 bp, Glycine max
  Clone ID: PAT_MRT3847_17477C.1
cggctgcgagaagacgacagaagggatactagtgcgttaactatttattctttgaattaataatgtatactagcagagtgtcatgtaattataagcggtcacatataaggagtttattaacatttataatagtaactattttaacaatgatgattccattgattgagagtaaaaacttctacaccaatatttttttggtacagtatgatactatatgtgtattaaactctttgcttttattgttgcatttgtgtttggagtatgataaagtgttcaaagaacgggggaatcatgattacaatcactggctctggaatatcaattac

SEQ ID NO: 51455 - DNA, 329 bp, Glycine max
  unsure (1)..(329): unsure at all n locations
  Clone ID: PAT_MRT3847_17478C.1
cccctaaattttggaggaaaacattgggaagggtcataaaaattttttttcctttgaaaggaccttgattttgaattttatgcctttcaaagggtttgaattttcgggaagggggtacccttgaataaaaatttaaaaggccctttttaaattaaaaaaaaaatcaattaagggtaaaaattaatttcatttttttcaaattttaatttaataaaaccctttagcttattaaaaataagggaaaaaaatttaatggttattaaagggaaagggaccttgntccaaccattcaaattcaaaggaggtttaaaattttggaaccaatttca

SEQ ID NO: 51456 - DNA, 1007 bp, Glycine max
  unsure (1)..(1007): unsure at all n locations
  Clone ID: PAT_MRT3847_17479C.1
cacgcgtccgctctgcataatttattccaaagaaaaaccatcacccaccacttgtgacactgttttctgacacagacaccattccttccgcggcttcactttaccaccagaacctctctctctctctctctctctctctctctctggaattcaacacgcgttgtggattaaaataaagttaacatctttttctttattttcttctcttcccactacaaagcccaccttcatttttccacctctttattttcccaaatctccatctgggtcattagtttctgagcctctcttgtttttacaaccttttactccattcctcataccaacagagaaaaagggttggttccttttttattcttgtctccttattttgtttcttctgccactcattgcttgctgagagagccttttgttctgagtttttggtttcttggtgagtgcttctgacaatatattggaacttggttttggggattggtgcttttttagggtacccaattgagcattttttttcttcttaaacccataaagtcaaagctctcatctttcttatgttgtaaacaaggtctatgagttgttccttgtagtgcagacaagggcatggtctttttgcagagtttgagtgattctgctacttactatactagttagtttgacatcttgagcgggtgtagaatgggatctggaaatgaggttcactcaattgtggagttcaatttggatgctaagtggcttatagatcccaagcaactatttgttgggcctaaaattggggaaggtgctcacgccaaagtgtatgaaggaaaatataaaaatcagaatgttgctgttaagattattataangggtgaaaccccagagcagatttctaggagagaggctcggtttgccagagagattgccatgctatctagagttcaacacaaaaatctagtcaagtttattggggcctgcaagaacctgttatggttattgtaactgaacttctcttaggtggacattgcgca

SEQ ID NO: 51457 - DNA, 1958 bp, Glycine max
  Clone ID: PAT_MRT3847_1747C.1
aaatataagagttctcatattctcaatcttattacaagcttgtgcctgcttctttgttccataggttcgtaccttacattgctgctattgacacaagggtgtgttgttttgtttttatcatcattgagaactaattaaggtacgtgtaaatgggtaagaagcttgatgctctccttggtagaaccttcaaggttgcaaagttcaaggctattgttaaccttgccatctcgcgccttgccgttctcaagaaccagcgccaggctcgccttagacaggcccgttctgatatccttgaactcctccaaattggacaccttgaacgtgcttcgcttcttcaagagattcgtgcaattttgacatcacggtttggcaaggagtttgctgctcgatctattgagttaaggaacaactgtggagtccatcctcaggtatgtatctgatatgagaatgaacaacttaataaggcaaatattgttgccttctaagtattttgtaatgtctggtagacttgttaaaaactaagatatatgtgcaagctagaattcatgctgaggctaggtaattgctttttgatatttttgataaagttttatctggagactatatcctcagtttatattaaaattgtcaacaaagatgccaaggctatagtgcagaatgaaggtaatcaaggacatcagtattgaggatggtaaagtcctggcttttgaagatgcttctgtttcggatgtggaagaatcctgtgtagaagagcaaaaccagcatgaatctgagaagaaagaagagaatgtaagcatgttgcctaatagagggaaagatgagaagttaactgattcctacaagggaaggaaaaagtacaaggacgtagctgatgcagcacaagcagcttttgagtcagcagaatatgctgcagctgctgcaagagcagcattggaactctcccgatctgaatcacatgatcctgatgatcattatagtccaagactccaaccaagaaaagtggaggatgagacatgatgatgtgtgctgcaagagcagcattggaactctcccgatctgaatcacatgatcctgatgatcattatagtccaagactccaaccaagaaaagtggaggatggacatgatgatgtgagacctcaactggaagaaaaggaaatcctcagtgaaactcaaagggaagatgagttagaaaagtcagaagacattataagttgcaattcaactgatgaggctttgaagggggctactgccttggtagatggtgaaattgaggctgatcctttggaagaggaagtggttttcgacaatagtgatgatgagactgataataaacagaatagaaatcaatctcctaagtggacatcttcagggtatggtgctggtatagtagtaaatacaacgcctcagttggatttgcagaagaggcctatttcagtgaggactagatgaatgcaaaattactgagtatgagtggggcatctattgaagttttgcttggttctttaaattttgtcttatggatttgccatcagaatgtcaatatgtttttcattatttaaatgattaattggattagttggatttaaaaatagagtcagggattcccactctttattgcaattacaacataaaagtaggcaccctctagacatggacataggaaacagattgatatttaatcaaacacagaaatatgactgcagaagaaaccttaataaacataagagaattctaagtcacaacttgatctacgatgggatgccatattgacattagattaaaccaactattaaccatcttatgttatttcgtagctcagattgtcaatttaaaacataatagtagacaagtttatcaaatggagattcaaatcatgaattgccaagctaacttttgaattatgaatcatttgtattgaatcataagattagagacaataaaaataacttcaaatct

SEQ ID NO: 51458 - DNA, 1340 bp, Glycine max
  Clone ID: PAT_MRT3847_17480C.1
tccgggtcgccacgcgtccgaaaagcttctgcacagctaacatgagtcccgcatggctattattgttgacccaaattcttctggtggcggaggcaaagaaaaatgtcccagccgtgattgttttcggagactcctctgtggattctgggaacaataacgtcatagccacggttttgaagagcaacttcaagccctatggtcgtgacttcgaaggtggtcgtcccacgggacggttttgcaacggtcgtgtccctccagatttcattgctgaggcttttggcattaaacgcgcgattcctgcatacttggatcctgcttttacaattaaggatttcgccactggggtttgctttgcctctgctggaactggatatgataatgctacttctgctgtactaaatgtgataccactatggaaggaattagagtattacaaggagtatcaagccaaattgagagcccatgttggtgtagaaaaagccaacgagatcataagcgaagcgttgtacttgatgagcttgggaaccaacgatttcctcgaaaactattacgtgttcccaaacccgaagactccacttcaccgtgtcacaatatcaggactttctattgcgtattgcggagaatttcgttagggaattgtacgcacttggagttaggaaattatccataactggtcttgttcccgtaggatgtctcatagtccataactggtcttgcatccttggcgatgatggttgcaacgaggaatacaataacgtggctatgagcttcaataggaagttggagaatgtgatcacgaagcttaatagggagcttccacggttgaaagcgttgtcggcaaatgcatattccatcttcaatgatatcatcacaaaaccttccacatatggatttgaggttgtagagaaggcgtgttgttcgacaggaacatttgagatgagctacttgtgcagtgacaagaatccacttacatgcacagacgccgaaaagtacgtgttttgggatgcatttcatcctacggagaagacaaatcgcattgtctcaagttatttgattccaaagcttctagaaacctttagatgatgattatccattattttccatttgaaaaatcacatagtcttgcctagggcgacatgaaaaaaaaatacatttagcgagatttaatgtcgggttgccatgcttgatatggatactttttttgtgtgttcaattgttataacaaataaatttacacctgaaatcatgtagtcatgtacacccacatttgaccttttgtaccttcccatgctatactgtgcttgggttttttcttccattgattcttgtttagctttgcc

SEQ ID NO: 51459 - DNA, 177 bp, Glycine max
  Clone ID: PAT_MRT3847_17481C.1
aaatgaaatttgggagaattatatatttgagtatcaagtactaatattgaaatgatctgattttgttgacaaactctcaacaaaaaacttcaaatatgacgcaaaatttccattgggagattgtgatccccaaaagaaagtattaaggactatgcagctaagagtagttacatttac

SEQ ID NO: 51460 - DNA, 542 bp, Glycine max
  Clone ID: PAT_MRT3847_17482C.1
gaagttggagaatgtgataacgaagcttaatagggaccttccacaattgaaagctttgtcggcaaatgcatattccatcttcagtgatatcattacaaaaccttccacatatggatttgaggttgtagagaaggcgtgttgttcgacaggaacatttgaaatgagctacttgtgcagtgacaagaatccacttacatgcacagacgccgaaaagtacgtgttttgggatgcctttcatcctacggagaagacaaaccgcattgtctcaaattatttgattccaaagcttttagcaacctttagatgatgatgatccattattttccatttaaaagatcacatagtcttgcatagggcaacatcaaaatatacatatagcaagatttaatgtcgggttgtcatttttttaaatgaatttatctttacattttctattgaactgtaattatatatggaaataaattttgaaaaacatgtcacttgatataaatttaaggatcaaattcaacctttgatcttttatttatgttttatcttaaaaa

SEQ ID NO: 51461 - DNA, 176 bp, Glycine max
  Clone ID: PAT_MRT3847_17483C.1
cactcttcgttttgctttttcaacttaaccttttctactggtaagggtaacaacttgctagaataagataaagaaagagtaaaagtgtgtgtgtgtgagagagagctatggctggcttgtgggcacgcctttctctgattgttctggctttgatttgctacgcgatgtttatatgc

SEQ ID NO: 51462 - DNA, 327 bp, Glycine max
  Clone ID: PAT_MRT3847_17484C.1
agttccttcgtcgagcaaggaagcgttggacattggaagcgcggtgagatctgagatcatggtttggaaattcatgagggactcgagacggccctgagatatctcggcctggtaaggagtgtactgagtgtaccaggcggggttctccatgatgttccgcaagatcacgggcggcacgtgcgtgttgtattaccccatcccgatgtacgacttgaagcacttgttcttcgacgccaagctgttcatgtgcgacgacatttccgactccgttagcccctcgttgaagacgctgaacgacatgtcgttcaaacggattgatttcgggac

SEQ ID NO: 51463 - DNA, 365 bp, Glycine max
  Clone ID: PAT_MRT3847_17485C.1
gcacacattttcttatctccgctccccttgcggtgatggaggaatctgaatcctttgctccatgccacggtggcattagcaatattactctgtctagactcctaaatttttcatgcttatcttgtgcaacactctctttgctagtgcgcgcgcgctaaaactgtaacaagtttaggaagtgaatgtatctatttatctgagttatttgttcgctcactgcaactgcaaccaccgaatgcgaacaaaaaaagaattaaaataaagctgtgggtagagaagatctgggaatcttagagtaccaaattagatctctcgaatgtctcaaatcgagagcctcttttcctgtcgcaactacaattgctagg

SEQ ID NO: 51464 - DNA, 317 bp, Glycine max
  unsure (1)..(317): unsure at all n locations
  Clone ID: PAT_MRT3847_17486C.1
gaaaaactttagagaccgaggcagttaaaactccctaggatcaaagaaggaaccccagcgtttgtagagagcaaaaacccactccgtcggtggccaagccactgggcaacacccaaggacggaaggaacctangttatgctttcttttccgtaaagaaaagtatcctatctttgacttgtgatagtaatctctatgcttaatcacattttaaaataatgtttccatatttcaattgacatcacgtggtgttcacccatatttcacactattaaatgaattgtagaaggtttagtgtatcaactaagatccaaanctt

SEQ ID NO: 51465 - DNA, 798 bp, Glycine max
  Clone ID: PAT_MRT3847_17487C.1
aattcggcgccagacggctgcgagaagacgacagaagggggagttagagaagaagaagaaagagcaactcagtaacgacgatgctggagttggtgttgttgtacaagaacccattgctccacacatccctaaccctaatcctcgctttcaccttcgccttcttcaagatccccctcttcttcctccacggcctccagacctacatccaccccgactcccaaccccaatccaacaatggcctccgagccgccatccgccgccccggcagcatcgacagctaccaacccttgtcttccaaaaccgccgccgaactgaaaaagcggaacaagtccaacaacaagtccgatttcgatgaaaacaatgctcagatcttcagaatcacgctcgaccacgcccacctccagtcccgtctcttcatcgatcagtactgcgtcgctttcactctctccttcgctgccctttccacccttttcctccacaccttcctcgattccccccagaatcgtgggttcttctccaacggcgttttcgttcccgttctgttatcaattttgagtctttactcgtggggctcgctgctcgccaagaccacgttcgagagatccgcgtccaggaggttcgagaagcaattgagtgttgttttggggggtttgggttttttttagggcttttgtttgctcctgagggtttggctttggttttggagtttcgttctggggttcagtttgatgggttttggagggttttcgttgctgcattgatgggctgcctttctgggtttttgttgatccctgccag

SEQ ID NO: 51466 - DNA, 1050 bp, Glycine max
  unsure (1)..(1050): unsure at all n locations
  Clone ID: PAT_MRT3847_17488C.1
acgagatcctgaccatgctttaggaaagcagcctcaggaatctaaacttgagccacgtgttgcaaaatttatatctcttgtttgcaatgtgagcatgatgaatcaatgatatgcttgacattctgttgattaatttaaatcaatgatatggtttccttagattcagcttttggccgtcaccacgcatgctcgggcagctgggttcctctttcttggcttcccttattgtctcgctcggttggctttggcctcctgtgccgtgggatccgtaccttcgggtacaatgcgaagaagttgccccttggaaaattgagcaaatcaacaattttgaagggctatgaagttctcaaaagattggctaatgtgattgataaaggtgataggaaagttctgaaacaattaagtggagaattctacactgtaattcctcatgattttggattcaaaaaagtgagtttgtgatcgatacccctcagaagttaaaacgaaagttagaaatggttgaggctcttgctgaaattgaggttgccacaaagctcttgaaagatgacgcagaaatgcagggagatcctctgtatactcattatcaacgccttcattgtgaactggcaccagttgaatttggttgtgtggaatttcacttgattgaagagtatacgaagaacactcatgcagaaacacattcaaactatactgtggatattgttcaaatattcaggacatcaagagaaggcgaggcagaacggttcagaaagctcgctaggactaggaggtgctgcccttggtccctcggttccccgcgcacttgcgggtcggctcgttgttcccctgggttgcccctagcccctcccgggccacctgggcctgccttcgtgcttggaatgcgggggttctttgctggcgcggtctcggatgcgccatattgttcccttgcttctcgatctgctgacgacggggtgccccccttacgtgtgcttggttcttggctactgcatcttctgctgcttcgcaaagccaannngcgatgattattatcaatgtcaagtattt

SEQ ID NO: 51467 - DNA, 253 bp, Glycine max
  Clone ID: PAT_MRT3847_17489C.1
caaattagttcattctctttgcgcagttccctacctctcctttcaagatgcagatcttcgtcaagaccctcaccggaaagaccatcacccttgaggtggaaagctctgacaccatcgacaacgtcaaggccaagatccacgacaaggactgaattcccccggagtagcaacgtcgcatcttccccggaaaccacctcaaggacggccgtaccctcgccgacagcagcgtcagaagggattcacccctgcacct

SEQ ID NO: 51468 - DNA, 1631 bp, Glycine max
  unsure (1)..(1631): unsure at all n locations
  Clone ID: PAT_MRT3847_1748C.1
ccacgccgtccgcaacatatctacaaaactcattcataactaaaatccttccattccttccacaaaagtctcaaacaacaaaccctatcctcttaccagacaaacctccttttcacgcttttctgttactttgcagcataccacttcactcatcacaaaccaacctttatcattctttattctccctcaccaaacaaacccaatagagaaaggaaaagtttttttcatttgggtcaccctacacaacacaacacaaccttgctgaatggaaaactgtgtcttccaccaccaccttaggagcatgatcactcttccacaaccaccatcaacaccattgttccccaaagttatgagggtgagagcgagcgcgggaaggaggcactgcgagttcagcagccagaacgcgccccttgagccacggtcccttgtggggaagtttctgagcggcgtgttgcagaaccgccgccagctgttccacgtggttgccaaagaagagttgaagatgctgagtgatgacagagactctgctcttgctcgcatgcatctcagtcagcactctgatgaagccttgcttcacaggagaattgcgcaagtgaaagagaatgagtctatgattgctatagcggatgttatgtatttgctgattttatacaagttttctgagatcagggttaatttggttccaaagctttctagttgcctatatgacggaaggctagaaatattgccctctaaggactgggatctagagtctattcacagcttggaggttttggatatcataaggaaacatgtcagtactgtgacaggtttgagatcaaatcctagtgtaagggagagttggaaaacaactcctattcgacaagtctggcttgcccaagtctatgttgcctccatattatatggttactttntgaagtcagtttcattgangtacaacctagagcgaagtctgtctttgtctgaccatgattttcatcatggtcataagattagcccttcatttcatgacatgtatcattccggggcaaaagatgtgatgtttggccccaagagtgacacacaatctgtatggcatgggctaattgggcaagaagaggaaatcggggatttaaaatgttatgttcctggctttccccctggatcatttgagaaatgtgcccaactgagatccaaggaagctgtgcttttggtagagagtcatagtaatgccctctttggagatgggaaatttggtttgtctcagcatgatgatattattggaacttcattttctagtctgagggggctagttttggaagctgttgcatttggatctttcctgtgggggccagaagattccattgccagggtatataagcttaaagatcaagaggtagagtgaaggaacatgttgttaggtaaataaatttttcccctcgggccaattctcattgtatataaagttagttagatttaggcaaatttattttgtataggatgccttccctttaaataatttatagttttaatgcggttggttagctaaaaaagaatgagattttaaatagtgccaaagaatgtccttatgaaaaaatattttacttgttcaaaaaaaaaaaaaaaaaaaaaaaaattgaagttgttccgtt

SEQ ID NO: 51469 - DNA, 293 bp, Glycine max
  Clone ID: PAT_MRT3847_17490C.1
aaaccggcgctcccgcaccgccctgtacactgtgtctcagacctgcccccaaacgtcaaatgatgccttaaagacgcagcagcaaagatcctactttgatgacacaagcctgcagtgtctctacacatccataaagaacggactggagacactaatgcacctggaacagtgaacgacacacgtgactgaccacccaacatctgaccattacgccaccctgcagcgctcttccctgagatctatcgctgcccagagtacactaactttgcccctctatgtgctggtccataccc

SEQ ID NO: 51470 - DNA, 466 bp, Glycine max
  Clone ID: PAT_MRT3847_17491C.1
tggggtggccagcggcggtgtgtaatcatgttgttgctcaagcacgaggaggtaagaggggccggcccggcaagtttccccggcaactcggctacatagtatcctgaggtgaacactcgtgtctgtttgtaggtagcgttcagtgcgatcatccaccatcccgacggctcgaatgcttcggaatttggtcttctatccgcccgcgccactgggcttggtgcaacctccgactttggtaccatggctgtggttgtctgccgccgccggttggtgacgggtggtatgtggggtaggatggggacttgctagacggggaaagatcaaataggaaatactcatgggcgcatgacggaacagtattcgcgtggtggtggtggtggtggtggtggtggtgatgatgatgatgatgatgggggtgttatagaagcagctgtacaagtaacaaccggtttatgcgtcgggttat

SEQ ID NO: 51471 - DNA, 376 bp, Glycine max
  Clone ID: PAT_MRT3847_17492C.1
ggcccagacataacagttccgattgtgtcaatgctggagcatgagaattactctctggtgatcccacgatcggtcttgctgtaccgggacactgctctagatatccacttgattgcatctatttatgtcgcaatcaagccaaccgaggtgtaagatgctcatccagaaactatgaacgctcatgttcatgaggttgtgccctatgatacaattggaccatatcatggtagtacgcactgacataacagatcgtcagcacacgattgggatgctaccaaaagaacgcgtaagattatgacagctgccgtagtattacatgatgctatgtcagtacaggaatctgttgatggatcacctaatgatcctacgtgtgctc

SEQ ID NO: 51472 - DNA, 538 bp, Glycine max
  Clone ID: PAT_MRT3847_17493C.1
gcaccagtatgagaataattaaatgaagagcttctcaaagttcaatactaattcctagtttcctaataatgatttctttcacataggctccatatctccttactactataatgcacttgtccaggtgcctcagttcccaaagtatgaattagtttattcttgatctttttctttaatcaacccttgtgatttttttggtatttcaaatgtcattgcatggttttaacaatgaaataaatatgctgaaaaccttgcaaactttgtgattgagttgtttttgtactttgaataagataatgaactgataactaactgtaagtatattgtcttctggctagatccaccattgtcacaactcctgcttttattgctgacatttctgtaatttttgtcattgcctttgttattttgaaaatttctttttgctaatgagaaaatttatgttcagttcactgatgctcctttccgcactttctggcttgccattaaaggtgctgttcgctcaacaacctttttgtctgcttttgttggaatcttt

SEQ ID NO: 51473 - DNA, 259 bp, Glycine max
  Clone ID: PAT_MRT3847_17494C.1
tgcgagcgaagccagcgctgagatgtcggaggacttgtcgggtaggagagatagggcgagcccttgagtgacgtggccgctcacggcggcgtcggctacttcaaccgatccaggttgctcagaatcatggccgctgaggccatggagtcgttgggcaagagtcagaaagggaagaagctcgacagtgtgctcagcagcaggcagggcctaatacgaggcgagaatatggatgctggacgggatgtctgacacggggggt

SEQ ID NO: 51474 - DNA, 342 bp, Glycine max
  Clone ID: PAT_MRT3847_17495C.1
tatgcttattagggtaggagggttcttagaaacattatgtgctatttgtccaaagaaagtttatgtacgccaattgaggagaaattgcattgaagtggtgtactaacaaactacgaggcctaatctccataagtaagttgaattttggaaattagtaggatttagcaaaggagatagaatgaactgagttctattactttttaactaatgtttaacctttcattaggtgaggttaatgtaaaattgtccttgccaacatcttttacattccccacttcataatcaaagtggaattgttgggtttatgcccaaggaaaaagaagcgttccaaattttaaaatt

SEQ ID NO: 51475 - DNA, 213 bp, Glycine max
  Clone ID: PAT_MRT3847_17496C.1
acccctgcggttccggtccggggtcagactagcggactgaccagctgaccggcctgcggtcgtccttttaacattttatgggccatgccgcattttagggggacagagcactggtaacagtttataaactattaaaaactttcactggctcttgcctgatttcataagtaatggcacaataaaggaacatgcttttcccgcctgcacaccatt

SEQ ID NO: 51476 - DNA, 604 bp, Glycine max
  Clone ID: PAT_MRT3847_17497C.1
gttgcttcgtccaggttcaaagaaaactgcgcaaagcttatttattttatgtaacagtataaaaacagacatcgtaagaattaagaggcttcggtacaatctatggttccttcgtaaccaatcaattttttttttcaccttcaaattcttccaaaatcacgttattcagggatagtatcatggcaactgcaaccatggctactgcagcaggtgcagctgcccttttgtactacacattgaatcggaaattgcagactcacgatgcaatcgacgaagatggtgaagaaaatgggagtgatacgcccactgatacgccattaggtattggccgtgtttctcatcggttaatccaagcccctgcaacatggttggagacaatttcaacattgtcagagactctcaggttcacgtattcggagacacttgggaaatggccaattggggatttggcgtttggcatcagctttcttctaaagcggcagggaaactatcatgttgacagtgaattttgtggtacggacagtgtacagctgaaaggatctgagattactgctgaacttaagtatctcttaaacttgttgacattggtgttggcacttttcga

SEQ ID NO: 51477 - DNA, 2379 bp, Glycine max
  unsure (1)..(2379): unsure at all n locations
  Clone ID: PAT_MRT3847_17498C.1
atcgnctactcgtccgacttaacctgtgttttgtttctactttcttcgatcatatgaactctcttttgtcttctctaaaactcaatatcaaaccaacgagctcaaagaaaatcgaggcaagtgtaagctagcaagaggaaattaaaaacctccgtttagttgtgttttcagggaaatgattgcacagaatatagactcagcaactccagaaccacaggacgcagtagtcattgacattgaggactcaacaacaacaaatacagaactacaactcacatcactacaaaatggggtaccaataaatgccaaaccacagcttaaaagggtcgacacagctacttactacaaaatggggtaccaataaatgccaaaccacagcttaaaagggtcgacacagctacttacaaaaggccttcacttgattttctacaggatacgagtgattaagtcattttttgtgttgcttctgctattcagaggatgcaatggaggttttcttctcccaatgtgtgccactttacaagcatgcattagatggcaattggcaagcagcaaagcacatcttagatgcaaaccctgcactgaagactgctgccatagcacctgggtggcccacagtgctgcatgttgctgcaggcacaaaccattatcactttgtggaggagttgctcaacatattagacaatgatgcaattcaattgcaggataaaaagggcaacactgccttttgctttgttgctgcggctggcaattggcgcattgctgagttaatgcagaaaagaaatatacttctgccaacagtcaagggtggagatggaatgacccctcttcactttgctgctttgcaaggaagatgcccaatggcatgcaagctataccctatgaccaaagagatgtttgatgatgaggattgggaattattgttcttcacttgcatcaaaacttgcaactatcacttggccttaaaaatggtaagagataggaaagaactagcttttgcacgagatgggaataacggtgaggagaaaaagggcggcatagctttgcatctcttggctcaaaatcaaaagcctttggattcttgttgtcattgccaccaacatcaaattcccgtcaagataaaccctggcatgaaacaacacgtgtttcttcaattggttaattttctctggaatacccttttggaaaacatagactccaagagcaagatacttgacatcataagtgaaccttctcatctattatttgatgctgcagaagttggtaattttgggtttttgtctgagcttattagtgcttatcccagcttgatatgggaagtggatagcagaaacagaagtataattcacacagctgttttgaatcgacatgctagcatctacaacctcatacacgaaatagggtctataaaagatattatagtgacatttgccggagaagaagacgagaacactttattgcatttggctgcaaaattagctccacctagtcaacttgagttagtctcaggagcagctttccaaatgagccttgagatatcatggtttgaggaggtgaacaagataatgccaccatcattcagatggatgaaaaattccgaaggcttaactgctcgagaattattcacaaaggagcatgcagatttgcggaaaaatgcagaatcatggatgaaacgcacagctgagtcatgcatgcttatttcaaccgttattgccacgggagtgttctctgccgcaattagcacaccaggtggcatgaatgacgaatcaaaagaaccaaactatttggacaaaacatcgtttctgatatttgctgtatcagatgcaacttcactgatctcatctgcaactgcaatactcatattcttatcgattctcatctcgcgttatgctgagtatgacttccacaagtcactgccattgaagcttatatttggactgataagtttgttcatctccataacaagcatgatggttgcatttggttgttccttcttcataacttattactatggcatgaagtgggttcctagtttcatctcagtacttgcatgtctacctatacttctctttataggtctgcaattttcgctgtggtcagttattatctactcgacctactactgcaaagctctctttaagccaggtaaaaagatgctctacgtggtagagagaaaaggatacaatgtttaagataaatgaaggatcatataatgtttcgttgaagtttgtaatatagtagttggcaacaatttgtattgtaagggtattttaaataaatttgaaatgtgaataatatatttgcacaatgattattttattgatacaaaatacatgttaaacaacaacaacaaacttttatcccttttatataattttt

SEQ ID NO: 51478 - DNA, 443 bp, Glycine max
  Clone ID: PAT_MRT3847_17499C.1
ggataggattggggagagaggataagacattaacaacaacactgaactctaactcaaatggcggttgcactaacgagttgcatttcctcatcctggggtctattctccacagttaaattccgctactcactcagacacagacccatcgtcgcctctttctataacaataataattacccactccgactttcctcttcttcttcttcttcttccaaatccaatcgacaaaaggaaggtgttgggcagaagaagcagtcaaaagatgaaagacctgcaagagggaatgtgctcgaaccccaacaaacttcttcttctaaaccttttggcattcaaaggaaaaataaggaccttatcttcgactccaaagaccagcaggttgaaccgagtgctttacaagattcggctttccttaatgctgttgtgaaggtatactgcacccatac

SEQ ID NO: 51479 - DNA, 961 bp, Glycine max
  Clone ID: PAT_MRT3847_1749C.1
tgtaggtactcaaagacattgcttctgagaatggtattgttctgcagctcgaagaaacttctgtttcggttgaggaacaatccagtgtagaaaagcaaaaccagcatgaatctgagaagaaagaagagaatgtaagcatgttgcctaatagagggaaagatgagaagttaactgattcctacaagggaaggaaaaagtacaaggacgtagctgatgcagcacaagcagcttttgagtcagcagaatatgctgcagctgctgcaagagcagcattggaactctcccgatctgaatcacatgatcctgatgatcattatagtccaagactccaaccaagaaaagtggaggatggacatgatgatgtgagacctcaaatggaagaaaaggaaatcctcagtgaaactcaaagagaagatgagttaaaaaagtcgaaagacattataagttgcaattcaactgatgaggttttgaagggggctactgccttggtggatggtgaaattgaggctgatcctttggaaaaggaagtgattttcgatgatagtgatgatgagaatgataataaacagaatataaatcaatcttctaagcagacatcttcagggtatggtgctggtatagtagtaaatacagtgccaggatccaagatgcagaatgcgcctcagttggatttgcagaagaggcctatttcagtgaggactagatgaatgaaaaatcactgagtatgagtggcatctatcgaagtttcgcttggttctttaaattttgtcttatggatttgccatcagaatgtcaatatgttttttcattatttaaatgattaattggattagttggatgtaaaaatagtgtcagggattctcctctttatgcaatcacaacataaaagtaggcaccctccagacatggacatgggaaacagattgatatttgatcaaacacagaaatatgactgcagaag

SEQ ID NO: 51480 - DNA, 727 bp, Glycine max
  Clone ID: PAT_MRT3847_174C.1
gaatatcctttctttcctatcaagcccaccaatccaatagaaaaaacatttcgatcatttacatatggacaagctctttttcaactactgtttcgttggatactgccttctttattctctcttgcttgtgcatggcaaacaattgtcatgcaatgaaaccccttaccctcgtgtgtgcaagcattacattgaaactaccaacacattatcagccctagatgcttccccttcttattccttccatgatatggcccttaaggtcaccatggagcaagccatggaggcttataaacttgtctcaaacatggacttgaataatttcaaggacaagcgagccaagtctgcatgggaagattgtttggagctctatgaaaacacactttatcagctcaaacgctcaatgaactcgaacaatctaaatgataggatgacttggcaaagtgcatccattgccaaccatcaaacatgccaaaatggtttcactgatttcaaccttccctctcacctaaactacttcccttccatgttaagcaacttgtctggattgcttagcaattccttgtccattagcaaggctatgacattgagatcattgtcatcatcaccaacgaccaaacaaagtggtgggcgaaagttgctttcagatggcttcccctattggctgtcacgttcagatagaaagcttcttcaggaaacagcatcaaaagctgatgttgtggtggcacag

SEQ ID NO: 51481 - DNA, 740 bp, Glycine max
  unsure (1)..(740): unsure at all n locations
  Clone ID: PAT_MRT3847_17500C.1
aaaactcattatcaaaccaacgagctcaaagaaaatcgaggcaagtgtaagctagcaagaggaaattaaaaacctccgtttagttgtgttttcagagggcaatgaacgtatagggtgtggccattgggcctggatcaagagcttacccacttgttgcgtgtttaggactcttgttgggctacggttgcttatgcaaattgggcatcttgttgcaaacctcttgggtttaatagggaaatgattgcacagaatatagactcagcaactccagaaccacaggacgcagtagtcattgacattgaggactcaacaacaacaaatacagaactacaactcacatcactacaaaatggggtaccaataaatgccaaaccacagcttaaaagggtcgacacagctacttacaaaaggccttcacttgattttctacaggatacgaaggatgcaatggaggttttcttctcccatgtgtgccactttacaagcatgcattagatggcaattggcaagcagcaaagcacatcttagatgcanaccctgcactgaagactgctgccatagcacctgggtggcccacagtgctgcatgttgctgcaggcacaaaccattatcactttgtggaggagttgctcancatattagacattgatgcaattcaattgcaggattaaaaaggcaacactgccttttgcgttgttgctgcggctgccaattggcgcattgctgaattaatggctgaa

SEQ ID NO: 51482 - DNA, 248 bp, Glycine max
  Clone ID: PAT_MRT3847_17501C.1
cttacggcgagcgtcttagaacaaccaattgcccaattacaacaacaatccttagcacatctaaccatacaaaccatcgcaacgcagcagcaacaagcactgagccacctagccgtggtgaaccctatcgcctacttgcgacaacagctgcttgcatccaacccacttgctttggcaaacgtagctgcataccaacaacaacaacagttgctacagtttctgccagcgctcagtcaactagccatggc

SEQ ID NO: 51483 - DNA, 120 bp, Glycine max
  Clone ID: PAT_MRT3847_17502C.1
cacaacctcctacaatgtatatatcatgccccacaccactcaaatggggtcatcaatcatgcactttcctccctaactttgcaggtacatgcagacaaactatggagtcttattcttaaa

SEQ ID NO: 51484 - DNA, 134 bp, Glycine max
  Clone ID: PAT_MRT3847_17503C.1
ggctcgagcacagcgtaagtaccccaccgtatgatgaaggtttcctataatcatgcgattctcaggaacttatttgggtttgtatagacctgcccatacaggacttttaccttcttcaaaaaataaagaaaagg

SEQ ID NO: 51485 - DNA, 265 bp, Glycine max
  unsure (1)..(265): unsure at all n locations
  Clone ID: PAT_MRT3847_17504C.1
caggatattcaaccncttgtttgtgacaatggaacaggaatggttaaggctgganttgctgganatgatgccccacgtgcngngnttcccagcntgtnggtcgtcctcgncacactggtgtgatgnttggcatgggccanaangntgcatatgttggtnangaggcacaatntcagaggggtantttgantctcanntaccccattgaacatngccttgtganccnttgggcnggatntggcaaaacattggncatcgtacttct

SEQ ID NO: 51486 - DNA, 470 bp, Glycine max
  unsure (1)..(470): unsure at all n locations
  Clone ID: PAT_MRT3847_17505C.1
tccaaggctaanntaggtnnnnaangcnaggattaaaccgggtnnaaaaagncctttccngggggnaaaaattttcccgggggnctttcccggaaagncncttttttccnggnnattcccttcccttttccttccttnanaccaaanattgggcttnaccaaatnttcccaaaaagggatttggggttttaaggggaaanctnccttggtaaaggggcttgggatttaaanaggaannaaaaccaacttccattaaccccggtttgggaaaaanaaanggaatggttggcttgggccaatgttgctttaaatttaagtncctngcnttccctttggtcctccttgagttttatcagagacgggagtncagggatcactagctctttcattcggtcagagtggccggcagttgacatcccccttgatnatgaagcatttgcagttccaaagggtnataangcacctnancn

SEQ ID NO: 51487 - DNA, 605 bp, Glycine max
  Clone ID: PAT_MRT3847_17506C.1
tacgccatcaaatttattctcaacttagatggacctgatcctggggccgatgatttgaaggtgattaatggtctcattgacatgtatgctaaatgccaaagcacagaagtggctcgaaaaatgtttgattcagtatcgccaaaagacagggacgtggttacctggactgtgatgattggtgggtatgcccaacatggtgatgctaataatgctcttcaacttttctccggaatgttcaaaatggacaagtctataaagcctaatgattttactttatcatgtgcccttgtggcctgtgctcgtttggcagcactgaggtttggtaggcaagttcatgcttatgtgttacgcaatttctatggttctgttatgctatttgtggctaattgtcttatagacatgtattccaaatctggagatgtagataccgctcaaattgtttttgacaacatgccacagagaaatgccgtctcttggacatctttaatgaccgggtatggcatgcatggacgtggtgaagatgctctccgtgtttttgatgagatgaggaaagtgcctctggtgcctgatggcataacctttctggttgtgctttatgcttgtag

SEQ ID NO: 51488 - DNA, 464 bp, Glycine max
  Clone ID: PAT_MRT3847_17507C.1
aaaattaaaaaaaaaaaaaaaaaaaaaaaaaaaaaaaaaaaaaaaaaaaaaaaaaaaaaaaaaaaaaaaaaaaaaaaaaaaaaaataaaaaaaatcaagaaaagccacaacttaaatacaaaagcatcgctaaatgataaacaatagtatagagttaatataaatgggggggcgcgggatttaggtttcccatcgtttggaccttggctttgcctagctttttcccttttttttgggggccccctatttacctccttgggcaccggtttttcaatcccgcaggggggggaaccccttggggtttcccaattttaattgctttagaaactttcccttttccggctgtggagagttaaattagggggcccgctacagttcctttcccccagcgggcccccttctttgggggatggcctcccgcccttttccgtccttttataccccgggggttggtgtttttcccc

SEQ ID NO: 51489 - DNA, 783 bp, Glycine max
  Clone ID: PAT_MRT3847_17508C.1
atgtcttctgcgacggccccgagaaggcgcagtgctggcgtgagtggtggttcgccttctccgcaaccaggagccgccgccccaaggagtatgactcgtgggcctgggcccccgtgccagagactgggcggcttgtttcttgcgacggagatgaagaggcacactaccgcgggcggcggttcgcttttcgggcgcgcgcgacggttcgccttctccgcacccaggaaccgagacccaaggagtatgactcgtgggcctaggccccccgtgtcagcgattgggccgttgtttttagcggagatgaaggggcacactaccgcgggcgacggcccccgtgtcagcgactgggctgttgtttttagcggagatgaaggggcgcactaccgcgggtggcggttcactcctcgtggcagttcggcactcggaggcccgcccaccatctgtatgacttgtgggcccggccccccgtgtcataggttgggctgcttcagtgcacggcgagcgagatttcctgcggcgtctcagggcgcgaacgggagtgtcttccttgaaaagggattcaccccgcgtgcagtagttacgctttcgcattctttccaactaatgcgccctttcgccttcgagttctccgcaccccattgcatttgcgctcctctgctttccgccgccgtagttgccatggctttgccagtccatcccgggcgcttccagtccgaggtggcactcaacttggtgcgcaacctgctcggatggggcgcgccagtgttcgacggaaggatccgc

SEQ ID NO: 51490 - DNA, 840 bp, Glycine max
  Clone ID: PAT_MRT3847_17509C.1
atgcgaaagcgtaactactgcacgcggggtgaatcccttttcaaggaagacactcccgttcgcgccctgagacgccgcaggaaatctcgctcgccgtgcactgaagcagcccaacctatgacacggggggccgggcccacaagtcatacagatggtgtggagaagacgaaccgccgcgcgcgcccgaaaagcgaaccgtcgcccgcggtagtgtgccccttcatctccgctaaaaacaacggcccaatcgctgacacggggggcctaggcccacgagtcatactccttgggtctcggttcctgggtgcggagaaggcgaaccgtcgcgcgcgcccgaaaagcgaaccgccgcccgcggtagtgtgcctcttcatctccgtcgcaagaaacaagccgcccagtctctggcacgggggcccaggcccacgagtcatactccttggggcggcggctcctggttgcggagaaggcgaaccaccactcacgccagcactgcgccttctcggggccgtcgcagaagacatagaagccgcggggacagacgtggcagttagcgtgaccgaaggcggactggcagtgattatgtcagcaagcgcacggaagcggcgcgccaatcgccagtcaagctttggccccacctgcaggctcgtatcctcccctgaggtgggcccaggggccactgtcggtaccctaaaacaggggtaccccttactacagtatgaagatgtggtgcccgcgaggctatctctagccgcgtggggaacaacacccgaccccaccacgtggacggctccagggccaccacgtggcgagagaagacaatatcctccaaagtattaa

SEQ ID NO: 51491 - DNA, 593 bp, Glycine max
  Clone ID: PAT_MRT3847_1750C.1
tgatctctcatattctcaagcttattacaagcttgtgcctgcttctttgttccctaggttcgtaccttacattgctgctattgacacaagggtgtgttgttttgtttttatcatcattgagaactaattaaggtacgtgtaaatgggtaagaagcttgatgctctccttggtagaaccttcaaggctgcaaagttcaaggctattgttaaccttgccatctcgcgccttgccgttctcaagaaccagcgccaggctcgccttagacaggcccgttctgatatccttgaactcctccaaattggtcaccttgaacgtgcttcgcttcgagttgagcatgtgatgaaggatcagaacatgttggatgtgtatgtcaggattgaaggatactgcaacctcttgattgagagggtccatctcatcgagcaagagagagaatgtcctgaggaactgaaggaggcagcatcgggattactctatgcagcttcaaggtgtggagattttcccgagattcaagagattcgtgcaattttgacatcacggtttggcaaggagtttgctgtcgatctattgagttaaggacaacgtggagtca

SEQ ID NO: 51492 - DNA, 273 bp, Glycine max
  unsure (1)..(273): unsure at all n locations
  Clone ID: PAT_MRT3847_17510C.1
tatcctatataccgaccctccttcaccatcatttttcttattntnnttctacaatacaggcaggacgcatactatttgtgggtctatgtacatggctcccaaaaaaaataatctccaatacacacacattcattattacattggacacacaccatacataattgaactcactcactctagcttttaaatctctgtttgagcacaagaccaaaataatgaaatttgcttaataagatacaaatagagcacgatgttattcttctgttctgaaaa

SEQ ID NO: 51493 - DNA, 118 bp, Glycine max
  unsure (1)..(118): unsure at all n locations
  Clone ID: PAT_MRT3847_17511C.1
ccgggtcccgncttcagtggaanntttggaanacgacgactncgaacnnccgacngaaaacacggataggctccttttggtattcgtngttaangattnccggttaaacgggaancct

SEQ ID NO: 51494 - DNA, 243 bp, Glycine max
  Clone ID: PAT_MRT3847_17512C.1
gagagtcctttggaggttgctcatgcgttttctctgtaaaaataaaaaagtaatagatttttctcattttttgtcttcggttcttctgtgccttgtccgagtcttctttaccggtcaaatcagagactctgttgatgagagaagagatttcatcaatcaccggaatgtgaaaacattaggaaaattaatttcaatcaaagcaagtatacaataatacgatggtcgagtttgggacgagaatgg

SEQ ID NO: 51495 - DNA, 589 bp, Glycine max
  Clone ID: PAT_MRT3847_17513C.1
ctaaaagggtttgcttttttttcgtcacaacaacctttttttgattcgtttttaatttttgtttccaaatccttaggaaaacgccctgtagaagaccgagatcgacggtttttttttgctccacccaaagaagtaaaggggccgccaaattttgttacataaatgcggggggctttttttattagggggggcgccacggggaaaaggggccttttttttaaaggggaacaaaattacgggggggtggtgtccgctgggggggcgccttttgacgaaattctttttttaaggggccaccccggagtgggccaaccccaccttggaaaaatttggggtatttaacacttttttttaaaacacaaacagaagccgggagtgacctccttcggggccaattttttaaaaaaaccccccccttctttttatgtggggggggttcccttagtggggggggtaccccccacccccaaaaaatttttgtaaaaaaaaagaagaagaaaacccttttttttttgtttgtgaccaaaactgggggcgagggtcggagaaactttggtttttttgacgaatcttggggggggtgattttt

SEQ ID NO: 51496 - DNA, 380 bp, Glycine max
  unsure (1)..(380): unsure at all n locations
  Clone ID: PAT_MRT3847_17514C.1
anatgcganacgtgangnnagggagtatnggntncgcacgnnncagggnanncannagagagcngntnnancnnacanantcgnacgaccngccggtcganntcnnaatnanaaganttnngagcnggntgaaaacntacagnnanagactacaggaagcgtngaacnncgnccgcnggccgnnnagttgacgacntccggngnttntgtacggccgtcgttaactcggnangaancctngganggtgccnggcngcactgaangcaagtgaccctcgctgtgggngantatggncagnnggnagcgngcnangccnnggnnaanaatnnacagagnagaggacncctgancnnaccaganggnnatgnataaactncan

SEQ ID NO: 51497 - DNA, 175 bp, Glycine max
  Clone ID: PAT_MRT3847_17515C.1
taaaattctctcccaccatatccagtttataaaattgtaccttttttcaaactcgggcaattcaattaattaaaaacttgggtccggttaatctaccgaccaaaaaaataaaaagggcgactgttcctagtaggcttaccttgctattttttccagggggcccccaaggaacaaa

SEQ ID NO: 51498 - DNA, 213 bp, Glycine max
  Clone ID: PAT_MRT3847_17516C.1
tcgatcaaaagtctgttagttcagactaaggcagaagaatcaactggagagtaaaaaggtcatctatgaggatgtgtctttggaaagaggttcttttttggtgcaacacgccatgagggcgttctttgctcagaatttgtaaagtgccagatcaagactgaatctgtgtgcagaggacattcggaatcaattagaaaaagttggaaacacttc

SEQ ID NO: 51499 - DNA, 698 bp, Glycine max
  unsure (1)..(698): unsure at all n locations
  Clone ID: PAT_MRT3847_17517C.1
tgnncnnnnnaccatnnnttcnattgaagttagaacaaccctacaggcaggagaataagagagaaaatatgtacttttaccattcatggttgagcagcatttatggccattataaagaaaggtaaaaaaagtccacaacacaactgtgctggctatgatatactaattttagtcttttaatccctttatctatagttgagcagcatcctcagttacatgatatctgtgatctactctggcctatgctatgctatgctaacaccatcttctcttcacaataatcacatagacagacattctctctctgaatggggtctctaatcggacttgtgggcgtcgagtggcgggttgtgatggtggccggcgacgaagtcgaggagctcctcggcgggtttgggaatggaagcgtcggagttgggcgaagtttgcgtcttggcgaagaagagaacgagggcgagaaaaagcgcggtggagaggaacagtggccagaaataggcgaggatgttgaggaacctcggagcgagaaaaagcactgagaagatcgaaagggacacgaggagtgcccctccgatgtggtacctgaacttcaacagttgttgttggatatccatgggaagaaagaaagaaagaaaggaaagaagagagggtgatgattgttattgtgattgtgattgtgattgtgattgtgatgggtttgt

SEQ ID NO: 51500 - DNA, 263 bp, Glycine max
  unsure (1)..(263): unsure at all n locations
  Clone ID: PAT_MRT3847_17518C.1
ctagcngcagcacgaggagnagcctcaggaggagaaggntgtntcacaggnagttccgngcaancanggcacggttnactgggattncttcccaggnagcgtgntgatcgtnacagggganaagtgnaggcntttcccaaggatgacncatcccaaggcncncaagctcactgcattcttgggttacaaggccggtatgactgcanttgttaganaggtcgcnanngccagntcaaagttgacaagatggaactgtgagnctg

SEQ ID NO: 51501 - DNA, 249 bp, Glycine max
  unsure (1)..(249): unsure at all n locations
  Clone ID: PAT_MRT3847_17519C.1
tnnnttgtnagnatgcaataantccatcagggganntatctttnctagangccanccctcgagcttctcgtacagatccatntgtancanaagcaattgggcatcccttggctnaatatgcntcnctngtcatgtctgnaaagaccctcnatgatttaacgtttncaaaagangttatccctaaatatgngtcagtcnnggaagctgtccttccttttcaaagttcccaggctgtgacgtgtntttaag

SEQ ID NO: 51502 - DNA, 1479 bp, Glycine max
  Clone ID: PAT_MRT3847_1751C.1
ttcggtgttgaaagttggtactaaaaggaagaaaccgctcacggctggattgcccgaaacatttgaatttgaggatatgagtgacacatattggacagacagggtcattgacaatggtagtgaagcacaaccagcgcaaccgtgtcaaccaccacaaccagcacggagaaaccggaaaaaagaccatcaacttgttcctactgagccagggaagcctgttcaagttagtcgtaggccatattccaggaaacagtattctaacaacaatcacattgaggctcctgcaaaacctcctggttatatagatgagaatgcccctgctgaacttgttatgaactttgctgagttgggttctgttccctcagaaacaaaccttaataaaatgtttaggcgttttggacctctaaaggaagcagagacagaagttgatacagtaagcagccgagcaagagtggtttttaaaaagagtgttgatgcagtggttgcttgtagtagtgctcaaaacatcaacatatttggcccaatacttgtaaattaccagcttaattacagtgcaacgtgcattgttacaaagcttcatctgttgccccaacacaggaccaggagatgcatcttgatctctccaattttgaggttaatataattgggagtgttgacgatgatgtggcggctaagtttggctgaatgaattgctgaagcaaaattttacctagtggctgctgaagtaggtaggtaaccagaatgttaattcatctggtcatccatttttctgttaagagttatttttggttgtaggattcctttagttgtagttctggtagttttgtaattcattttctagttttctgtatagccttgtcaactgaccctcttttgtagttgccatcattctccatccggatcattttgaattctctagtctgaacactggttctatatcaagatctttcgaattctctagtctgaacactggttctgtatcaaaatcaatagtcattcggcaattatagttaaccttccaggaccaggagatgcatcttgatctctccaattttgaagttcatatgattgggagtgttgatgatgatgtggcggctaagtttggctgaatgaattgctgaagcaaaattttacctagtggctgctgaagtaggtaggtaaccagaatgttaattcatctggtcgtccatttttctgttaagagatattttttgttgtaggattcctttagttatagttcagtagttttgtaattcattttctagttttctgtatagctttgtcaactgaccctcttttgtagttgccatcattctccatcccgatcgtttcaaattctctactctgaaccctggttctgtatcaatatcaatagtcattccccaattatagttaaccttccgagggatggaagttgatgctagttgtattggttatacgtgtcactgtgttagtaatttttaagcgcaaaaaaaaaaa

SEQ ID NO: 51503 - DNA, 393 bp, Glycine max
  Clone ID: PAT_MRT3847_17520C.1
tttttacgttcgtccacgcgttcggttatgagcaagattgttgaaatgattaacagtctctgcggtggtgatgaaaaattgttgcttgaaaggtcacacctttctttggcttgttgcacaaggatggcaatatttcagaaagatgaatggagagtagaatgtggaatcccttctggatttccgctcacagttatctgcaattgtcttttttatgagatgcccattagatatagctttgaaaaattacttgcgcctaggttaatagctaccaatgtttgtttttacatttcctcaaaaatttttgattctttgtgcgtgtatggtgatgataactttaattagttgttcatgattatgccaagtccttctttagtggttcttaattgaaaagct

SEQ ID NO: 51504 - DNA, 2108 bp, Glycine max
  Clone ID: PAT_MRT3847_17521C.1
cccgaaatcaagtctttttactgtttttccccagttcgcccatgccgtagatggcgctctcccttctttgatataaaggacaatgcgcatcaagatatccacccaggattttccaacgttagaatctcagcaattttagatgtttctttctttctgccttgagcctcacctcttgtgatatgcagcattctagactttccagtaaaaaagaaagacgagaattctgcgcaatccgaggagctagcgacacttaggccaaaagacaccaacaaacaaatccagcaccgcttccacgttttcttaataaaatggttacatcggaactctctaatcaccaaaacaacaactctcccatgatggcgaagccccacagaaacaaaacctcctctgtatttctctccgatggatctctcttcctcggaggagcattctccgctctcatcctcgtctggggtttctcctccttcaccaccaccatccctaaggaaacccccaatttcgaatctcttaccaaaaacgacgctgttccgcaccacggtactcccgatttcaacttcgacccccccgacagaacattctacgacgacccgcaaatgggttacaccatggacaagaaagttcgcaactgggacgagaagcgcgaggagtggctgaagctccacccttccttcgccgccggagcgagagagagggttttcatggtgaccggttctcagccaaagccgtgccggaaccctacaggcgaccaccttctcctgcggttctttaagaacaaggtggactactgtcgtctccacgggtgcgacgttttctacaacaacgcactgttggacccgaagatgtttgcgtattgggccaagtaccctgtggtgcgggccgcgatggtggcccacccggaggcggagtggatctggtgggttgactcggacgcgttgttcaccgacatggagttcaagctcccccttgagcgttacagggagcacaatctcgtggttcacggctgggcccacctcatacacgagaagcgaagctggacgggactcaacgccggcgtcttcctcatcagaaactgccagtggtcgttggacttcatggaggcgtgggccagcatgggcccacagacccccaattacgaaaagtggggccagacgctgaggtcaactttcaaggacaagttcttcccggagtcagacgatcagacgggcctggcatacttaatcgccatggagaaggataaatgggcggagaggatttacctagagagcgagtactacttcgaagggtactgggaagaaattcagggaacgttcaagaacataacggaaaaatacaaggagatggaaaaaggggtgcagaggttaaggaggcgtcacgcggagaaggtgagtgagacatacggtgagatgagggaagagtatttgaaggatgctgggaatggaaaagggagttggaggagaccattcataactcacttcacagggtgtcaaccctgtagtggaaagtataatgccatgtattccgctgatgattgctggaacggaatgcagaaggctttgaattttgccgacaatcaagtcatgcgtaaatttggttacatgcgcccggatctactggataacgccatttcccctgtcccttttgattatccccgttcacttcgtcattgatcatcagtgtgaaggacccgctgagcttggatagattttactgcggcccactatttaagatggatagatgaaccatgtgcatgcgtacagaactttcatggacctgtattatcgtcggggttgtggggtcatgctcacatagtagcatatccaaccatgttaatacactacttgctacagtaaaaagataccctgcggccattctagttacatctaccctttgtttttttccctcccttttcctctcatggcttgaaatcttacatatatagaagcataacaaaatagcagtgctaaggtttatgacgttgttatgaccaatgttctagtgtacccaacatcaagatggcccaataaacttgtagacatgtgagttgtgacgtgcattttcacatgagtattacttggtttaattacgaaagtgggttgatttttaaaaaa

SEQ ID NO: 51505 - DNA, 644 bp, Glycine max
  Clone ID: PAT_MRT3847_17522C.1
catcaggaactgccagtggtcgttggacttcatggaagcgtgggccagcatgggcccacagagcccaattacgaaaagtggggccagacgctgaggtcaactttcaaggacaagttcttcccggagtcagacgatcagacgggcctggcatacttaatcgccatggagaaggataaatgggcggagaggatttacctagagagcgagtactacttcgaagggtactgggaagaaattcagggaacgttcaagaacataacggaaaaatacaaggagatggaaaaaggggtgcagaggttaaggaggcgtcacgcggagaaggtgagtgaaacatacggggagatgagggaagagtatttgaaggatgctgggaacgctaaagggagttggaggagacccttcattacgcacttcaccggctgtcaaccttgtagtggaaagtataatgccatgtattcagcccatgattgctggaacgcaatgcacaatgctctcaattttgccgataaccaagtcatgcgtaaatttggttacagtctactggataacgccgtttcccctctcccttttgattatccccgtcattgattcaccaatgtccactcagattccctatctataatattttattcccagtttaaggt

SEQ ID NO: 51506 - DNA, 180 bp, Glycine max
  Clone ID: PAT_MRT3847_17523C.1
caagcccctcaaggcttcctctgctgactggaaccccaagtgcttggccacatctttgctgacaaacacctgtgggcactggaagagaacctggtcgtcacttctaactcgtcattcaccaacagcagcctagcgttgcccccattacaacacgactcccccaacatgtcgacataggat

SEQ ID NO: 51507 - DNA, 1050 bp, Glycine max
  Clone ID: PAT_MRT3847_17524C.1
aataatctaaatatatgtttcttgtaaattggtcaatattccatacatacatggatgatttaggattacctaatagtttattctagcatgcttatcacacaatgttatctcaccctcctttcccatacataaaactccacatttcctgctgagtaacctaacaaaacaaacacagcattgctccgtgtttgacctgttatagtaaacagtgatggctcaaagggacttgaggcttttgggtgcttggttcagtccatttgtcctgagggtgcagattgcccttaacctcaagggtttggattatgaggttgttgaagagactttgaatcccaaaagtgaattgcttcttaagtccaaccctgtgcacaagaaaatcccagttttcttccatggagataaagtcatatgtgaatctgcaatcatagttgagtacatagatgaggtttggtccaacaatgctctctccatccttccacaaaatgcatatgatggagctaatgcccgattttgggtttcttacatcgatgacaagtggcttacgtccttgaaaagtgttctactggctgaagtgatgatgaggcaaagaagctacactttgagcaagcggaagaagtgcttgagaaggtggaagaagtgttcaacaagtgcagtgaagggaaggcctatttcggaggagatacgattggatttgttgacattggttttggaagctttttgagtttcattagagtctcagagaatatgaatgaaagaaaattgcttgatgaaacgaagcaccctggtttgaccctatgggctgaaacttttgctgctgatcctgctgtgaagggccttctgccagagactgaaaagcttgttgagtttgcaaagattcttcagctaaaatgggctgctgcagctgctgcaaagtaaatggaatcaaattaattgctggatgaatttcaaaaattgttgtgcaagttatttatatctgaggctatgtttgttgcaactttatatatttaaaagtcaaaataaatgttatgataatatagtaaaaaaatattttag

SEQ ID NO: 51508 - DNA, 390 bp, Glycine max
  Clone ID: PAT_MRT3847_17525C.1
aaaaaaaggccgtttatctttgggtaagagctaagggggggccacccccccaaaaaaaaaggggggaaggggggatcaccccaaaagggggtaaaaaaattttttttaagggggattttttaaagcaagggcaaagacacgggcttttggctaaattgggaacgggcccttccccagggggggagggggggccgaaattttaccccccaaactttgggaaattggggggggggcggaagcgaaagggcccctttggccaaatttcttgagaaaacgggggtggttttcacaaggggcaattggaagcggggggggctctgggggcctttgggggggggaaaaacgggggtgggtttgaaaagtctttggcttttgccccctccccccggg

SEQ ID NO: 51509 - DNA, 144 bp, Glycine max
  Clone ID: PAT_MRT3847_17526C.1
tgtggcgaccgacaacgcgtccggagaaaggacggggtgttttacacactgggacccaaaaaaataacgcgggcaaaggaaacgaacaggacaatggccaacagcaaacacacaagcagaatcatcaaggaaacgcagcgtgag

SEQ ID NO: 51510 - DNA, 438 bp, Glycine max
  Clone ID: PAT_MRT3847_17527C.1
cactatgattgatctatttcccaatcaagttcttagtggcactaaaggacaaacaactgttgaaaaaagatgttgaggaagaatcagctggtgctaaaaagacagctggtgggtgaggaggtgcaggttccaagagaagccgtccagctgaagtgcataatctatctgaaaggattatgccaatgggaggtggtttatatatgcctccaatgatgttaccagcaagagagagattggttgtgatataaacaagacatatgcactcaaaaacataaataaaaaacaaaagagacaagcctggattctcgaaggcaacgggaagagacaaggctgtcatgaccctccacagggaatagtaagaggaaagatggatcatctgcggcaatgctttcaggtccagggtgcagcatgtagggacttgaggcatgcttcaaacta

SEQ ID NO: 51511 - DNA, 254 bp, Glycine max
  Clone ID: PAT_MRT3847_17528C.1
tggggccgacgcggtgcacgttagccgagctgcacgaatccctacatatataacacaccgtttccctgtactgattatttttgccactctgctgcacagctgcttcatactttgtctcgcctattaaatgtccgtcactgcttcactctgcgccactttcagaacaactttcttatcatcgaaacccgtctcgagaagaagctgcttcgtcacggataccaaaattgcgtttaacaagcttcgattcaaacccg

SEQ ID NO: 51512 - DNA, 188 bp, Glycine max
  Clone ID: PAT_MRT3847_17529C.1
ggggtttttgctatattttttcttaaaatcttattatgggcgtatggttatatatacacacaccccaaaaaagagggttaataaaacgaatagaagtggagatgcagttttgggcaatataaactcacaagctttttaacctgggattttttattatgggagttaaggaacaatcaaggttttaaagc

SEQ ID NO: 51513 - DNA, 1105 bp, Glycine max
  Clone ID: PAT_MRT3847_1752C.1
ttgacgcgagggcggacgcgggggcgagaccgggctcgaagcagccatccacatttatactaagatttcttatcatggcttggggatcaagttcctcttcctcttcctcttcctccaattacgatgtgttcctcagcttcagaggtgaagacacacgtcatgcttttactggccatctctacaaagctcttcatgacaagggaatccacactttcattgatgatgagaagcttcaaagaggggagcaaataacacgagcacttatggaggcaattcaagattccagagttgccatcactgtgctttctcaaaactatgcttcttcctcgttttgtttagatgaacttgcaaccatccttcactgtcaccagaggaaacggttgttggttataccggtcttttataaggtggatccttctgatgtgagacaccagaaaggtagttatgcagaagcattggaaaagcttgagacgaggttccagcatgacccggagaagttgcaaaaatggaagatggctctgaagcaagtagctgacttgtctggctatcatttcaaagagggagatggatatgaattcaagtttattgagaagattgttgagcgggtatctagggagattaatcctcgtactttacatgttgcggattacccagttggactagagtcacgagtgctagatgtaaggagacttttggatgctggatctgatgatggtgtccacatgatagggattcatggaatgggcgggataggaaaatcaacacttgctcgagctgtctataatgaattgataattgctgagaagtttgatggtttgtgctttcttgcaaatgtgagggataactcagacaaacacgggttagaacgcctccaagaaaagctcttttagatatactcggagagaagaacatcagcttaacgagtaaggcgcaaggtattccagtcatagagtctaggctcacgggaaagaagttctcttgattctagatgatgttgacaaacgcgagcaattacaagcaattgctggaagacctggttggtttgtcccggcagcataatcatcatcacaactcggtacaaacaattgctaacatctcatgaagt

SEQ ID NO: 51514 - DNA, 593 bp, Glycine max
  unsure (1)..(593): unsure at all n locations
  Clone ID: PAT_MRT3847_17530C.1
gacccacgcgtccgctctttctctcatatcacaatcccaacctctttttcttattacttattcaaacgcttcatcactcaaccaccttaacaatgcaccattcaaaaatcccactttagtttttccatcattctctgcagatctgaaccacccgggatctaaaagaaaaaccgcattttgatttctgggtcttgcccttcgcctcattgggtatcccgaaacgcattcgttttgcggaagaagaagatggggtccagtgccagcaaggcctcgtcctcatcgtcgtcgtcgtcttcggggagtttcaggaagggtcgatctaagggataccgaggtttcccatcgtattgtctgggagccacgtctggatctcgtggcattgatagtgacgaccaggttttgtgatcagaataaagtaaatggagatgatgtaacatacagcagtggcaatgaaatagattcagatgaggggaagacagagtctntttagaaggttaaatctgatgaagtgcctttgtgtgccttctaacattgaccttgagggggtggggggcacactacatccagaaactggtagcagctctgcacatttc

SEQ ID NO: 51515 - DNA, 1144 bp, Glycine max
  Clone ID: PAT_MRT3847_17531C.1
tacggctgcgggctgaagaaccccctcaaataaacctcaactcattgtgtgaccaaagttattattacattgcataatcaaccatgtcaatgaagttgtacgcttcccttacctttgtggtgtggcttttcatggccacatcgtccctagcccaatacgttctcgacacaaaccgcgaacgcgtcgacagcgatgatgagtactacatccggccagccataacggacaacggagggcgtttcacattgatcaacagaaacaggtcgtgtcctttgtacgttggtctcgaaaacaccgacacgccactaggctatcctgtgaaattcacccctttttcccgcaacaacaacgatgatgacgacgacgacataagggtgaatagggacctcagagtggcgttcgatgaagtttccacaacgtgtgtgcaatccacagaatggagagtgggtgagaacgacacgaggagtggaaggaggcttattatcactggccgagacgaaaccacgggatcatacggtaactattttagaattgtggaaacagaaaatgttggtatctataacattcagtggtgccctaccgaagtgtgccccacttgtagattcatttgtggcactggtggtattctgagggagaatggaaggattttgtttgccttggatggtactcctctcccagttatgttccagaaaaaagatgattgatttgaagagatattgtggggtttctcccccttgttgctaataacttctttcttatggtgtggctaataatatatgatggagctatcatccatttttattggatgaaataaagatacatgtatagagatgtattcagtattattcagttcttgatttgtagaataaagctccaaattgttatgagcatttgattcatttactacttggatatttttttaataataataatacaattttacataatgggatttacaatacttagtataagaaataatatacgatggagctctcatccttttttatcggatgaaataaagatacatgcattcagtattctcttcttgatttgtagaaaaaagctcctaaattgatattatttgtatgtaattcatttactacatacttgattaaataaattattatataatttactttttctg

SEQ ID NO: 51516 - DNA, 348 bp, Glycine max
  Clone ID: PAT_MRT3847_17532C.1
ggttttgttgattattttgatctgctaatttgttgttaagcactttgcactcttttttgattctcactagcttaccatctagttttatgctgttctctttctgagcttaatttttgctactttctctttaattttagggtacctgaaaattctatctagacttatagttgcctgtctatcaatctatttatttatttttaaagaggtctgaagattttcagattgaagtgtaagatcaggtacaatgtagtgttgtagtttctcctctgtatttcttattaagattttttagtcggacatgtgtaaatgtgtatgaatcagattaaccttttagtacttaggacagca

SEQ ID NO: 51517 - DNA, 1488 bp, Glycine max
  Clone ID: PAT_MRT3847_17533C.1
tcgcaaacctttccctcagcaacggaatccaccaaactctcgcatcaatcttcgtttctttagagagagagagagagagagagagcgcggtgtcggaatcgtgttctccgattgcaccggtggttcgatttatggtcgtcggagaatcgccgatctcgctgagagtttcgaatcgcaccggtgaccggaggagatggtgaattccatggtggaacgcgccacgagcgacatgctcatagggcctgattgggccatgaacatcgagatctgcgacatgctcaatcatgaccctgggcaagcaaaggatgttgttaaaggtataaagaagcggattggaagtaaaaattcaaaagttcaacttcttgcactaactttgttggagacaatcataaagaactgtggagatattgttcacatgcatgttgcagaaagagatgtgcttcatgagatggtgaaaatagtaaagaaaaagcctgattttcatgtcaaagaaaagatactgattcttatagatacttggcaagaagcttttggaggcccgagggcaagatatccacaatattatgctgcataccaggaactgttgcgtgctggggcagtattccctcagaggtctgaacaatctgcacctgtattcacacctccacaaacacagccattggcatcataccctcaaaatatacacgactcagatgctcaccgggacacagctcagtcctctgcagagtccgagtttccaacgcttaatttgactgaaattcagaatgcacgtggcatcatggatgttcttgcagaaatgctcaatgccttagaccctagtaacaaagaagtgattagacagaggttattgaaagaacaaatttgactcacgaaggtgcaataaacgttttgatgactggaaaacaaccttgtgatgacttcttttgaatccttaggctatgtttgactatctactgattggtggaatgaaatggaaataaaagggatggaatggaataacattatgttaccagtgtttggatattttgtgatgaaatggattaatgtttctatttcattgtttgtgatttggtggagcagtgtcgaacttacaagcagagagtggtacaccttgtcaactcaactttggatgaatcactgctatgccaaggactagccctgaatgatgatcttcagcgtgtactggctaagcacgaatctatttcttctggaacttctaccaaaaatgaaaatcacacacagaattcgaaacctgcacctgctggggctcttgtagatattgatgctcctttggttgatactggagatactagcaaacaaactgatgggagatcctcttctaatgtcgaagcagggtcccaaacactgaatcagttactgctttctgcaccttcaacttctaatggatcaacaattcctggcaaggttgatcccaaatggaatctggctcagtggcgtgactataactcaccaaaagcagattcatca

SEQ ID NO: 51518 - DNA, 838 bp, Glycine max
  Clone ID: PAT_MRT3847_17534C.1
aaagaatcagtttttttttttaaatacccatagttagtaataaaaaatatagtaactgtttattaaaagtagttataaaaatataactagttttataggcagagttattttaaatgacttattttttatataaaaatagttatagttatagttaacttattttaaaaaaattgggtattttaaataacttatttcagttttttgacattttccccacgcggccgacgacctctgttcttggcttctcgctcgacagtgacaaacctacctctcgttcttgttgaactcgaacttctggttctcgaatcgaatccctaaaatctcattcttgttgttcttgaatccgttctcgttctcgtcaatccctagcttctcgtcgtgctcctatcgaatccctaacaaagtgtaacgaaatgaagcagagctgaatgcatgctcgaagatggggatttttactaatggttcaatggcaaaaccaacgattcacaacaccattgtaatcaaaagaggatcttgaagagattgacaaaattgaaccagataaaatgtaaatttcagaatattattttttatttgattatgactttgattattgtttatttttttgcggaagtggtctccccataatctgctaactcaacccatattattttggatgaagattgaagttttactttcattggagtacttcaataccgacaacttttattgctgctactattttttttaatcaatgtctagtgttttatgaagtttctttctgccattgatatagattcataggtccatgtccgattaagtgaaaaagaggagataagtatctgctggaggtgactat

SEQ ID NO: 51519 - DNA, 1251 bp, Glycine max
  Clone ID: PAT_MRT3847_17535C.1
cggacgcgtggggtgctaatagggtcattggtcatggtgctttcgggactgtgtacaagggcgtgttgccagagagcggcgacattgttgcggtgaagaggtgtaaccatagtggccaggggaagaatgagtttctgtctgagttgtctataattggaagtcttaggcataggaatttggttcaccttcaaggttggtgccatgagaaaggtgagattttgttggtgtatgacttgatgccaaatgggagtctagataaggccttgtatgagtctagaatggctctgtcttggcctcacaggctcaaaattttgttaggtgtgtcgtctgttttggcctacttgcatcatgagtgcgaaaaccaggtaattcatagggacattaagactagtaacattatgttagatgaagggttcaatgctaggttaggtgattttggtttggcgaggcaaacggaacatgacaagtctcccgatgccaccgtagctgctgggacaatggggtacctcgcgcctgagtacgtgcttaccggtagagccactgagaaaactgatgtgtttagctatggtgctgtggttcttgaggtggccagtgggaggaggcctattgagaaagatgatgatgctgctgctgggaatggtaaagttggaattagcagcaatttggtggaatgggtttggagtttgcatcaagatggtaagttgctaacggcagctgatccgagacttgaaggcgagtttgaggaaggggagatgaggaaggtactcttgattggattagcttgctcacaccctgattcaatggcaagacctactatgaggtgtgtggttcagatgctgctgggtgaggctgaagtgcctattgtccctagagccaagccatctactagttacagtacttctcaactcttaatgaacttgcaagatagtgatactgactgtaagaatggtatgatcacaatctctacctcttcatcagagaacagctccaatggcaaagatatagtctgatggaagtctttggctgagatcttgtcatttttttttaattatttactcaaaatgtagatagactgaaatgtattcttttgctcatgtatgtaaactccaataacattacaattaaaggccttcttgagaaaggaaagaattttggggattatgcaattttgcctctggcatttaagtttatggtagagtgcttctgttgtacatttttatacagattaaattaaaatgatcttgtgcggag

SEQ ID NO: 51520 - DNA, 374 bp, Glycine max
  Clone ID: PAT_MRT3847_17536C.1
accagcaatgatcggccagttgacagacaagttgagaaagaaactggccataagctgttttctaccaagagaaagaaatttggatttgcacgattctcacatattttgtcaaaacagaagaagaagaagccaaccctgaatttgaggtgataaattgtttgaacaatttgatcaatctagcagtgacaaaagctagactctagttgcatcttctaaatcagtccttgtctcattctcttattgtgcttgcttgaatatcttgttttttttaacagtgtttatttagctttcagtccctgcttttgtatattaactacttattaggtatgcacttccatttgcttcctatgctagttgtagcgcagtacacggtg

SEQ ID NO: 51521 - DNA, 872 bp, Glycine max
  Clone ID: PAT_MRT3847_17537C.1
tcgtttctttcctttcctccttggtttgttctttcttctatgtatttttcttatgattttttttactgatgaactgaatttcattgatcacaacaaacttcttatttgaggttcctaaaatctaaaagaaacaggctactagtcatgaatagataatatgatattaatacattatcactatgactgccattgttccctcctagtaagcagaaccgatgctcactagaacaaaagatggaccaattagcagtaacatatatcccgatatccatacctttcaggagctgttttttatctcgctcttccctcttctggtccaaatcagcaccagaacaaatcccatcaaagacataattgaagtagaaattgctggaggaatagccacttttggatcttcgaagaacttattagcaagagccagggcaagcaggctactttgcatgcctgtctcaaaggaaattgttcgttgcagtgccttcacatcaagagaatcgcggaagacaaacccactgaggatataaccagctataaaagatgacaaatgaaaagcaacaacaagcaacaagatagcgactcccacgggggatttcatagtctcaacatttaaggcaagtggcgctccggcacagatagatgccaccagtacagatagcggaggcaaaaatggtcgaataacattacaaatccgaggcaggccagctgcgataggtactaccgctatctgtgtaatgctgtacaccattcctcttacatctataggccatttcttccctatgagcaacagtagtaagagtggtgtcactaacaccgcgcgcgcgacagacactgctgtcgcagcggtccgtgatggcataactatgcttaaaggtgcc

SEQ ID NO: 51522 - DNA, 263 bp, Glycine max
  Clone ID: PAT_MRT3847_17538C.1
aaacacagagagagagagtgaacaaatccagcattgttcttttctctgcaacattttccactctcaaccatggcttcaaagcttttactcatcactgtcttcggttttgatttgattgcttctcgactggctgtgggtagttgacaggagaggaggaattgtaagaatgtggcggaccatggaaaggattataattaatggggctaaaactccggtattgcaactggctaaggtggtggagcatttttggtcctcctgggtaa

SEQ ID NO: 51523 - DNA, 508 bp, Glycine max
  Clone ID: PAT_MRT3847_17539C.1
caaaaacccatataaaagttgtttttgaatgggggggttaaaagggcttttttgaaaaaaaaaaattttggggaacttttggccatgaccctggggtttttttgccaagggttgcctttgaaaaagggatttccttttccccaatttagggagaaggtttttccaatttccccggcttaatttaaaaaaaaaaagggtttttcccaggggtttattttacttagtaagccacccccccttttttttttgaaacagggaaaaaaaaatttttcaccatccgtttgtggaaattcacctaaacatattttttgtggggacccaaaagaccttaaaaaaggggcaaactttgaaaccaaatgtttgaggcggccttctttccaactttaccactttccggggggggaaaataaaactaagggctttttttccccttttaaaaaaaatggatgcttggccaaaggttttttcaaaagggaaagcgcttttgttttttgttgaacgggttttt

SEQ ID NO: 51524 - DNA, 273 bp, Glycine max
  unsure (1)..(273): unsure at all n locations
  Clone ID: PAT_MRT3847_1753C.1
aaaggggncccaagccattctaacccacttacctggatagaaaataaaaaaaaaccgggcggggcccttggttttttaacactttattttgccaaaatgtttcatcaaaaagaggcttcttttttttcccacacatttctatcactggttttttgctttctcattcttgacatacggtccacccattaaatgaaaaacttttgaagaccacccaccctgttaaccccggaaaaacttcaagaatgtgttggcaaagtaggaattaaaccccat

SEQ ID NO: 51525 - DNA, 203 bp, Glycine max
  Clone ID: PAT_MRT3847_17540C.1
ctcaagcgagccaccacacgagccggtacggtgcgaacacgcgatccaacaatcactgccgggtcatattgtaactggagaacggctccgtctttctgatccttaggtccttctcatcgaatcatcatcaatgatactattacatcggaataggaccatgatgtgtccgtagagactgggcaatcacattcaaggatctagga

SEQ ID NO: 51526 - DNA, 135 bp, Glycine max
  Clone ID: PAT_MRT3847_17541C.1
gccgactaaggcgggtaggaacaggttctctacgggcccatccgttatataatggaacgcttcctcattgcgcctattgaccacgggaaatccgcggtggggggtacagtgattgaagttaccggcgcggtgcac

SEQ ID NO: 51527 - DNA, 456 bp, Glycine max
  Clone ID: PAT_MRT3847_17542C.1
cgggaccaaggccaagggaggttaacttttaattaaaggccctttattccggtgccccaaaggtggaaggcggccttttccacaatttttggtggggcccccttaaattcccccaaataccaggcccattggtattttaaggcccttaaaaaagatttggattaccccacttctttttttggaccaaattaaaccaaatggttttaggcagtggtgggcttatttccggaggcggtggtttaactttccaaaagggaagtttttttcccagtttggaaaccggccccagaaccggggttgggttgaccattccctttaattcccacttttggttctttaaaataatggccttttgattcccccccttccaattttcctaaaccttttttaattgttccaacacatctttacaaggacataccacttttgcggacccgggggtcaccccggaaattc

SEQ ID NO: 51528 - DNA, 282 bp, Glycine max
  unsure (1)..(282): unsure at all n locations
  Clone ID: PAT_MRT3847_17543C.1
ctttccttgctctccttgtgagtcataaagaagatagttaatanntatctatcttctttccttgctctccttgtgagtcataaagaaatgaagatagataaatattaactattaagtggtgtgtgtgacaacatagaaggactagccaacaccttatttatgtttattacaacagaaaacgaagagtatatatattttgcatctaaccnccaggaatgttanatgaattaactaataatgacaatatgcattatattcatgtaaggaaccatactaaaatct

SEQ ID NO: 51529 - DNA, 316 bp, Glycine max
  Clone ID: PAT_MRT3847_17544C.1
taataattctccatttccaaatttgaacattccgttcccttacactgtttttatttattattattatagtctatagtctatagatatataaatattttgcctttcttctatgtttatttattattcattattcttcctttaccttgtgtttgtgtttcaccacacaccactttcctagattggctgatctgctgtctggggcatgctggtgtccatgaggatcatgtgcagaagcatccacagtgagttgtataagcctaaagggcagagcttgatggtgatttctgagatgggtcttctgtggccatggttgtgg

SEQ ID NO: 51530 - DNA, 1898 bp, Glycine max
  Clone ID: PAT_MRT3847_17545C.1
agaagctacagctgaaagagaagctccttcgatctacaatctatagctattacgctctcaatttccgagagtgttctctctctctctctcacacacactcaccgcgatttcaccatttttccatcatgatttctgctactaaactcaaatctgtcgatttttacaggaaaatcccgagagatttgactgaggcgtcgttatcaggggcgggattatccatagtggcagctcttgttatgatgtttttatttggaatggaactaagtagttatatgtctgttagcacctccacatctgtgattgttgacaagagttctgatggtgactatttacgtatcgatttcaatatcagttttcctgcactctcatgtgagtttgcatcagttgatgtgagtgatgtgctgggaacaaacaggctcaatataacaaaaacagttcgtaagttttctattgattcaaatttaagacccactggtgctgagtttcattcgggtacagttgcaaatgctgtaaagcatgatgatgaagtagatgaagaatctgttgaaggttctttttcactcacaacacataattttgataaatatgttcatcagtttccaattacggctgtaaatttttatgcaccttggtgttcctggtgtcaacgtttgaaaccatcatgggagaagacggctaaaattatgaaagagagatatgacccagaaatggatggacgtattattttggcaaaggtagattgcactcaagaaggtgatttatgcaggaggaatcacatacaagggtatccatctattcgaatcttccgtaaaggaactgatctcagaagtgaacatgggcatcatgaacatgagtcctattatggagatcgagatacagaaagcctagtcaagtttatggaggatttagtcacatctctcccaacagaatctcaaaagctagctctggaggataaatcaaatgcttcagacaatgcaaaaaggccagcgccatcagcaggtggatgtagagtagagggatatgtgcgtgtgaaaaaggttccaggaaatttgatcatctctgctagatcagatgcccattcctttgatgcttctcaaatgaacatgtcacatttcataaacaacttgtcttttggaaagaaagtgacacctagggccatgagtgatgtgaagctcttgataccatacataggcagcagccatgacaggctcaatggccggtcattcaccaatactcatgatttaggtgccaatgttactatagagcattatattcagatagttaaaacagaggtagtgactagaaacggttataaattaattgaggagtacgagtacacagcgcacagcagtgtggcacacagtgtagacattcctgctgcgaagtttcatcttgagctctcccccatgcaggtcttaataacagaaaaccagaggtctttttcacattttataacaaatgtctgtgccattattgggggtgttttcacggtagctggaattttggactcgattctgcacaacactattagaatgatgaaaaaagttgagcttggcaaaaatttttgatagattggtgggattttgtgtagcgtagggcctctgatttggtaatgctcaatttcccttggcagttttataggaaattaactatgctatacatcatacaaatataattttctagtcacttcagtaaaaatgatcattacaaggattaggattaacgatgtgcatataatgccatccgatatttgccttctctaaattcttgttgcttttatggttgaggaaagaatatctattaatttattaaagtaagagggggaaaatggtattgattaggaagatgatgaataaatttgaatagaaaattgggtgtagtaatgattattgattagc

SEQ ID NO: 51531 - DNA, 951 bp, Glycine max
  Clone ID: PAT_MRT3847_17546C.1
gatattaaattttttcgtcacccagaagaagagcgagagagagtgggggaacgaagaagctacagctacagctgaaacagaagctccttcgatctacaatctatagcgattaagctctcattttctgagagtgttctttctttctctctctctctctctcaccgtgattccaccatttccccatcatgatttctgctaccaaactcaaatccgttgatttttacaggaaaatcccgagagatttgactgaggcgtcgctatcaggagccggattatccatagtggcagctctggctatgatgtttttatttggaatggaactaagtagttatttgtctgttagcacctcgacatctgtaattgttgacaagagttctgatggtgactatttacgtatcgatttcaatatcagttttcctgcactctcatgtgagtttgcatcagttgatgtgagtgatgtgctgggaacaaacaggctcaatataacaaaaacagttcgtaagttttctattgattccaatttaagacccactggtgctgagtttcattcaggtacagttgcaaatggctgtaagcatgatgatgaagtagatgaagaatctgttgaaggttctttttcactcacaacacataattttgataaatatgttcatcagtaagtggcaacttctaaaaatatttcattcaatttttctttgctttagctttgtgagaactcagaagttccttttaatatgcattgtttactcggtttttaataattcttttgcaggtttccaattactgctgtaaatttttatgcaccttggtgttcctggtgtcaacgtttgaaaccttcatgggagaagacggctaaaattatgaaagagagatatgacccagaaatggatgggcgtattattgtggccaaagtagattgcactcaagaggtgatttatgcacgaggaatca

SEQ ID NO: 51532 - DNA, 507 bp, Glycine max
  Clone ID: PAT_MRT3847_17547C.1
gggggaaaaacccaaggaactagggttttaagaggaaacccacaggaaaaagggtaaaattaaaatatccccaggggaaagaaaaattcaaagttaaagggacccttaattacagggaattttttttactgggccaaaaaaggccaagtggggtggccatcggggacccaaaaaaaagggtttttaagggggttttccaaaataaaaaaaatttttttggcatttttctttccaaaatcaggggggaaaaaaaggaaactgaaccccaagtttgatgggggcccctgccccttggacgaaaaaaaaaaggtttttttatattaaaccggggaaattatttggggttggggattttttcatttgggaaaaacttaaaccctccatttgcaaggggtccggaaaaaaaaaaaaaaactgggggggaaaaggggggaaaaaaaaacttgaaaaaaaacgggccccatttttttggaagaaacccggatgcaaaaaaacaaatcggccccg

SEQ ID NO: 51533 - DNA, 256 bp, Glycine max
  Clone ID: PAT_MRT3847_17548C.1
tacggctgcgagaagacgacagaaggggaacagcgccatagcataacccttcgaagtcgccggttgttttcttttcgttcgcatcttctctctctctcagaaagatgaaggtggtcgccgcgtatttgctcgccgccctcggtggcaacaacagcccctgcgccgatgtcatcaaggaaatccttggctccgctggagtctaagcagatgaagatcggattgcatcgtctttgttgatgtcaatgggacggatata

SEQ ID NO: 51534 - DNA, 465 bp, Glycine max
  unsure (1)..(465): unsure at all n locations
  Clone ID: PAT_MRT3847_17549C.1
atcaattaaacaccatgagccaggaaaagccagagagacctcaagcggagaaagaccccatcaaatacggcgacgagagaagatgcagaaggagtgattggagctgagcttangaacaacttggacatgagaacaacccctggaaaagggggtgatgcatgaagatctcaagtttccatccagtatagttaagtagtaccacaccctgtgctgaggcatccatggcgatagtgtttatatatattcgggaatcagaaaggatgaatggggccattgaccagagtcatgttaacgtgagccctatatcatatcgtgggcgccggaataaaacgaagtactcaattcttgaattgtgtacaaatctcggcacgaaaataggttccaagattgaatcggatgaaattatttccgaagtacaaaaccgaagcctaactcgtacaatttttttacaagaatttattttta

SEQ ID NO: 51535 - DNA, 228 bp, Glycine max
  Clone ID: PAT_MRT3847_1754C.1
acatcctagggcgacatcacaaccaattattacttctaaaacaattaatcaacatgactgggcaagacaactttgtaatgctaaagggccatttgatgcttacattccttctcatgattacaactgcacgcataaaactgaacttattcaaaaatgatcattcatcaaattatcatcattattagtattcaaaaccatactcacatctcttcatgtgcacacactcaa

SEQ ID NO: 51536 - DNA, 283 bp, Glycine max
  Clone ID: PAT_MRT3847_17550C.1
gggccatcttgctgtaacttcaaaaggcggtagaaactcaactatcttagtcttcatcctccaacactgggctctctgactagatttgtgaccagatctccggtactgtgcccaaatcatgctcccacctatatccttgctcaaaaggctgccgaccatactgtcccaaaaggatcatgtggatggtgacagctattgctactatccatgccactattgtctatgcgaaaaaccaccatgaccaatgccgcctcctcctatgtggccctcatgaagttgggct

SEQ ID NO: 51537 - DNA, 422 bp, Glycine max
  Clone ID: PAT_MRT3847_17551C.1
ggctcgaggaacgatgctggcatgtacaccccttcttgtttttccagactgctgctaggatttgattgcccactactgtggtattatgctgcaattgtctactttggaaatatactatcataaggatccaagagagcggtctgggcttgctgcttctgcaagtgctgctctacttatgacacttgacgtagtgatgacagtagctgctatgttgttgtaatttaccttacaactaaccacctatctatagctaaggtgacaaatgaatcacttctaatatcagcccctacaccaggaaggcaagcctgatccatccacagctgatcaaactcttgagatcatcaagaaaaataagctgaagctggtggtatctggtgcatgaggaagaccccaaagtgatgtcctttggaacactactgata

SEQ ID NO: 51538 - DNA, 682 bp, Glycine max
  unsure (1)..(682): unsure at all n locations
  Clone ID: PAT_MRT3847_17552C.1
attaaacaccatgagccaggaaaagccagagagacctcaagcggagaaagaccccatcaaatacggcgacgagagaagatgcagaaggagtgattggagctgagcttaggaacaacttggacatgagaacaacccctggtggggtcgctgcatccatcaaaaagctatgtttcttaatatattaaataatactacctcttatttttattgctatcttataatataatcaagttttcgttatcttcctttgatctcttttgcttatttcaacgaaaacaatgcaaatcctgctggagttttaatcattgtacatattaagtggtaagttttcatgtaatagctaagtaaagtctatggctttgtgcatgcaatacgtgcaggaaaagggggtgatgcatgaagatctcaagtttccatccagtatagttaagtagtaccacaccctgtgctgaggcatccatggcgatagtgtttatatatatgtatgttgcagcttttaaatgtttaaacaaataaatcaagccactgagtttgacttgtaaaactactatagtcttggtgcatgccactttcgttttgtgtgtcaattttctgtttttgtactttgttttattaatgtggttatattattatgttttctttctatgtaaannnnnnnnnnnnnnnnnnnnnnnnnnnnnnn

SEQ ID NO: 51539 - DNA, 379 bp, Glycine max
  Clone ID: PAT_MRT3847_17553C.1
ccaaccggccgtttttttttttttttttttttggggggggggggtaaataaaaacctttggctaataataaaataaacctcttttttccattttaataattgaattcaaatgattttctttattaaaattaacattcattatttttaattaattttaaaaatgaaaaatcattaaagttttataaaaattacgtttttaaattataaacatatcttctcttttgtctaaattaaaatattaaagttactaatactttatgtaacgatgtgtgaagatattatgtcaatatctgaagcatggatcatgcacttgatatgtcaatatcgacattctctattaaaccagtcttacttttttcatacgtacagttcttaaaac

SEQ ID NO: 51540 - DNA, 272 bp, Glycine max
  Clone ID: PAT_MRT3847_17554C.1
cggaatgggctcagccgagcgtttttttgtgtgaaccaaaccgaaagcagatgaagcagagtagcagaagcagggttcagtcgaattttccaaatcttaatccacttcttatcctagtaacaaacaactacacgtttttgtttatcattccgaaaattttaatttgttaatatattcttataaatagaggaatcgtttgccattgccctttccaaaccgtttcatcttgttgcacttgcaaccgttgccatattaattatcttccaaaattg

SEQ ID NO: 51541 - DNA, 920 bp, Glycine max
  Clone ID: PAT_MRT3847_17555C.1
cacctagaggattcttcaacttcgggtaaatcttgatacttccagtcaacttacttggtaactcaggcaaatgtgttcttgagaataaaccactggtctagtgtcggtgcataaagagatcaccttctgtttagcactatggaatcagaaatatttgaaaattgtgttttgtgtatagtttcaattacagataggtgatttaactccagcgaagagtgaattcatagatatttcaaaaatgaatttcaataagaatattatgtctcagaatgattattggtctaggttttgagtatttcaggaaattacttcatgttctagtcttttttattgcctactattttatagaagacagttaagtcatggccttaacacatgaaacaatcggttttgatttctaaattcaatggcggctgtatttgattacaagtcatggattgggagagcaaatgactggcaacccaaggcaatgattgatttccatgtcgtagctgtgaacactaatttacaagaaaatgaagggtttcagtcccagtttcagggccagagcaacaatatgaggagaatcacagagatgagcttagtgaagatcttcgattaacttgggatagacctgactgcagatattgtgaatcgggacagcaattgtgtggatttgatccagataacaacggtcaactcttctgttttcctggttaccaaacagttacttcaagacgtggagcccaagttttcagaatcatcacattttgcattgctggaccagcagcagtcattgcaatagtgatggcatgctgtgtgtgctacaaggacagactaaccaacaggtctgcactttcagctacaatatcgccggtgccacaaatcgcaaccacgggtctcgacgagtccacgatcgagtcctacgagaagatggtggt

SEQ ID NO: 51542 - DNA, 439 bp, Glycine max
  Clone ID: PAT_MRT3847_17556C.1
ccacgcgtccgcttagctccttgctcttgctgagggcatgaggcctatatgggtaaactactcatgagggggacagcgccttcatctgatgccctgagattctttgcaggtgccctgaactttattatgtggtattacggtcaatcttcagggaccgctgaataagcgaattactatgggatactgttgctctatcgagctgcccatgtttgatcttaattgcatcatggatcactttcagtacaactgtatgaccgttgggactataccattgagtactgttgctgatatcctttatgggaatgatcttcagagttctgatctttattgtgtatctctatgctataaacagatgagtgcctatttcgcaacttacttatacagacatcttcttggcaaaggcttgaggcggcaatattcaatccttgaggtgtcaaaa

SEQ ID NO: 51543 - DNA, 398 bp, Glycine max
  Clone ID: PAT_MRT3847_17557C.1
acgagagaagaggcgtggaaatcaatgatgctagtgccctttttgcagaagtcatgaggaggatgcatctcatttatttttcagttgtgatgaagtcttgccgttgaggtgggagtcaatgtcgtggataaatactgtgggggtattttcagaaactccgaaaaaccatttccttcaattttctaattgtaattctactggttttaggggtcaacgatggcagagttggtggatcgcactcacgtggtgtacttggcatcataggaataaattgtcttcctaaatgaaagctataatggtcataaattgatggaggatgcattattcttctgctggacctggtttaaaaaataggatttgatatcccatttcactcatggtctagtagtattagggag

SEQ ID NO: 51544 - DNA, 1128 bp, Glycine max
  Clone ID: PAT_MRT3847_17558C.1
attgattccaacaccctcctgcattatactaatgtctttgatgcaattgttgatgctgcttattttgctatgtcatatttgaagtttaccaacatccctattttagtcacagagtcaggatggccctccaaaggcgactcatctgagccggatgcaaccgttgacaatgctaacacttacaatagtaacttgatcaggcatgcccttaacaatagtgggactcccaagcaacctggaattgcagttagcacttatatttatgagctttataatgaagacttgaaatcaggtccagtgtctgagaataattgggggctgttttatgctagtggagctcaagtgtataccttacacttgactaattctggtactgtatttgcaaatgatacaacaaaccaaactttttgtgttgccaagagtaatgccgattcaaagatgcttcaggcagcactcgattgggcttgtggaccggggaaggtggattgttcgcctttgctgcagggtcaatcgtgttacgaaccaaatagtgtagcttcacatgctacatatgctatcaattcatattatcagcagatggctaaatctgcggggacctgtgatttcaaaggagttgcctctatcaccactacaaacccaagtcacggttcctgtatattttcaggaagtggtggtaaaaatgttaccagcgtaaatggcacagcattggctccatcaacaaattccacaaattcagggtgcttgtcccaatattacaatggtggattttttacaagcactgtgattcttactttaattttgagtgtagttgtcttgtaaaactacgcactaacatgttcagcattagaatcctatttaatggtgacacactcttcaactaccatttaagagattgctgcatacccaattttgtgttcctcatttagaggatttgaaggatggcgaggttggtcaaaatgtatattggcaattgtaacgtgagttgtccattggatttttgtacaaacgaaccagaagaatttatttaaaatcgttgatgtaattaccttgttaggtctaatcttttctttttaacacccaaaaaaaagtgtatcaaaacaaaaagattattaaatctgtgattttgatcgt

SEQ ID NO: 51545 - DNA, 742 bp, Glycine max
  Clone ID: PAT_MRT3847_17559C.1
tcaagaatgggattctctcatggtcatccttctgatgacagcttcaatgaaaatgagctgttcaatgaacaggtccaatccttgcaaagctctatccctgcacctcctgctcattttaaactgagggatgatcatatatcaggaagttcattaaaagctcccaaatcattcttttcactatcaactttccgaagcaagggtagtgactcgaaacccagatgaaatttcactgagttggcctggcaagtaatttggatcatcctcaatggtaggggggtgatattaaatatgatacagaaaagagaggtaggctcgatacaatgatctatatgaaagatacatgagatgggggttatgtatattttcttggactcatgaggttttcccctatgatttagttagtcatggttgtgttgatatatgctgcatactgtagtcaatgaagtgtcgcctattggtgcagtgtcattgtaattttggcagtagtggcactctttcgctcgtttattttgatttacttgtgtgatgtatatcagagttgaactcatgttagaatgaatcagtacagtcagagttaagaagagtaatttgattgcggagtaaaacagtagctttcaaaagattatttccccctccccttgaaaagagcaaataagaatgataggctacttatcctttgccactttactgttacttttagctgtatgaactttcagctattaattaatgctcattttcatga

SEQ ID NO: 51546 - DNA, 686 bp, Glycine max
  unsure (1)..(686): unsure at all n locations
  Clone ID: PAT_MRT3847_1755C.1
cccattntggcactttgaatgtcattaaatttcatgattttctcaaagattttaagtctatctgttcttgagattttactaaagatgatattttgtctgtttttcctgcagtcatagtaatcctgctactgaattgttcctcaaacctattatttatttcttagatacttgtatgtgtctttgttctaagtttgtctcacaggcatcttatgtttttttccgtataataaatcaagcaaaatatagatgtaattggttagagttggaatcactttgttatgtgcattttgaattttatcatgctcttcatcatttgtcacccctcttaattggggtgcaaaacacatcagatagggagcatttttgtgggacatggaatcttcttttaattattgatgtacagatgcatttcttgtgtttctaatatctagtgtttatcagtctattctataaatcttaaatctgccgaatttacaaatgatagtgtaaggtgttgacattatttttgtccaggtgcaagtcaggtgttcattggtttaaatggattttgaaggacgttcagatggaagatccattaaaaaatattccctctcatgtggctcccttgaagctggtatggatcactttggtgcttttcagttaactgaagcactgcattaacccttctgtcgtcttctcgcagccgt

SEQ ID NO: 51547 - DNA, 519 bp, Glycine max
  unsure (1)..(519): unsure at all n locations
  Clone ID: PAT_MRT3847_17560C.1
natgtatagggccnncaaataaaagttcacatggaccactattcaatgctccgaaatgaataagatacatgactattgacacataataatatgctctattattccgcttctaaacaacaaactgaaaaataaaaataaaattcaatctttagcttcttcctttggcttcctcaggagatagaacaaaccttctgtcaaagcagctttggaagtcaaagaagctcccagcaggtttagtgcctctatttccccaattctcagctcatgctcctccaaattatccaatggaacattcagcttttgcagcaatgaaatgctggaagtatttgccaatggtgttacttgcagatcatcccacacaacaaatagtgatggcctcctcacaaagcctacagaggacttttttgggccattaggggatcttggatcaaaaagtttcatggcccctggatggtgtatcaaactatgatcttttgaaaccactccattcccaatggaatagcatatgttacttttaat

SEQ ID NO: 51548 - DNA, 2586 bp, Glycine max
  Clone ID: PAT_MRT3847_17561C.1
tccggaattaccgcgtcgacccacgcgtccgaatgtcttgagctggaagcttcggtttctctctctctctctttctctttctcttagggttttcactttcaccaatttctccttctcttccgatctacgcccaaagcttttcatttctttcttttgttctgcaattagacattgctagggttctggagtactggattagctcattaaggattgagtactccatctatcttctgtcttcatggataaagacaaatctctaggtttgccacctccgtctggacgttattctggttactcgtccaccggaagtgttttcaacgtgaaatctgaaccgtccccgtcgtcgtcgaccacgttgtatccgccattggctccgggaactaccagttccgagtctagccattttggacatggattgtccacggattctagtggttttagtcatgatattagcagaatgcctgataatcccccgagaaatagaggtcataggcgtgctcattcggagattctcactttaccggatgatattagtttcgacagtgaccttggtgttgttggaggtggtgatggtccttccttctccgatgatgccgaggaggacttgctgtccatgtaccttgatatggataagttcaattcatcgtcggcaacgtccacgtttcaaatggttgagccgtctaatgctgtgggagcatcggcttcaacaccggcgtcaggggcacccacctcttctaccgagaatgttgttattgggactaatgaaaggcccagagttagacaccagcatagtcaatccatggacggctcaaccaccatcaagcctgagatgctggtttcaggttcagaagacatgtctgcggctgattccaaaaaagcaatgtcagctgccaagcttgctgaacttgccttgattgaccccaaacgtgcaaaaaggtttgctttatgatttctgggtacattgtttcttgttcattaattaggcaatatgctagttgtaaatgtcatgtcatgtttatcactattctcaatccgttgcatatttattacctcatttctagttcatgctgcttttgaccaaatgagatgatgttgtataagaatgtttttatctaggatctctaaaatgagggaagtgtgtattttttgaagataaaatacagttataactctgttgtttgaatcatgatgcaactcgtgagattgcatgagtttatgcgccaatgttgggcttctgtgctggatcggacctgggatcattggtggcaaggattgtagtgggattgtgatctatcatgcgaaaacgtgagatcggcaatccttgcaagttatgtagaagtaaggattgggttgggtccctttaacccagtttcaaaaaccttgaatttcttttttccttcttgaaaaacactttcattctcttccccataagtgtttgaccctttctccccatcattcgcgactttcttgcaattgtcgggcgttgacgctgcactgcccttgtcgctgtgcgctgctgatgtcagtcacacctctgttttgacttttgacaacagagcatcctgtggaagctctcgaatattccttcatgttgggtgggaccaaatagatttgcatcattaaatagaaacccaaacgcccaatccagttttattttcaaaataaatatatattaacttagcttggacctgaaccaaaaacaataatgaagccgtatcttaaatttgggccgctatgcaaattataatttgtaatttacaaatatagaattaagctacttaactttgtttattattataactataattataatttaaagtttgttttctttatctctgttgtttttttatgcatatgtaataagtattttatataaaggaaggtaagatcttacaatctgagttacgatccctgagttatgagtttctgccccccttctgatcctaggaaaaatctcaattttaacaaccattataactgttggttataaaatctcacgaactcaactgttcatttttgttttttttaccaatgtttataacttctggaagtacacattttttcactttataggagccaatttcttttaactaatatttgtttgttgctagatgttgcaatcctttgtgattgtcatgattgatatctatatgcatttgacttacatgacactaaatctagttaactttatgagttatcacttctctttgtgacttgaaatagttaaggtgggcacaaattgaaggaaatagtgaaagataggaaggcttatagctgtcagttttttggagcatgatagtcaaaatcgcgttttggagcataggatcgtacaggtttacgatcattaccactctctctgatttcggttgcaattttggcggattgcactggatcaccattgaagatcgagacttgcagcggcacgacactttttttttgagtttgtttctaggttatttgcgggtcgggtttgcgacccaatactttaacccggattgcttcagcccaaaaaacctaattatttaagtccaaagcccagcttttctattccccctgcgtccaaataatcctgcgcccctttgacct

SEQ ID NO: 51549 - DNA, 153 bp, Glycine max
  Clone ID: PAT_MRT3847_17562C.1
ttttataaaatattccagagtatattatgaacaaccaataagcggggtatagcacagcgttaggcaaccacaaattccaccactatttaacctccgtcaaggtcctgagttaatgttttcatgcgaaaaaaacacaaacacttaaaacttggg

SEQ ID NO: 51550 - DNA, 661 bp, Glycine max
  Clone ID: PAT_MRT3847_17563C.1
aactgagggatgatcatatatcaggaagttcaataaaagctcccaaatcatttttttcactatcaactttccgaagcaagggtaggtgactcgaaacccagatgaaatttcagtgagttggcctggcaagtaatttggatcatcctcaatagtatgggtgtaaaggacaatattaaatatgatacagaaaagagaggtaggcacgatacaatgatctatatgaaagatatatgagatggggttatgtatattttcttggactcatgaggttttcccctatgattttagtttagtcatggttgtgttgatatatgctgcatactgtagtcaatgaagtgtcgcctattggtgcagtgtcattgtaattttggcagtagtggcattcttttgctcgtttattttgatttacttgtgtgatgtatatcagagttgaactcatgttagaatgaatcagtacagtcagagttaagaagagtaatgtgattgttgcggagtaaaatagtagctttcaaaagattatttccccctccccttgaaaaagagcaaataagaatgattggctacttatacttatcctttgccactttattgttacatttttgctgtatgaactttcaagtttcaactattaatgctcaatttcatgatagctacacgttcc

SEQ ID NO: 51551 - DNA, 195 bp, Glycine max
  Clone ID: PAT_MRT3847_17564C.1
ggaatgatgctactctaaagtatggagtgacgagttgaggtgagtggagtggtacttttcatcggatttaatttcttcaaatgtaggtatagttggcccagattataataaaatacatgtatatcttagaatttgggtaactcaaccttgagagctagctcatggcgtggtgttgaccctccactaatatacatt

SEQ ID NO: 51552 - DNA, 1452 bp, Glycine max
  Clone ID: PAT_MRT3847_17565C.1
caccatagatagtcctcatcttgtttgttggtgtgttctcataaaattatattttttacgcgcattctcattcaccaatggcgttcaccgtcgccagtggcagtggcgtggctataatcccctgcggcaacaccggcaccgccgcactcttccctcaccgaacgagaagaaacctccacgtggcgcgcgcgaagaagcccctcaacggcgacgacgtttccgtttacgctgagctcctcaaagccgaagtttccgttttggaaaataataagcctctcgacgacaacgatgccgctttgaagttcctagagaagatagaccgtcagtttcaacagcccgatttatgggaaggaccccagtgggactggctcggcatcttcatcaagttttcccccatcattggcatcgctgttgcggcaagtcttgctatctacggttgctttacatttcatgaaccaccaaaaaatgtgagggaggctgctgaaaggctgtattctgtgcagtctggtgtggagtccaatgcagagtccgatgatgtggagtccagtgcagagactgatgtggagtctagtgcagagtccagtagtgaagttttcaaagagcctgatgcatatgactcagatgtgtttgattccaatccaacagaggtagcacctagtttggagtagactctccgtagatactgcaaatataccttatttttagcatttgaaccaggtgaaaggattcaaactttttctccactaaatttgtaaggcaatgcttctgcttacatgtacaccctcttaaagtgtatcaattctgagacagatcaagtggattagttgtacgtgtaaatgtatggttatttgttgcattgcatctgattgctctgatcgttgtagacaatcttttatctatgttatagatcagaactactgtaatggaatcttttacaaacatatatagttcaggtagagtttgagttccgatcgatactggttttgttgaactagaattatgtgttaccatctccttcatttggtatagaattttgctataattcattaagtgtgagtaggaaattgatttttgttattggggattcacttcttctaattcttgttattgttattgttgtgttccttatacaagtagaagtggattagggagttattaagttgtgtttcgatcaatttctcaacagatacttattataagtaaagattttcttatatattaacttatccataggttaaaatcaacctctggagaagctatctgaaagagctctggaaattaacttatgcattgactaattttgatggttctgtacataagtagaaatggattagggagctcttagttgtagatgttttatgttaagagaacatacttgttcttgtgagacaattctgcttgagtcaagttaaataactgtactgtagatgacacaatctcagtatttaatgt

SEQ ID NO: 51553 - DNA, 194 bp, Glycine max
  Clone ID: PAT_MRT3847_17566C.1
aaaattgattccaattaacctttccaggcttaaggatctattcggattcctggtgggacctttaaaccaaagggcctgaaggttttttgttaaaccaaaaccataattagctgggatcctaatccttaaccggtttccggggccactggtcaagtttttttgattagggatgaaccttgagaattttgcctggg

SEQ ID NO: 51554 - DNA, 114 bp, Glycine max
  Clone ID: PAT_MRT3847_17567C.1
ccttacataatttgtaaagaaaaacaagcagacttggagaaataatgtactaccatgtgtccaactaccattgttagatctcacactgaactcttggcagtgacccctgtgttt

SEQ ID NO: 51555 - DNA, 300 bp, Glycine max
  Clone ID: PAT_MRT3847_17568C.1
ttttacatttttgaggcctcaattaagccaaactaaccaacaaaacatcaacacataacacattcaatcagtaaatatatttcagtttatacctcgtaattgaatacacggctgccattaaatttaaaccttcttatagatacacttaatttatattaatcaggtctaattagcttttagcaaaagttactttgaaactcgccacttttcacgggataccgatgaagctctggctttcacccttcgggaagaatttggctatcgggtttcgacaacctgaaatggataattgacaccaat

SEQ ID NO: 51556 - DNA, 351 bp, Glycine max
  Clone ID: PAT_MRT3847_17569C.1
aacaaattaacaagaaagtgaaattgatttgggttacttgttttcttgagtcattcttggttagggtcgtgaatcacttaagatacttagtacttgaatgtttaatatcctcactttgagagtgattgttagcgtttgacttgcttctttttgaataaataaatctatatagacttttgctttgaaagctcgtctcttaaattttcacatccacttttaagggtgtggctgcaccaaagtggttaataagcatgctgcggcatctaactagttagaaatttgtcctactgcatagatatccctgctgattatgtctgtattaaaagtaaatcattcttttgccaatacatc

SEQ ID NO: 51557 - DNA, 330 bp, Glycine max
  Clone ID: PAT_MRT3847_1756C.1
ggggaaaaatgccaaccattttaccatggcattaaaaatttaaaaccagggttatgtatacaggtcccccactaaaaaaggccaaagatgggggtttttggcattttttttcaaggataaaacactttttttgaaacacgcaaatcccgggactttttatactcacaaggtttttacactggaatcaaagcgttccaggccagggcgaggcaaaaacttgtccaggagccaattaaattttggccgtaacaagacatttagcaaaggttgggggccctggtcaatgggataatcaccaagcctttcaactaccatgttgtattgacccgg

SEQ ID NO: 51558 - DNA, 1064 bp, Glycine max
  unsure (1)..(1064): unsure at all n locations
  Clone ID: PAT_MRT3847_17570C.1
cctgaagaagtaaaaatatatctgttgcaaatcacatggtaaaaaccataagatcagtacttcaaaacaccttacattgaaaagataacatgaaattagctatgaactttaagatgtaatccactatattacaaaagaagataacatacacaacaaatattgtctgtaatcctacttccttttgagctacagatcagtcttccatctttacagcttccatccaactgtccaattgtgttgtctgatcttcaatatattgcctaatgtaaaacttgtcaaaataaaaggattgcaaccattatggttgtcaacaaaagagaaacaaagaaatgagaaatgaatactacaggtagccaaaaagagctcttacagcttgattgtacatcacataccaaccaacaagccaaggatctctccagttagaaggaagcaactgtaaacacaaattaagactagtgctctctccacctgggacttgagattggaaaaaagcctgaaggagataacggaaacataaggcccggagaaggaggaggttggggtccagggcctaaaatccctggctgcgccatggacgagaatggaaaattcggtgtaagcggagatgggaactgaatgccaggtgacagtagaggatatggtgaccgaggggatagcaaattcatgtaaccagttggagaaggcaggaggaattgagaggttggagaaggtaaaaggggaggagggccatttgcttgtggtgaaggaagactaggcactggagggtttgtagcattcataggtggaacaggtccattaaatctcagagatgggtacatgggaatgggaggattaggaagcaaagcagacaatggcggaggatgaggctgaacattgcccggcacttgaggttgagggtatggatgtggctgaggctgaacttggttacccctttgacctggatccattattgaattctgaaggtaacgcatgtaagcagagatgggtgactcggtgatattagaccantatatccccaggctggtaggaagcggcccgggcccggccggcnnctcgagcgggcc

SEQ ID NO: 51559 - DNA, 266 bp, Glycine max
  Clone ID: PAT_MRT3847_17571C.1
gcggttacgcagtagctcaacgtatgacttggtaagtgaccattaactatatccaacgagaccgggatcatgtgttacatgtgtgggagaatatgtagacatcgccgtatatgctccatgacggcgactcgttctttgtaggcacagtacttacacctctgacaaggtgatgtgaatgttgaacgcaaggatgatcagactctacatacattacaacatgctatgtgagaaggagattaggtttcatatatttaactgcaatctgt

SEQ ID NO: 51560 - DNA, 152 bp, Glycine max
  Clone ID: PAT_MRT3847_17572C.1
cgcccacgcgcccgggaaagaaagcgaggctgtttaccagaacagaactcgtactgccaaggccaaaatggaccctgatcaccctgctgagaaaaacccattaagctacgatcatactgcattcagtacactctggggtgaatggtcatgga

SEQ ID NO: 51561 - DNA, 223 bp, Glycine max
  Clone ID: PAT_MRT3847_17573C.1
ggggtggatcctaatttatagcacccgtccgcgcgccggcaacgttatacctgggggaaagggacaccaaaataaaaggcagggggcggcaataaacaacggggggaggggaaaacccatggggaagccaaacataatggtcttaaacaaaattcccaaaaaaaacgggggggtaaaaaggaaagggccgagaccaatcaccctcataaaaaaaagctaaact

SEQ ID NO: 51562 - DNA, 406 bp, Glycine max
  Clone ID: PAT_MRT3847_17574C.1
tttttttttaataaaaaagtattaaataacattcaattttgctgttagtaaacaacccatgtccaatacaaatatgccataagtaattgttggctctgatatacatttgagtgtttggccatcaatttttttcctagcctatactaaatgaagaatttgatgtggctatttaagacaactacgtgtccgttgtcctaattaatcttcacataacattaatcttcacttgggcaactagcttccatatcaatagttttccagttaagaacatatgttgtattagaacttgataaactccggcgaagtaattgtccacataaacttctttggcaaggagcaagggaatcagtatgtagataaccattgatgaaaaacatagcaagtctcaaatttatcggacgcgtgg

SEQ ID NO: 51563 - DNA, 330 bp, Glycine max
  Clone ID: PAT_MRT3847_17575C.1
agtgaacccatacctaatagctctaggcaaatgcactataccatatctaacattgctacattcgtggctgaccaatttggtgagcgagatcccacgggacaacaccaaacaattgtctccgtcagctctttgtatttgggcacgaacactgggacactcttctccatcaccatattgactaatctggaggatgatgatggactatcgactttgaggatctgggcttcagctgcctcgatctgctgctcaggaatagattatgtctcctcgcggcacacgactggatagataccataagcctaatggaaaccctcgtgctacatttcgcca

SEQ ID NO: 51564 - DNA, 752 bp, Glycine max
  Clone ID: PAT_MRT3847_17576C.1
ttcctctcgaagaaattatgaaggataagaattttgagcttgtaacaaaagaaatatttggaccatttcaggttatcgcggactatcaaaacagtcagctagcagttgtattggatgctttggaaagaatgcataaccatttaacagctgctgtagtttcaaatgatcctttgtttttacaggaagtcattggcaaatcagtaaatggtactacttatgctggtttaagagcaaggacgaccggagctccacagaatcactggtttggacccgctggtgatgctagaggtgcaggaattggaacaccagaggctataaaacttgtatggtcttgccacagagaaataatctatgattttgggcctgtgccaaagaattgggaagttcctccttctacttgagaaaagtcctatttatgataggaacaacgaaattaggagggtgtgtcctatttatgatagaagcgatgagtaagaatgtaagaggaagcatatttgcatgtaggatatgccacagcccctccatgacatttttagattttagaataaatttatgaaaaaaaaatattttattaggctttttttttattgctgaaatataattggtgagatcatcatcggttgaggtgctgacatgataaaaggaatcaaattgtattgatgccgaacagtgtagaataaataattcatatctaatgctgtaaaaaaaaaaatcttatctaaataatttaaagaattggcttacaggctctc

SEQ ID NO: 51565 - DNA, 1134 bp, Glycine max
  unsure (1)..(1134): unsure at all n locations
  Clone ID: PAT_MRT3847_17577C.1
aacaaacataataacttctccaatattccaataatcctttccccttcatttcacacttgacatactatttcttttattcatttattgtttttttttcactttctaatcccaacataaacataaccgtttttgtttttatctcacgccacgccctggttccagtagtgatcgccacaccgcgcttagtatgaagcttcacctaatccgcgccaccgtcatccgccgccacgttgaccacgttgaagaaccgctttcgccgcagtgatgtaaatatattctttctcttcttcttcatgcatcctttctgctgcgtgtccgccatttccgaccaggcctcgcctgtaaaaccctcgttcgcggacttcgccatgccgcctctccccgccgccgccgccgccaccaccgtgagatccgattcggctccgcgtcacagccacaagcacagccacagccacagcgggagccagcgggagcagccggtggtggacgtgaagatcaacgacctcgtcgggaacggaatctccggaatactgtacaagtgggtgaattacgggaaaggatggcgaccgcgatggttcgtgctccaagacggcgttctctcctactacaagattcacggacctgataagatcgtcgtgaatccagaaaccgagaaaggctccatggtcatcggcgaagaatccatgcgcaggatcactcgcaaccgcaattcctatccctctcaacacatacgcaagccgtttggggaaatccatctcaaggtttcgacgattcgcgagagcaaatcggacgagaagcggttttcggtgttcacggggacgaagaggctccaccttcgggcggagacgcgggaggatcgggtggcgtggatggaggcgttgcaggcggtgaaggacatgttcccgcggatgtcgaacagcgagttgatggctccggtggacaatgtaactgtttcgacggagaagctgagagttcggctcatggaagagggagtgagcgaggcggcgattcaagacagtgagcanatcatgaggactgagtttgcggcgctgcaaagccagcttgtgctgcttaagcagaagcattcagccctcattgacaccttgcgtcaattagagacagaaaggttgatct

SEQ ID NO: 51566 - DNA, 797 bp, Glycine max
  unsure (1)..(797): unsure at all n locations
  Clone ID: PAT_MRT3847_17578C.1
aattcggctcgaggcaagaccagggatttggatagtgaggagctattggagcagttgcctgctttgcagcagctgctgtatcgacttgttggttgtcggccagaaggagcagctgttagcaattatgtgatacaatatgctcttgccctggtactgaaggagagctttaagatttattgtgctattaatgatggcattatcaatcttgttgataagttttttgagatgcccagacatgaagctattaaagcccttgatgcctataaacgtgcgggtcagcaggcagcaagtctatctgatttctatgatgtttgcaaaggattggaacttgctaggaattttcagtttcctgttttaagagagcctccacaatcttttcttgtaaccatggaagaattcataaaggaggcaccacgagtggttatagttccaaatgagccattgaccagaaggtgttcccacgatagaagacaataaatcttctgaagaacaggagccatcagtgcctgttgatgatattgtctcaaattctgagcctgctcctccacagtctcgcaacaattttgaaaccggagacttactggtgaaaccctaatccaaggttcagttatgtcagattatgtttttctataacttccttctttctttgtcctggttgtaggggttgaatgacagtacacctgatgcatccttgatagaagaaagaaatgctcttgccctagccatagtctccactgaactgggaagtactgctntagattcaagtggtgctcagcaagagattttgattcaactga

SEQ ID NO: 51567 - DNA, 473 bp, Glycine max
  Clone ID: PAT_MRT3847_17579C.1
tgcaggtcgactctagatctcgaaattcctctatcaatctctgttccagaatcatcatggtcgcaacatataaggacttccggctcagcgcgtcgactactacattagcctttcctggatggtaggaaagaccaaaatcataatccttgaggaactccatccatcttcgttgcctcatattgagttccttctgatcgaacaagtatttgaggctcttgtgatcgctgaaaacttcaaaacagtactatataaatagtgcctccaaatctttaaggcaaagaccacagctactagttccaaatcatgggtcggatagttaacttcatgaggacgcaattggcgtgaagcataagccactacctttccctcctgcatcaatacgcaccctaagccttgtccgctcgcatcgcaatacacttcaaatggtctcttagggtcatgcaaaattaacactggagttgttgtcaatcgcc

SEQ ID NO: 51568 - DNA, 250 bp, Glycine max
  Clone ID: PAT_MRT3847_1757C.1
ctcgagccgggaaaattgcattacttttgaaatttaaggtacttaatggcaaaaattcttgtgcagatccagatcacttgaaacctgacattttttaatgcgatgacactgactgcagcttattatatgcataaccatagtagtgtttttgttggccagtgtgctagttattttagtgcatcattatatgtagtattaatttctcaactgtttatgaattctttattttgcagacttttttggtttggca

SEQ ID NO: 51569 - DNA, 272 bp, Glycine max
  Clone ID: PAT_MRT3847_17580C.1
ctatagagacagtgaggttacccatagtctcatatagtgttacacagcaaaacatttcagcaacacaaaacaatgggttttcttatggctggacggtattctctccacatggatcctcaatcagccacacctaaaaggaaccgctcactcactaaggatgaaatcgatgcttactgggaatcaaagaagaagattgaggaagaacaccttagagctatctccaatgggtcagagaccttttcaggtttgcaaaatacacagagcctgaaaag

SEQ ID NO: 51570 - DNA, 2235 bp, Glycine max
  Clone ID: PAT_MRT3847_17581C.1
gaaagaaaagaaaaaaaaccgaagatgatacacagcgaaggaggggccgctaaaagccaaggttgtcggaattggatttgattcttcttcacttgcgcgatttctccgatcaaagttcctcactttctctcccttgatcgacacccaccacgcgttagagagagaaaaaaaaccccgagagatcggaaagatgggtacgcttcagtcttggagaagagcctacggtgccatcaaggataccaccaaagtgggtcttgcccatgtcaatagcgattacgcggatttggacgttgccatagtcaaagccacgaaccacgtcgagtgtccccccaaagagaggcacctcagaaagattctgtttgccacgtctgctgtgagacctagggctgatgtcgcttactgtatccatgcgctttcgcggcggttgacaaagacgcggaattggacggtggcattgaaaacactgatagtcatccataggttattgagggagggtgatcctacttttagagaagaacttctgaatttctcacaaagaggacgaattctccaactatcaaatttcaaggatgattctagcccaattgcttgggattgctctgcctgggtacgtacctatgcgttatttttggaagaaagacttgaatgctttcggattctgaagtatgatattgaagctgagcgtctacccaaacctgcccaagggcaggagaaggggtacagcaagaccagggatttggatagtgaggagttgttggagcagttgcctgctttgcagcagctgctgtatcgacttgttggttgtcggccatatggagcagctgttagcaattatgtgatacaatatgctcttgccctggtactgaaagatagatctaaaatttatgtttctagtaatgacggcattatcaatcttgaaagcacttgttttgagtaaccgtgcgggtcagcaggcagcaagtctatctgatttctatgaggtttgcaaaggattggaagtctatctgatttctatgatgtttgccaaggattggaactcgctaggaattttcagtttcctgtcttaagagagccagcacaatcttttcttacaaccatggaagagtacattaaggaggcaccacgagtggttacagttccaactgagccattgcttcagttgacttacagaccagaagaagttcttgcaattgaagatgctaaaccatctgatgaagaacaggagccaccagttcctgttgataataatgttgttgtctctgattctgaacctgcacctccaccaccaccaccgtcgtctcacaacaattttgaaactggagacttgctgggattgaatgacactgcacctgatgcatcgtccatagaggaaagaaatgctcttgccctagccatagtccccactgaaactggtactacatcagcttttaacacgactgctgctcagacaaaagattttgatccaaccggatgggagcttgccctggtcagcactccaagtactgatatttctgcagccaatgagagacaattggctggtggattggactctctcactcttaatagcttatacgatgaagcggcatatagatctcaacaaccagtatatggagcaccagccccaaatccatttgaaatgcaggatccatttgctctatcaagcagcatccctcccccgccagctgtccaattggcagcaatgcaacagcaagcaaatccatttggtccttaccaacaaccatttcagcctcagccacaaccgcagcagcagcagcatcatatgttgatgaacccagcaaatccctttggggatgcaggatttggagcatttcctgcccccaatcctgctcctcacccacagaacaacaatccatttggaagcacaggcttgttataaagaacaaatgcctttttgaacatacaaggatgtatttaatcaatcaagttggttggttggttttgagcaaattgtaacatgagtttctcatttgttgctagatatagatgttttctggaatgggaggtgcgccttgtaaaatcgagacaacgcacgcggtgtattgatcattttatgatatacataatggtgggatagctttctttgaacatttcccaactcttttaagtaattggaacacttttacacatgttcatatatatcatgtattcagtattcaaagtatggttctacactttgtatactagtatgtaagatctcatatttgatcttaaaaa

SEQ ID NO: 51571 - DNA, 807 bp, Glycine max
  unsure (1)..(807): unsure at all n locations
  Clone ID: PAT_MRT3847_17582C.1
gcaagaccagggatttggatagtgaggagctattggagcagttgcctgctttgcagcagctgctgtatcgacttgttggttgtcggccagaaggagcagctgttagcaattatgtgatacaatatgctcttgccctgtttttttttgagagctttaagatttattgtgctattaatgatggcattatcaatcttgttgataagttttttgagatgcccagacatgaagctattaaagcccttgatgcctataaacgtgcgggtcagcaggcagcaagtctatctgatttctatgatgtttgcaaaggattggaacttgctaggaattttcagtttcctgtcttaagagagcctccacaatcttttcttacaaccatggaagagtacattaaggaggcgccacgagtggttacagttccaactgagccattgcttcagttgacctacagaccagaagaagttcttgcaattgaagatgccaaaccatctgatgaagaacaggagccaccagttcctgttgataataatgttgttgtctctgattctgaatctgcacctncaccaccaccaccatcggctcacaacaattttgaaactggagacttgctgggattgaatgacactgcacctgatgcatcgtccatagaggaaagaaatgctcttgccctagccatagtccccactgaaactggcgctacatcagctnntaactcaactgcttctcatacaaaagattttgatccaaccggatgggagcttgccctggtcagcactccaagtactgatatttctgcagccaatgagagac

SEQ ID NO: 51572 - DNA, 1012 bp, Glycine max
  Clone ID: PAT_MRT3847_17583C.1
gactcttacagttctcaagaagtcgcgtcagcatagggttagtggcgttagaactcagaatttcatattttattcacttaaataaagcgcattactatgtgcaatgagtgtgtttaaatataaaaaaaaaaaaaaaaaaaaaaaaaaaaaaaaaaaaaaaaaaaaaaaaaaaaaaaaaaaaaaaaaaaagggtggaaaaaaaaaaaaaaaaaaaaaaaaaaaaaaaataaaataaaaaaaaaaaaattgggggggggccccccttttgtggggttgggcccccggaaaaatattcggaaccggggccctgaggggtaaccttttttcatttaggggggggttaaaaagcttgggaaaaaaaggggacaaaggcttgtagtagaaaaacgatttcccttaaaaacacacacaacataatgaatgggaagatctgcgggcaattgacggcacagggtaaaggcaattaacaaatattggtaaccaagaatctgttggaaaatttccatcaaaaaattcttgtgtatttgccaataccaatttatcattaaacacaatcttatttgggaaggccttgcctgcaccttgaagacccaacaaatcgatgctcaacaaaagatcaatattatcatttgaatcaggagcattcataatcctctgcattgaatgaaattcttcaatttatcattaaacacaatcttatttgggaaggccttgcctgcaccctgaagacccaacaaatcgatgctcaacaaaagatcaatattatcatttgaatcaggagcattcataatcctctgcattgaatgcaatttttcaatttgtgctatggtgggcacatcagctgtgatttcctaggagccggcccataaaacattagacatgtgcttaaagtttctcttgagaaaatcacaatctgctaactttctaaagagaaactttaagcagatgtctaatgtttcatgggtggctcctgaggaaacactatctgctagctttccacattgcatgttgc

SEQ ID NO: 51573 - DNA, 267 bp, Glycine max
  unsure (1)..(267): unsure at all n locations
  Clone ID: PAT_MRT3847_17584C.1
cttgggagaagaggtcgagtttcanagcagcaatggtgtacgtgcaaggctcagaaatcaaaagcctacttcaagagatatcaagtccaagttcaagagaagaagagagggaaaaaccgattaccgtgccaggattcggttgattaatcaggacaagaacaaatataacactccgaaataccgatttgttgttcgcttagcaacaaggacttgttgacacaaataatatctgctngcatgcggcgatttgttctgctgcagcnntgc

SEQ ID NO: 51574 - DNA, 337 bp, Glycine max
  Clone ID: PAT_MRT3847_17585C.1
gcttagtgtcatagtgcagaaattgcctccaccggaacctaagaaacctaagactattgaggttaaggttgcttgaacaacttgtagaacgaagttaaataaacgtttgtttccctctctagtagaagcaggggaagtaatgttttttctgatttgaaggtttttctgttctcaaagcaatggttttatggtattgtgattttgtgatgttgtaatcagatgatgctatatcagttgtttagtatttgctgatcttagttatttctaagttactctgtgctgtccaatttccatcccaatctccaaataacagaatttaacagaatgcgtttagatg

SEQ ID NO: 51575 - DNA, 877 bp, Glycine max
  Clone ID: PAT_MRT3847_17586C.1
cggctcgagtacggctgcgagaagacgacagaagggggtaacagcgagaggcaggcataggcatgttaggtggaatccaattctcaaaccccaatcggtactcagtattcttcttcttgttcttgtttctgtttcgtcattttttatcttatgttccttgaatcaattgtgatgcttagaatttgttgcacttgcacgcgttgacggacaatgaagctccctgtgcgttacttgattgttattttgaccttcatctgcaccttggtttgctacatcgaacgagttgggttttccatcgcgtacacagttgctgctgacggtgccggagtgaatcaatcgagcaaaggtacaatactgtccactttctattacggatacgcctgttctcaagttcccggaggatgggcagctcagaaaatcggggggaggagggtcctgcttctttcatttctgttgtggtcattaacttgtgcactacttcctctggatcccaatcgcgttttgcttttagtcattgctcgtttgctcgttggtatagcacaaggcttcattttcccctccatccacacagttctagcacagtgggtcccccctcacgagagatctagatccgtctctctcaccacttctgggatgtacctaggtgcagctctaggaatgcttcttcttccaactctagtcaagttcagaggtcctgaatctgtgttccttgcggaggcggcattgggcgcttcatggtctttactttggttcaaatacgccactgatcccaaatccactgcctctggtgtcggggaatcagtcttgcccgtcaataaaaaaattgacactcacaacaaaaaaccgctttcagccaaaatcccctgggtcaaaattt

SEQ ID NO: 51576 - DNA, 228 bp, Glycine max
  Clone ID: PAT_MRT3847_17587C.1
ccaaagcaaagtgtctttatatcaaaaagcgtgtctgtcacaaaaagaggcataaaaccacacttcgcgtctacaaaaagattgagaacctatactgatctatctgaaagaaaattgggcgtgaaaataccattttcccaacacgttattggaaagcaacaaaaactttgcgaagcggtgtccagagggggacccctttaattaatgttttgaaataaaaagcgaggg

SEQ ID NO: 51577 - DNA, 1512 bp, Glycine max
  Clone ID: PAT_MRT3847_17588C.1
ctatgatgtgggtcgggttggcattcgaagtcgggatcgacgacgttgagcgttctctctcttcgttcagctcaatctgggatacgaagcttgcaatagctgcagcatctgaataggaatggattatatctgtctttttgtcaccttcactgcgattgcgctcttagggtttgtctttgtagtgttttttgaagcatataaaagaagaaacaaccatcagcatatcgaagttccggctatttttgaagatcctagctcattgaaacaggttccttgcccacatattgttgatccagccacaaagtatatttctttgattatccctgcattcaatgaggagcataggcttccaggagctcttgaggaaactatgaattatcttcatcaacgtactttaaaggattcttcatttacatatgaggttgtaattattgatgatggaagtgctgatgagacaaaaagagtagcttttgaatttgtgaggaaatacacagtagacaaggtaagggtcatccttctaggaagaaatcatggcaaaggagaagcaatcagaaaagattttattaaagggaatgatgcattcacgtggtgaactacttcttatgcttgatgctgatggagcaactaaagtcactgacctatgaaagcttgaaaatcagattcaagctgttgccaaaagggaatatcaccaaggagattcaagtgatagtgatcctagatttagaatatctgatgtcccagctgctgtttttggctcaagagctcatccagatgacaaagatttctctgcaagggtctggaaacgcagttttttgaggaagggtttccagtatgcggaacatgttttgggagcttgtgctaattcgtgtacacagtgtggtttcaagatgtttactagggcagcagccaggaagcttttttcaaatgtacgcttaaaaaggtggtgctttgatgttgagttagtctttctatgcaagtggtttagaatcccagtttcagaaatttctgtgaattggtctgaaattccaggatccaaggtgaatcttctgagtatacctaacatgctttgggagcttgtgctcatgtctgtggggtacaggactggtatgtggagaatttctaattctacctgagcgagcgtagatgatcaacttaactgggaagagaagtggcattttcctatctaaacaagagtcacctcttacaagagaacatatactctcatgctgggcttaagggacaatcatgcaatatttaaagtttgtaggactaaccataaccttccgggttattcccttcagtttgggatcatagaggcttttatcctttttacttttagtattgctatttctactaggtaaaaatatattcaacattatgttgttactgttggctgggaatagttttcaatcacattggtttgtatttttcttaatcaaaatattatatagataacttttcattccatttgaaaaacataaaataatattggtgggccactgagcacgtcgc

SEQ ID NO: 51578 - DNA, 384 bp, Glycine max
  Clone ID: PAT_MRT3847_17589C.1
cccacgcgtccgtacggctgcgagaagacgacagaagggtacgcttgcaaaaaaacaacaaaaggttccggttgcaaaaaacacaacaaaaggttccggttgcaaaaaaacaacaaaaggttccggttccaaaaaacacaacgaaaggttccctgtgagaaaacaccacagaggggcacgtgtgagaaaacaccacagaggggcacctgtgagaaaacaccacagaggggcacgtgtgagaaaacaccacagagggacacgtgtgagaaaacaccacaaaggtgcacctgtgagaaaacaccacagaggggcacctgtgagaaaacaccacagagggagatgcgcgggagacacaatgtgtgtgcacaacacatgtcactgccc

SEQ ID NO: 51579 - DNA, 316 bp, Glycine max
  Clone ID: PAT_MRT3847_1758C.1
aagcaggacaacaaaaatggtacacgaagcaagggagtacattaaacaatgtttaggtggtggagaagatgatgcactcatattatgtggctcgggcacaactgcagccatcaagaggctgcaagaagtgatgggaatcgctgtgccatctgttctgagggaaagggctttgaagagccttgtttttttataaagatgggtggtttttgttggacctcatgttttttattctaacctcctttcttggaggcaaagcttggctgaggtggtagagattggtcttgatcacaaagggttgcttgatattgatggtcta

SEQ ID NO: 51580 - DNA, 667 bp, Glycine max
  Clone ID: PAT_MRT3847_17590C.1
aaagctacgcttaagcctttttactgaggttttcagcggctttttgtcacaatggtgcttcaaaacgatattgatttgctgaatcctcctgctgaattggagaagagaaagcacaagcttaagcgtcttgttcaatcaccaaattcgttcttcatggtataaaaacgttcttctaattgttattatttgaaatagaagttcttatttgaagcatttcgtatgttttaattatttgttgtaggatgtcaagtgccagggctgcttcaacataacaactgtgtttagccactcccagacagttgtagtatgtggtaactgccagactgtgttgtgccaaccaacgggtggacgggcgaggttaaccgaagggtgctcttttaggaagaagggagattgaatggtgtagtatagtagtaaccagactttttctttgtccatgattgaagagttttggttgttaggtttttgatatggaatcaattttagttatgaaatcaattttagttatgacatataaaattttgttaaattgtgagactgtatctcccaatcttgagtttctctttagtgaagatgatgatgtggttttgttggataatggatatttatttttgcaacaattttcttcactggagtggatatgggctacttttgttgttgttgatag

SEQ ID NO: 51581 - DNA, 750 bp, Glycine max
  Clone ID: PAT_MRT3847_17591C.1
ccacggttcctctccgtgaacacccaaagccaaacaaacaaacattaaccttaaacaaacaaaccctaattttttatctgcctctaattgtttgttcccttctcatccattcctaaataaattctagatcatttttttgccatatttcccaaataaaattccccgattaaccttcgtgctacccacgaaatctatttttcttcccatttttttctgagcatttagctgtcgcttctttttgtttgttttttgtcatcctcggcagatcaggttttgtttttgcttctgctccagctttggaagatccacagtctctctctgagtgggtggtttagtgtatatttttaagatactgatataaaagtatgggcagcagtgagatggataaaactccaaaagagaaggagtcaaagacgccgccaccaccacctacgtcacaggagcagtcttcgaccaccagcactggaacaattaatcctgagtggcctggctttcaggcatattctcctatacctccacatggtttcttggcatcaaatccccaggctcacccttatatgtggggtgtccagcaatttatgcctccctatggtactccaccacatccctatgttgcaatgtatccccctggtggcatttatgctcatccatccatgcctccgggatcttatccttttagtccttttgccatgccttctccaaatggcattgctgaggcatcaggaaacactcctgggcagcatggaagct

SEQ ID NO: 51582 - DNA, 749 bp, Glycine max
  unsure (1)..(749): unsure at all n locations
  Clone ID: PAT_MRT3847_17592C.1
acgacgacgacgacgttgagcttctctcttcgttcaactcaatccggggtaagaagctggcaatagctgcagcatctgaataggaatggattatatctgtttttttgtcaccttcactgcgattgcgctcttagggtttgtctctgtagtgttttttgaagcatataaaagaagaaacaaccatcagcatattgaagttccggctatttttgaggatcctagctcattgaaacaggtaaatgtttccctttgcattgtgttatttctgtaggtatgcaagattttgtgagcattgtttatttatttacttattttggggcattctttaagaagtctaatttagtgaaataagtctggaataactgactttagtagtccacttttcaagggcatttttttttctttccaaaggattggcaagtgaatttggtaatgcaaaattttgactttgttgctgcaagggtataggaaaattgtaattgtacaacttgaagattgcaggtctggaggaaacatgttttagcctatttttcagcttagctttatgaagatagctcactgttatgatatggttttgcttgatactcttgcatatttaggttccttgcccacatattgttgatccagccacaaagtatatttctttgattatccctgcattcaatgaggagcatangcttncaggagctcttgaggaaactatgaattatcttcatcaacgtactttaaaggattcttcatttacatat

SEQ ID NO: 51583 - DNA, 134 bp, Glycine max
  Clone ID: PAT_MRT3847_17593C.1
tgccgagcgtggtagtagatatgagaataacgccacatacacgatgcgcccgttcctcaacagtctgcgcatccatgaatggaaaacgggacgccccctgtcattagtgcattaagcccgcgcgctgtgagagg

SEQ ID NO: 51584 - DNA, 674 bp, Glycine max
  unsure (1)..(674): unsure at all n locations
  Clone ID: PAT_MRT3847_17594C.1
gattcaagctgttgccaaaagggaatatcaccatggagattcaagcgatagtgatcccagatttagaatatctgatatcccagctgctgtatttggctcaagagctcatctagaggagaaagctttagctacagttatgtgttgccttcttcattctttgttttattgttgccatatgtgtagatcatcttggttgaataacttaaattgatgctttcagaggaagtggtaccgcaattttttgatgaagggcttccatcttgtggttctcatggctgctggtcctggaatttgtgatacacagtgtggtttcaagatgtttactagggctgcagccaggaagcttttttcaaatgtacgcctaaaaaggtggtgcttcgatgttgagttagtctttctgtgcaagtggtttaggatctcaatttcagaaatttctgtgaattggtctgagattccaggatccaaggtgaatcttctgagtatacctaacatgctttgggagcttgtgctcatgtctgtggggtacaggactggtatgtggagaatttctaattctgcctgagtgagcgtccatgatcaacttaactgngaagagaagtggcattttcctatctaaacagagtcacctcttacacgagaacatatgctctcatgctgggcttaagggacgatca

SEQ ID NO: 51585 - DNA, 406 bp, Glycine max
  unsure (1)..(406): unsure at all n locations
  Clone ID: PAT_MRT3847_17595C.1
cccacgcctccgaagaccaacaanaaacaaacncaacccaaaggcagccttttaaaagaaaaaaaaacccccccaacaaaccgggagagggagaagccagagacccatgacctcatcgagaaggagaagcggataacaccggaaggagaccagcaaaaagaggaactagaacgagcacccaaaccccaaaaaccaagacaacacaaacgccctcacgaacaaaaaccccgagggcaggccgagcaaccgctactacggcggcaacgaagacatcgaccagatcggatgggaggtccccccaccgacacataaaaccaaagccgcgacacccaaaagcgaggcgtcaacgtccaaccctaccccggctccccggacaaaatcgccggctacaccgccggcctcaacc

SEQ ID NO: 51586 - DNA, 589 bp, Glycine max
  unsure (1)..(589): unsure at all n locations
  Clone ID: PAT_MRT3847_17596C.1
gaagctcggaattcggctcgaggttttcccctctctctctctctctctctcttccaaccttttctctgtttcttctaaaagtctcagcacagcataacataacccttcttcatcttcttcttatgtgattgacttgtgtccaccacggtgacccatttctgtatcttctggtgaaaagctaatttgttcactctaataggtgtacagtgctaaagggtaaactttgaaacctagcttcctagttgaatcatcagaagcttataagtcgaatccatatttttctggacgtttagactttctttgatttccctgggaaatgatgatgatgcttgaagatatgggattttgtggggatttggatatgttttctgctccccttggagaaggggatattaccgcccggcaaactgagccagaggtgatagttgaggatgattatagtgatgaagaaatcgatgtagatgagctcgagaggaggatgtggagggacaaaatgcgtctcaagcgattgaaggagcaaagtaaacctaaggaaggatttgatgcagtcaagcagaggcagtcccaagaacaggcaagaagcnnnana

SEQ ID NO: 51587 - DNA, 2302 bp, Glycine max
  Clone ID: PAT_MRT3847_17597C.1
gttttcctgatattctctccctttttggtggggttcttttcagttttctcagcctttcttcaaactctttctctgcgtgatagatgtgtttctcctgatcttcagctctggattctgggcttggttgcaaaaaggtcattttttattggcttatgagggtgcaggttttcagcagataagtagcttagcttccttgttcataagccttgaaggtttttgatgctgtttttctgcactttttgaacctttttacctttgttttgcatctgggtgttgttttggaactatctcactctgttggcatgtgagttttttttacatgtgtggattttagatattggtctaatggtctctcgatctctctgaaatgatatttggtggagagattcctgttagcttgatggcttttttacttgaagatctaaagtgtaatggatgaggttgaaaaagctgttggatgattgagcattaaatggctttgcatgattttattctgtagataaggttatagtaattgaaaggaacgggagtggaactagctgagcctagaaaatgaaagaatgaagcttgaaaatgatcgtgtttgcgtgaagcaatggaagggaatttgccacagggaggtataattcaaggtgggacttcttttggtggctttgatttgccgggatcaattcgggttcagcatcaagcacaacatccccattccatgcatcaacatcaaactcatccgcgacaagggtcttctgtacattccgccgttcatgatggttttccacttacaatgggaaccatgcagaactgtgaccaaaccatttcattggctgactttagtaaaggagacagaagtaaaaactcggcgagtgaggaagacgagccgagctataccgaggatggtgttgattgtcaccatgaaacaactagagggaagaaaggatcaccttggcagcgtgtgaagtggactgataagatggtaaagcttctgataacagctgtttcttatataggtgaggatgtaactgctgatggtggtagcagcggaagaagaaagtttgcggtcttacagaagaaggctcagtggaaatctgtttccaaggtcatggctgaaaggggttatcatgtttcacctcagcaatgtgaggataaatttaatgaccttaataaaaggtataaaaagcttaatgatatgctagggaggggcacttcttgtcaggttgttgaaaatcctgtgctgttggatgtaatagattttctttctgagaaagaaaaggacgacgttcggaaaatattgagttcaaaacacttgttctatgaagagatgtgttcttatcataatggcaacaggttgcatttaccccatgatcctgcattgcaacgttcactgcagttagctctccgaaatagagatgatcatgatgatgatatgagaaggtcccatcatgatgaagatgatcaagatgtggaaattgatgatcatgatgactttgaagagaattgtgcttctcatggtgatagtagaggaatatatgggccattaggtggatctatgaagaaattgaaacaatgccaaggccaagaagatgctaatacttttggtaactctttaaattgtcaggactacaacaaaagttcatatccccatggacagatgatcccatctgatgtgaatcaaggtttacctgaaggcatgaaagcagcttggttacagaagcaatgggttgaatctcgcacacttcagttagaagaacaaaagctacaaattcaggtcgagatgctggaactagagaaacagagattcaagtggcagaggtttagtaagaaaaaggatcgggagttggagaagctgagtctagaaaatgaaagaatgaagcttgaaaatgaacggatttctttagaactgaagcgaaaggaaatgggcactggctttaaataggtcagcgctcttgcaagctttgtggcaattgcattacatgcatggtgctccatttttcttgtttttgctgtctttggtaagatgtggtttgtttagttgaaactatgggtttttttattggggaactttgcaaatctaactctcactcctgcttgtattgtttaaatttaagagtagtgcataattattaggctctactgaagttttgttgcctatgttcaaagactgggtagctgaaacaccgttaatctttttattttgtaatattaattttctaatattacatattgtctgtcctttcatttttttaaagcctgtatatattgttctggttattttttatttccatctatggttagactattgctgctc

SEQ ID NO: 51588 - DNA, 1406 bp, Glycine max
  Clone ID: PAT_MRT3847_17598C.1
atgtcaattcggcttgaggttgtgaagtccttcttacatagtatagacattctcaagccatgatttgtagacttttcaccatctacttcactttcttcttatgtttgctttttaccttcttcgttccttatgttcatagcaataaccagcttgataccaatttctatgatggatcatgccccaatttggccacgattgttagatatggtgtttggtcagccattaaaaatgacaacagaatggctgcgtccctccttcggttgcactttcacgattgcatagtaaatggttgtgatgcttctgtgcttcttgatgataccccatatttcacgggcgaaaagaatgcttctcctaatcgcaattcacttcgggggatggaagtgattgataatataaaagaacaagttgaaaggcaatgtccatcaacagtttcttgcgctgatatcttatccttagcagttagggaagctattgatctggttggaggaccttcttggcctgttgcattaggccgaagagatgcaacaaaagccaatcggatggaagctaatcaacaaattccttcaccgttcgagcctctagataacatcattgcaaagtttacttcaaagggtcttaacttgagagatgttgtagccctttcaggggcacatacaattggttatgcccgatgcttgaccttcaaaaggagactttttgattttcaaggctctggcagacctgatcctgtgcttgcctcttcacttctctcaaaattgcaaagcacgtgtccaaatggagacacttcaaacagctacattgcacctcttgattctaatactactttgaccttcgacaatgagtattatagaaatctcttatacaacaaagggcttctagaatctgacatggcactactttcggatcgaaggacttcttctatggcttatttttacagcaccgaccaatattccttctataatgattttgctgcatccatggtgaagcttagtaatgttggagtacttacaggaatacaagggcaaattagaaggaaatgtggctctgtaaactattaagtgcttgtattttcaacttcttagcaaaacctcaacaatgtaattgaggaagccaatgtaagtcacttggagcataaatgctatccttctgtatattatgtcaagtccatcatcattgtaggtgttggcgttaccccaggaatattcagattagccatgttaacttttatgtcaagatcattctgctgaaatatgaaaccttgatgacatcactatttgtaatttgaaaccttgatgtcaaagctcaaaaaataatctttgtatccatgtgttgctaagtttgtacactaaacagatgaaaatttgtaataaattaatgtactttgcctattttgtagactactaaaa

SEQ ID NO: 51589 - DNA, 168 bp, Glycine max
  Clone ID: PAT_MRT3847_17599C.1
tacccattttttctgtctgttagacgacagaggggtacggttgcgataatacacataagggttcggcttgcgagaagactacagaagggtacggcttgggaaaaaactacagaagggttcggctgcgattagattactcaaggggggatggatgtttcctttcttaaa

SEQ ID NO: 51590 - DNA, 451 bp, Glycine max
  Clone ID: PAT_MRT3847_1759C.1
gactccgccgggcactcagcacagcctccagcatgcagcgcctccccgctgccacccgggccaccctgatcctcagcctggcctttgcctccctccactcggcttgctcggcagcaagcagcagcaacagctcaaccttgaccgctcaccacccagaccctgggaccctggagcagtgcctcaacgtggacttctgcccacaagcagaccggtgctgccgcacaggagtggacgagtacggctggatcgcggcagctgttggctggagcctctggttcctcaccctcatcctgctctgtgtggacaaactgatgaagctgactccagatgagcccaaggacttgcaagcgtgagacccaggctcggtgcacaaaatggtgatcgccaccaatttgtggctaatggggaaggggagtaaggctaacatggtttctattatttaagtcatttt

SEQ ID NO: 51591 - DNA, 196 bp, Glycine max
  Clone ID: PAT_MRT3847_175C.1
aaggaaagcctcgaaaagggaaaacaacattgttcagggcccttccttgattaagtattattcctcaggactttttttattaaaaattaagggccacctaaaaggttggtttgggagctttatcattattccagggattaggcagcttaaaagtcctagtccctttgttgctttccaggaggtcacttcattggtc

SEQ ID NO: 51592 - DNA, 292 bp, Glycine max
  Clone ID: PAT_MRT3847_17600C.1
ctcgagctgtgctctgcaccatcttctacctcctcggcctctggcaccacgcgccgtcctccttcccggccgccgaattcacaaccataacaacgggcaacccaatttgcctaaattcaagcccgacactcaacttttccgccaccaacttcccccccaaccccgacgcgtggcgtgacttcaaccccccgccctgcgccgcctccttttcggagtacaccccctgcgaggacgtgcaacgctccctgaagttcccgcgcgagaacctcatctaccgggagcggcactgccc

SEQ ID NO: 51593 - DNA, 1271 bp, Glycine max
  Clone ID: PAT_MRT3847_17601C.1
ccatcctcgggccgtacggcggcgaggacgacagaaggggactcctcatttccattttcaattttaatttcctctcaaaccctaaccctaaccctaaccctccccgtcacaaaagaaaaccctctttgtccgatcatcgtcgtcaagatcttggatcctcgcgtcgtcacaaaaagtcttcttctccgatcgttacgatgttggaactccgtctcgtgcaaggttcccttctgaagaaggttctggaatcgatcaaggagctcgtaaacgacgcgaacttcgactgctcctccaccgggttctccctccaggccatggattccagccacgtcgccctcgttgcgctcctcctccggtccgagggctttgagcactaccgctgcgaccgcaatacctccatgggcatgaacctcaacaacatggccaagatgctcaagtgcgccggcaatgacgacatcataaccatcaaggccgacgacggcagcgacaccgtcactttcatgttcgaaagccctacacaagataagatttctgattttgaaatgaagctgatggacattgatagtgagcaccttgggattccagaggcagagtatcatgccattgttaagatgccatcctctgagtttgctaggatctgcaaggatctcagtagtattggtgacactgttgtcatttcaattactaaggagggtgttaagttttccaccaaaggagacattggaactgccaatatagtttgcaggcagaatacttctgtggacaagcctgaagaagctactgtcattgagatgaatgagcctgtgtccttgacatttgctttgcgatatatgaactcttttacaaaggcaacgccattgtccaacacagttaccattagtctgtcaaatgagttgccagttgtagtcgagtacaagattgctgagatgggttatgtgcggttctatttggctcccaagatagaagaggatgaagaagatacgaaacctcaagtttaatctacctattagatgttgggttaggatattaggattttaatgccttttgaacttgtttttgttatacatctttgaagatattttaaccttgtgagcaacgaattggcattttgtggatttcttatgtgtattggtttcctaccaccttattttcccctgatttgattgtttattgtttagaacaatgcgaaacaattggtgtgtatttttcatgtatgcgtttttcaaaaaaaaaaaaaaaaaaaaaaaaaaaaaaaaaaaagaggaaaaaaa

SEQ ID NO: 51594 - DNA, 2161 bp, Glycine max
  Clone ID: PAT_MRT3847_17602C.1
aattcggcactcgtccatctcattctttagttacatttctgaggaacctatggctgctgcatcatttggtcaggtttactttgcccgtactactgatggtaataatgttgctgttaaagttcagcgtcctaatttgcatcatgtggtggtgcgggatatctacatccttcgtcttgggttggggctgctgcaaaagattgccaagagaaagagtgaccctcgcctgtatgctgatgaactagggaaaggttttgttggtgaattggattacactttagaggctgcaaatgcttcaaagtttctggaagttcactcttcctttactttcatgaatgtgccaaaagtatttccacatttaactcgaaagagagttctgaccatggagtggatggttggtgaaagtccaacagatttgctctctgtgactgctggaaactctgttggaaatgtctctggatattcagaaaggcagaaattagatgcaaaaaggcgtctacttgatctggtcagcaaaggcgttgaatcaacattggtccagcttcttgaaacaggcttattacatgctgatccacatcctggtaacttgcgttacacttcctcaggacaaatagggtttctggattttggtttgctctgtcaaatggaaaaaaggcatcagtttgctatgctggcttcaataattcatatagtaaatggtgactgggcatcccttgtccgtgctctggttgatatggatgttgtgaggccagggacaaatatccgacttgttaccctggaactcgaacaagccttgggagaagtagaatttaaagaaggaattcctgatgtgaagtttagcagggttctgggaaagatttggactgtagcactcaagcatcatttccgcatgccaccatattatacacttgtcttgcgatccctagcttcattggaaggtttggctattgctgcagatacaaatttcaagacttttgaagctgcatatccttatgttgttcggaaacttctcacagagaactcagctgcaacaaggaatatattgcattcggtgcttctaaaccaaaggaaggagttccagtggcaaagactttccctgttcttgagggtaggggcaactaggaaagccttgcgactagtagcatcaaatagtgagacttcccttgatcattcaacaaataaggccactgatacaattgatgttgcatatttggttttgaggcttttaccatccaaagatggtgttgctatcagaagacttctcatgactgctgatggagcttcattaatcaaagcaatggtctcgaaggagggaaagtttttccgccaacaactctgcaagatcatagttgacttactgtaccaatggatgattaaattatttggaccaagaattacagttactcagtattcccgggtggtattggctaatggacctagcaacaaagaatcaggtctatcccctagatcatctttgcctacatatgattacaattccatctttagagaccggcgacttcgagtgatattctctaaggttctaaagtctgcaagtagggataaaatattgatgctgcggttctcctgggcttcccttctaataattattacagcttcaactttggcttgccaccagcttgttgtgtctctatctgaagcttacttgggcaaaatatttgatgctcccaagagatatgcagtcagtgtatgaaattttctcaaaacattcacttttctcagcagaaagagagcattcttatccaacgacaattttccaaaaggaaaaagaaaaagaaaggtttatttctatggatgacagagtgaaagttcgttgtttactgctaacaaaagcatttgtgtttgtagcttaagttgggtgtgttagatttggagcaaatctggtgtcaggcaggtgaaatataggcataggattgcaacgtgttttggttacagtttatgtatggggaaacactgtacgcggtactgatgctgctatcaacatctaaataccctacaagtatgtacagtgtcatgtaaagtgttaaattttcttcaaagaataaaaatgtcttttggttactaatctgtaaacttctttgttccagtcctcagtacatagttactgtactgtcacttgttagttattttttgttatttccaaaaa

SEQ ID NO: 51595 - DNA, 352 bp, Glycine max
  Clone ID: PAT_MRT3847_17603C.1
aaagaaagaaggttgtcactgatctgactcgtgataattttcagagtggtgagtggaaggaacttgagttcaaggagtacaattatagtgctaaaggtcaacctcttgagggtggcagtcttcatccattgctgaaggtacgtgctcagctgaaacagattttcctctgcatgggatttgaggagatgccaacatataattttgttgagagcagcttctggaactttgatgccttgttccagccccaacaacacccagcccgtgattcacatgatacattctttttggaaactccttcaacaacaaagattctgccagaagattattgttcatagagtgaggcaagttcatg

SEQ ID NO: 51596 - DNA, 122 bp, Glycine max
  Clone ID: PAT_MRT3847_17604C.1
ggcatcaatattgggctttgcgctatatcacaagcggtatcggtacagtgcaagctggttggttgcctaactgtgcgcacggcttgctatggtgtcttgaagtttggtatggaaaatcgtgc

SEQ ID NO: 51597 - DNA, 394 bp, Glycine max
  Clone ID: PAT_MRT3847_17605C.1
ggaacgacagaaacttgagacttaccatccccctggttatacagaattgtttggatcaactaaatgcttcatcgcgcttcgaaaataatgtcaagaaaattgtcttgagaagggaaattttacactgatttagctaatttttgaagccatttcagcagacagcaagtgaaatttggctgacaacaactaaaatttgcctgaccggtgaaaattgtaactgcttctataactggatcggatcaggatttaaaatactggaaattactatttacatcattttagcaaatgagattcattagaaaacttcttatatataggcttgagtcttcttgaatccatttcattcagcatgcttatatgaatttcgctagtgtataattgtattctactagtg

SEQ ID NO: 51598 - DNA, 481 bp, Glycine max
  Clone ID: PAT_MRT3847_17606C.1
ctcgagccgggaagatggagctttaaggagcatggctagtgctctgagtaggaccgtaaccgcctccgtgcgtggcatatggtccctgcatgctgttcactctgtatagtacttagtattcgctgaggctaagaggcctcaagtgcctgggcttctgcccttggactcctggatatccagcctagtgctaattgaatgctaagcagtggtaattcaaaatgagagggtcccctgcctctagagtcatcatctaattggggacaggcagacctagataagaaaagcagagaactactttggaaaacagtttatctgctgtaattgaacattcagctaccctataacccagttaatccaatactggggataaatcctagagaaactcatacatgtacaccaggagatgtgtacaagaatattcatagcaaccctattcacaaaagcaaaagcctagaaataacccagatgcccatgagcaaga

SEQ ID NO: 51599 - DNA, 465 bp, Glycine max
  unsure (1)..(465): unsure at all n locations
  Clone ID: PAT_MRT3847_17607C.1
tttaaatcaagctcaattaacaacttaatattgatccatatgtctacaaaacatgattcaagtatgatcatatttgcacaccaaaagaggagtaagaattttccacatttctcatagcataatcatcaaattacaaaacaaattcaaggaacattataaattcaagttcattcagttttgatggtctttgtgagcttcctagatgatagctgagcagatgcgatttcttgtgacatgaattcatcaagttgtaattcattagacaatctctttgctggctactaaatccggatcatgatccactattgtaggcaaacactgctggaaatacaataatcttgagttcacgggctaatcgagaccggagagagggaggtgattagtagaagcaacacacanaaatggggagcataagcacaagcagcatcagagctcccccaacccgaagaacaacagtcactcctt

SEQ ID NO: 51600 - DNA, 200 bp, Glycine max
  Clone ID: PAT_MRT3847_17608C.1
cccacgcgtacgaccacacattccttcactatacactacgggctgactcattccttatggggcaacttgtgaacatggatggccactactgtgatcattgctgacactagctctgtacctactaaagctcatgaccttgtcttatatcagtatcacaggtacccaccctgaccttaaccaccggccgcctacacgccaat

SEQ ID NO: 51601 - DNA, 458 bp, Glycine max
  Clone ID: PAT_MRT3847_17609C.1
ctcttttaaagttctggcccgaaccctttctttcgtcacaatcacaactcggtaaacgttctccgtgcaagagagatgaagctccacaggggaaagagtgctctgctttcccttgtccttagctcttctttcttggaaatctcaatggctggttctcgtaagccctctctccctccctccctcgatgatcactgcatgcaaatacagatactgcttgatttaatttgttatatgctactaatgaagggatgaaattaattaatgtgtacattgcgtgatgtgtggtggatttagctttctgtgactcaaagagcgcgcagaggtgtgccaaagctggggttcaggacagatgcttgaagttttgcgggatctgctgcgagaagtgcaactgtgtcccatctgggacttacggtaacaaggaccagtgccctttgctacatggaccatgataactccca

SEQ ID NO: 51602 - DNA, 550 bp, Glycine max
  Clone ID: PAT_MRT3847_1760C.1
tttaagtttttaggaagaatgttctggccttttacgttgtatctgttaagggattgttgtagcaattttctttggattatgcaatgctctttttctaaacatggattatcctattctttagagctgattgcttgaataaagtaaaagcataatgggttctaacttcagtaatttctctattacttggctggattactcatgattgcttacgtactcatggtggttgctataatgatcatttttaatatgaataacacttgcatgaatttaagctgtttgtgaggtgctgtatatactttgaccatctatcctaaactactttcctctttctctctctcactctctaatgattgtgtgttgtttcctctcattatttgtcttttaaggtaactaaaagagttagaatgtagttgtgaatcaatttaagtatttagtgaagatactaaaaattgagggtattaattgaaaaataattaatgttttcttggttatctaaaatgacatattatgatacaactaaaatactcaaaatagcattgacatgtaatac

SEQ ID NO: 51603 - DNA, 1288 bp, Glycine max
  Clone ID: PAT_MRT3847_17610C.1
cggaattcccgaactttcaaacgtgaaaccgcatccctcattttctctcattcacccaatggctgctacggcttctgtttcctcttctatctgcaacagaatatacaacctttccttcacacacccttccctttcactcaccagcagcaacttccctcaaagacccgtatctcaaaaaccactcagtctcaacctcgagtcccaaagtttcgctctttcctttctcccacttcaccgtcttcccccacctttcgctgcctttgatgggttggaagtagctcaagataccacagagtcccaacaagacgaaccagaaccagaaaccgttgaaaaaacagaacaagaggaagagcaaaaggtttcagactccaatgatgctgggaggctctatgttggaaacttgccatattcaatcactaattccgaattggccgagctctttggagaagctggcaccgtggcgtctgttgagattgtgtatgatcgtgtcacggatagaagcaggggatttgcatttgttacaatggggaagtgttgaggatgctaaagaggcaattcgaatgtttgatggctctcaagttggtggtaggactgttaaggtaaacttcccagaggtacctaaaggaggggaaaggttggtaatggggtcaaaaatactgaacagctacagaggctttgtagacagccctcacaagatctatgctaggcaacctaggctggggatgctgagcagcagggtcttagggaagcttttgctgagcagccaggcgtattgagtgccaaggtcatctatgagagggacagtggaagatctcgaggttttgggtttgtttcttttgaaactgccgaatctgcacgggctgctttggacatcatgaatggtgtggaggtacaaggtcggcccttgcggttgaatttggctgaagcaaggacaccttcatctcctccagtaattcagaaaaatgtaggaagcaatgttgaaagttcggaattggtgtctagtgccagcacataaggaaatatgatctatcaaaattttgcccgcaaaatgcatgtcattcagcttcttcctgaaaggttttctcttggcaaatttcctgtcaattgctagtcacattggtatacactaactagaccttcaggcagttgagaaatatacttgttattgaacaaatattgaacatatctataaggggtcgatgttagttacagtttgtaattatgaaagtctagctttcacagtttggtgaactaataattcattcaagtgataattcttttaagtcct

SEQ ID NO: 51604 - DNA, 623 bp, Glycine max
  Clone ID: PAT_MRT3847_17611C.1
ctttgtttttttttttttttttttttttttttttttttttttttttttttttttaaggcaactttaaagatatatttatttttccaagttctaacaattcaacagaaaaaaaatgggagcaacacaaagaaaattaaataaaaaaggggtgtacaggatatatatagggagatctttgcaaaatggccatcatcttaaattgccttttctttctaccatgggtttctaccatttatgtactggtgatgggcatgtaactgttggcttttgggtctctcaaaaagtttaaaggggcaaaaaaatttgctcaaagcagcaacttccaactctcaaccattttaaagataatttctttgcaaaggtgaaattatccacaaaatgacacaaatatctgcaaagctatttaatgtgtcaggtgcaccaacaaaggagggagaggggtttgtgggcactggcactgaaccaaaaacgttggcaccgtttgagtttgttgtgttcaaaactgatgtactagtgctaggggatggatattggcatgccccagtgcttgggttagtgctaatgatgacagcagttccaccaaaattgcagctatttggaacaggattcttttgaaatactta

SEQ ID NO: 51605 - DNA, 1284 bp, Glycine max
  Clone ID: PAT_MRT3847_17612C.1
tcctctagagcggccgcttttttttttttttttttttttttttttttcccaaaacaatacattcatgctcatttaaatattctctttgagttgacaaatgcttccatatatagttgcatccacatttggcttttgccaatgagaaaacaatcagggttgtccaagaagtgaaggcttgtagaaaacatggctttgtgcaatctcaattcgttcacgaggatcattcagattttcatccctaagagcttggagaatagcttctgatgactgttcccttgatatcaaaattttatacagtgtcttcaggatggggcagagttcaacaggagcaaccggtttgttttcttcaggatgcaacacattcaggcttgaatggctcaaaagttcaaagaatgcctccactgcagacacaccctgaatcattcctttgccactaatactgtcacccatgtctgggcttaattgacccttagctaacatctgaccataccatgcgttacgaccttttagtaaagtcacataagtgtcagctaatagtggccctgcaagtttctcaggttcttcagccaacaaatgagtgataaatatcatttctgatgtgcagtgtgcaaagtacacagatttgcttgtagcactctcattggtaagggcagctaccattccagctcctattgcatagacatttttcaagccacccatgacctcatgcgtgacgaggtcactgttatcccagacaataaagtgtggttgtcgtaaaaacttcgccagaggtttccgccatttctcagctccacagattcttgcattggcatactccttgttgtagatttctgaggcaatatttggaccaccaagatagagtatgttctccataggcactctagctatcaagtttgcaatccccttctgctttcttctccagccctcggacgcggcgctcccgaggctgcaccaacagtctaagccggcgaactgcagatggcgaagcgcaggcataacacacaagtggtcgaatgaatcactcagcaaagcgggaaaaacactggcccaagcaccagcaccagcacccactattctccaaggatcactgtgagccttgccccgaaggcgccgaagagcgtcgagcagcaccgctgcacaaacgcagccccgagcagcagcaccagcgcacacaatactcacagggcccccgacgccccccccaatgcgccaccccagccaagcaagcttcccctgcaccccatgccactatcgcacagccccactgccgtttctcgcagccgt

SEQ ID NO: 51606 - DNA, 502 bp, Glycine max
  Clone ID: PAT_MRT3847_17613C.1
ccggagattcgccgcgatccactccacgcatttcggaattatatagcaagcctgaagctactgcaatgcatgtgggagctatagaaattatcatcgatagttccacaagtcctgactgcaacattactggtgcaaggcctatggctgatacttatgataccaattctgtaaacgcaccacatactatttgagtcgcgcctttcacaggcgtaaggcccattcctgtgcgactcatctacgaataccatggcgcagattgaaccaaacacgaattcagggttttagtcttttgagtaccactaccaatggtgattctggtcaaagaaaagatctcgcgcatggataaatgctatgtagcatgtactgctggtggctagacatcaagttacactccaactccaacgttggaatctggactgcaaaaagacagcgggctaagtggggaatattttggaacgatggctcactttgctcataacgtgcatcagccccaagagaaaga

SEQ ID NO: 51607 - DNA, 353 bp, Glycine max
  Clone ID: PAT_MRT3847_17615C.1
acggctcgagaattcgggcaaactctgacaagcatagcactatagcattcacacttgtcgggctcctcttctatgggcattaatcccgggggcacaccgtcgtgaatgctaacttgtatgcataacagcaaagcagatgcaatgaatccaatccctacagcctgaggacaatcttaaggttctaataccaatcaaatcaatagctgatcatattcacttgcagtgagctgaggaccatcactatgtatacgtagaaatggaaagggccttcatctgaaggaacatggacaggtatgaaaaagagaacctgctgctgtatattactggtaaagtatgccgactcaattgacatt

SEQ ID NO: 51608 - DNA, 217 bp, Glycine max
  Clone ID: PAT_MRT3847_17616C.1
ttgctgctcacgtttccaagcaaccgagctctcaacattgtcacaggggtgaggatataatgggtgccggaaagagtcaccgcttctgtgaagtcatcgtgcgaggtctctgtgtgttcaatgtacaactgcttttctgttcggcgagcctgaatgtagagccaggcgcctgcgtgaggagtttgctatgcagggtcatcatatgtacaatacgtca

SEQ ID NO: 51609 - DNA, 544 bp, Glycine max
  unsure (1)..(544): unsure at all n locations
  Clone ID: PAT_MRT3847_17617C.1
aaaaaaaaacaattttatattttnaaaacaagagaacaaaactcatttttaaacatatacaacatcccactgccacagtaaccgaactcacctagtgtgaagtaatacaatattgttaaattacaacagactgaaccacgagaaggagaaatattaaataactcaatggatcgttttccaatttcctacaatggattgccatcataattcaatgatgtagaatcgaaacaacagaagacttgaataaatggatagcacctttttgtacaaataaattattcaaatagtctcacaacaaagttgggtatttagcatctagaaaatctctaagagtcctagcagctttatgaccacccattaattccgctaacttctctacaggaagaagtgcaagttctgccaagctcttacagccatccattatggccctgtagtttgagtctgtaacacctggacatcgtcttagaaactccacagcggatgtattgtaattttcagccctcacatgattttccacaattccttgtttcgaagggacacccac

SEQ ID NO: 51610 - DNA, 407 bp, Glycine max
  unsure (1)..(407): unsure at all n locations
  Clone ID: PAT_MRT3847_17618C.1
gagtgcttccttcttgaagacgagtgtcattcatcacttcagtgatccatgcatagaatatgaaaataaattcttccaactcatgggataaaggggactcccttgaagaatttcatgtttttgggctgtatagctctttacagaaaatgcacctttataaatcacatgaatgttagtattctggaaatgtcttttgttaatataatcttcccatgttatttaacaaattgtttttgcacatatctgattatattgaaagcagttttttgcattcgagttttaaacactgttataaaatgtagccaaagctcacctttgaacagatcccggtgacattctatttccaggaaaatccggaacctgattntagttctgtgattttacactttttacatgtgagattggac

SEQ ID NO: 51611 - DNA, 736 bp, Glycine max
  Clone ID: PAT_MRT3847_17619C.1
attatcctataatatttttcttcctattatttccccccttatcttctctctttgtaaaactcattaaaattttgtatcttttctcatattcatttaataattgttaacggaaacacagaaacgtctatatattcacattggtattaatttttcaattaggttcgtaaatttgtatttttttaattaaatttctgtcgttaattttcttaacaaagttaacaataagacctaattaaaaaataaattcaaatacaggaacttaattgaaaaaaaaaatctaattaagaattatcaaataatttaagaacttgtaaattaatttaaacctttactttttaatacaagtcttccctatatttaggcttttaaaaaaagaccacctgcatcgaatcaattcgtctacgatttttctgaagcgaatgggtaaagtaaccccatcaaatctattgccaattcacatgcaaaatgagatacaatgatctcttaccaatttttttcttctttttaagtgatttagttgaattgttactaagaataaacattttgaaccgaaaagttaggtatcacaaataattccgaggagactccttttagacctaaaatccaaaataattccactacaccaccctataacactattttgattccccaccctaggtgatagtgccctttcgaagtcccctccctagtatgtgatgggttcctttattatttacttttggctagatgaggaaaa

SEQ ID NO: 51612 - DNA, 306 bp, Glycine max
  Clone ID: PAT_MRT3847_1761C.1
gatcgagttcgtttgtgcagtcagcaattacttcgttttatgagcgtcacgaccgccctagtatactccgtttctaaaaaacctgtacccgcgaaaacacgaaattcacaggccaagctcatgactgagacaacagagatgggcgtcacgaaagaagaagttgaatcatcatgaaggacacactcaatccatcccaacttcatctggatgatacatctgatacggtaagagcacgttttgtgaaggcgattataccacaacggattacaggcaagatgacacattagaatcatcgacctagtgaac

SEQ ID NO: 51613 - DNA, 1150 bp, Glycine max
  Clone ID: PAT_MRT3847_17620C.1
acaaagttgggtatttagcatctagaaaatctctttatcacaatttcgctaggtacgcgtagcagtgtccaatggattgccatcataatccaatgatgtagaatcgaaataacagaagacttcaataaattgatagtacctttttgtacaaatgaattattctaatactcacaacaaagttgggtatttagcatctagaaaatctcttagagtccgagctgctttatgaccacccattaattccgctagcttctctacaggacgaagtgcaagttctgccaagctcttacacccccatccattatggccctgtagtttgagtctgtaacacctggaagtcgtcttagaaactccacagccgatgtattgtaattttcagccctcacatcattttccacaatcccttcttccgaggggacacccactctgatatcctcactgacatcactagctctctggaatgatatgccctcgtcccgtgatttcccgttcacgaggtcagggctaatatgtaccattgtctccacctggtggtatagacgacctgatgtgaagctcataaagagatcttgaaactttttctttccacacaaattaatggtgatagaatatagtcaccaacttctagggtcactggaatgatctgcatttctttcatctggctcgtcttgatttctcccacctgccttcagtgaagcaaatatttcagcagtagcaagcaaacttcgagaccagattattcttagtcggggaaagtgtagagcaagcaaagacaactttgatataatgctatttggtgtcacatcatcaccaatatcactagcagactggaatgaaaagctcttatcctgtgaaaactcgatcaagagtacaggtattctgtaatatcgtaccattgtctccacctggtggtatagacgacctgatgtgaagctcataaagagatcttgaatactttttctttccacacaaattaatggtgatagaatatagtcaccaacttctagggtcactggaatgatgttcattcccttttgatgaagaacatttggaaggctgctcatgaactcccgcatgtccacaataacctgcatttctttctcagcttcctttctcccacctgcttttctggttacgaagttttgaggag

SEQ ID NO: 51614 - DNA, 421 bp, Glycine max
  Clone ID: PAT_MRT3847_17621C.1
ttgtgatagccccttgggcaagcaaattcaacatgcatctaaaaaagaatcctgcctgacagctacctaggccaaagactttgctgaatttctagtggtggcagagcttcacaaagggcatgaactcggtgaatttgaagggcgtgacagagcaaatgctgcacgcaatgcagccccaatgggaagcacatcttaggcaatgaaaaagtaaggactatgcgctggttgtatgagtccactcttctcaaaccgtgtgccgcgcatgaaccaatgacccgcgctccctttccgtggactaagcggcatcaacactccctgtgaaaagcggtgcgcgcatgatgctatccgacctaacagaattgcaagagcctcaccaggctagttggtagattctcacatcactggtggttctagggatggc

SEQ ID NO: 51615 - DNA, 340 bp, Glycine max
  Clone ID: PAT_MRT3847_17622C.1
ctcagaaaataggaagtttttattcatgtactgctaggttaattggcatagatatttatacttgtggtcctagcaatataaggaatattgcttactggggaatctacgaacgtttgggttgtatcccagtacctgcctaacctaaagcgggaaataacacagggtaactgcccatgtgaccattcaaatgtattgcttgaaggtatacggtctgtttactgccctatggggtgttacttgtcatagcaccgatattgacctgatctcttgcttgtgcattgaggtctttgagctggtgatggctagtgatgaatcattgcacggaccatggggaagcgca

SEQ ID NO: 51616 - DNA, 223 bp, Glycine max
  Clone ID: PAT_MRT3847_17623C.1
gaccacacaagatctaccaaacatagtccaaatccacacagcaacatactgctacgatgctggcgttgtccccaccggagcccggatcaaaccaacaaatgatgaagccggcgtcatagcgccctctatttaccatatcgggatatgtccatcaactgtctacggcctcacctcactctccggcctgacggtctgtggcattctgcttctgatgtcggcattg

SEQ ID NO: 51617 - DNA, 525 bp, Glycine max
  Clone ID: PAT_MRT3847_17624C.1
aaaaagaaaaacccggggggggcaaaccctaaattaattaaaaataacagccccaaggacccggaaaaaaaaaatttcttaaaaaaccctaacaaaaaagaaaaaggaagggggattttctaaaaaacaaaaacaaactaaggcccttggcccttaaaaaaagtaaaagaaaaaatttttaaaaaaagtaaagggcaaagggggatttaaactaaccaaaaaacccaaatcaatttaacctaacttaaaaagggggtaacccaaaaaattacccaaccgggatttaggtttggaaaaagaaaaaaaaaatggcaaacggaggttcaaaaggctttttagcaaaagcaaacattttaaaaaaatggggttaaacaagggaaaggcttaattaacggccaaccccggggagcccccaaaaaaaaaccacccggaccggctggggtaaaagcaccggacacccaaagggctcctttgaaaaaaaagcggctattaacaaaaaagttggaagccgttgaaaccaatttt

SEQ ID NO: 51618 - DNA, 1501 bp, Glycine max
  Clone ID: PAT_MRT3847_17625C.1
acatgaaaagtcaagtaatgaaccggttaatatgttcatttttcaatccaacctagtatatgttcacttacccgaacaagaacaagttcaatggacagttttccccacttttagatattttatattacaaatttgtggccaatcctcgccggttggctccacacaccttggctgtaacaaggcgcagtccaaaatatgcaaggtttttagagaattaagagcttcactcgttttgggcagcgactccaatttgttgcatccagaaatcttcaggctccgaagtgaggcgaccttgtctatgcaaatagaagttaacttatcacagttgcgaagggtgagttcttgcagtgaggtgagtttgcctatcgaaatggaaggtaatagatgacacttctcaagggtgagttgttggagagtggtaacgccgtcaccaaatgaaagggaactgagatgtttaatatcccttaacgtgagacaagacagacttttcagaccctcccatgctttgctttccccgtcaagactactcatgtcacagttctcaatcgtaagacgctggagtgagctcaggtgctggaaaacaccggacaggttttctaaatcacggcaatattgaatgtgaagatccttaaggggaatggacgtagtattcagccgcagcagttttaaggtgcaattgtggaggtgtagttttgaaatcttctcaaataacggcccagcttctgtctccgttccccgccaactttcgagtttacggcaattcttgattgtcatctcctccagggatttatagaaattttccccgtcgatacacttttctgtaatgtattccagattttccaaattttcaagttcgagaatcttgagttttgggggaagttgattatcctgctctgagagatattttaatttgcatccgtgaggcttctggaagtcctgcaagcttaacttaacaagttttgttaaggaattgagccaaccaggaaggctggaacctggaaaacccacaaggattagtgatcccagattagaatggggtttaagagactccagtagttgtgaaagatggcccccctctttgtcacctttgggagtccaacttagtgtcaggcgctgaaggtgttcttttgccaacaataactttctttccccatttgtagaggaggaacatcgcacccctgtccagatgcaagatttccaagtttcctctcaaatcgttgagctttgcgagttccccaaggccacccatggtttccttcttgctagccacaaaagtggacaatgtctttagagaactcagcttgctcatttcacaaggcatgcgggtgagatcgaaacagctaaacagtttcaaagtatgcaacttggaaagcttggcgatggaactagggagcttcttcattttattctgggacaggtccagatactctaattccttcaggtccccaatagagctcggcacaacctcgatccccaaattacggagatccaacacccgcag

SEQ ID NO: 51619 - DNA, 342 bp, Glycine max
  Clone ID: PAT_MRT3847_17626C.1
tgtagaaaaggcaaggaaaagcctctaagagaggaaccagccaaaagcatcttgttggggtccaggggagcctgaaagcaaagaagacctgcaccattgggcctagcaatggactacaagagtgaacttgacatcacattttcacccaaaaccttagggaattgggtatattggtctgttcccttatgttaccttcatctagcccattcttaactaatgtggaacttcaaacaaacttgaattagcaacacatgtttagttccacagcctttccttgctgacgctgatagctatctcctgtgctagctaagatagatcaataactagaacattccaaatata

SEQ ID NO: 51620 - DNA, 613 bp, Glycine max
  Clone ID: PAT_MRT3847_17627C.1
tgctcgtggagtctatggtataaaattcaacgtagagatgaatttctggttgggactggaatcaaatttgtataatgatggatgtaaatttcatattacctgttctcaaaggacattgttcgtttttagtaaatggcaatgttatgatttaaaaaaaaaaaaaaaaaaaaaaaaaaaaaaaaagggggaaaaaattttttttttttaaaaaaaaaaaaaaaaaaaaaaaaaaaaaaaaaaaaaaaaaaaaaaaaaggggcggccggttttaaaggacccaagtttacttccccgtgcttgcaacgtaatattttttttttagggccccctaatttaaattaactgcccgtggtttaacaacgtcgggactggaaaaaccctggggttcccaaatttaatccctttgaaaaaaatccccttttccccagttgggttattaccaaaaaggccccccccaatcgcctttccaaaaatttgcccaccctaattggcaaatggaaccccccctgtaccggccctttaaccccgggggttgtgggggttacccccagggtgaccgttacatttgcaagccccttagcccccgttcttttggtttttttcctttcttttt

SEQ ID NO: 51621 - DNA, 630 bp, Glycine max
  Clone ID: PAT_MRT3847_17628C.1
ctgcaccaaccaaccaactgctttgggtgcttctgttctcaaggaaactgttccacactctccaaaaccattacatgagaataagccccagatttctgctccagctgcaaaggcgcaagttgtgggatggccaccaatccgttcattcaggaagaactcaatggcttctcagcctcagaagaatgatgctgctgctgatgcagaagccaagtctggatgcctttatgttaaagtcagcatggaaggcgccccatatttgaggaaagtggatctgaatagttttaccacttacaaggacctctctttggcacttgaaaagatgtttagttgttttacactcaaatatgttcttacctatgaagacaaggatggagattggatgctagttggtgatgttccgtgggagatgttcactgagtcttgcaagaggctgaggataatgaagagttctgaagcaattgggctagcacctagagccatggaaaagtgcaaaagtcgctactagctagtgcaatgctgtatgcttttgtcttctaatcctgaaagatggaagaccacatttaagcatataatacctgagtatttcttacgtataattctatatacgagattgggtgtcataaacctttt

SEQ ID NO: 51622 - DNA, 275 bp, Glycine max
  Clone ID: PAT_MRT3847_17629C.1
gatctattcaacgccatccaccgcacctccataagaaaatcaatgcacccccacatgccaattctttgcgcaacacgtccagccaagcaggttctgtttttggcgcgtgacggcacgttggaaatctgtttaggctgtgcttctggcgacaagcccttctttgcgatgaacagtaccccacacggctactttgcccttgtttggcaaacttccagatgcctttttgtcggagcttacctttgaccattgtcacccatcgtcgatgtccgtcatgt

SEQ ID NO: 51623 - DNA, 260 bp, Glycine max
  unsure (1)..(260): unsure at all n locations
  Clone ID: PAT_MRT3847_1762C.1
ccttactggcttggagcaccggctaaagccttgntggcatcagcgccgntntgcctgctcctagcagggaggagnaggggggccgctgaagagctcgaaactctgccacctncttaccctcaccctcactctgccacacaagcacctacttaacccaccagcaagcgctccacacacacagcaccaccaccaggaccaccctccaccaccagcaccagcacccagacaaacacccccgaatacaaccaccacaaaaaccc

SEQ ID NO: 51624 - DNA, 1192 bp, Glycine max
  Clone ID: PAT_MRT3847_17630C.1
attcaggtcaatgtggctcttatggggtttctagtcgagaaaatttaagtgaaagtagattgatggatctccttcatggttcagaatatgttcttacctatgaagacaaggacggagattggatgctagttggtgatgttccgtgggagatgttcactgagtcttgcaagaggctgaggataatgaagagttttgaagcaattgggctaggtaggtccaacgttcgttttaattaatctgttatactctgctttccttcgtttatatagttgtagaattgagaaaacaggaaactcatcaatcaaactggaaaacagaatcctggtttggtaaacacaattgtactccatagttaatgctttgactttagtttcatgtttctttaattttattagttagttatttataatgtttttttagggcgagttatatataacattaaattgatatattgtcttaaaaaaaatagattaatatggtcttgttgcatatattattggtcttgatgatgatgtttggttcagatccaaataaatatctccatgataatttgaagttgggaaaggggtaaagataaaacggtctccatttacacccttgtccagaattgctaccatagaatttggtctctatatttcttgttttttttttttcttttttgaaagctttattatgacactcatctaaatttgtgatcattgcagcacctagagccatggaaaagtgcaaaagtcgctactagctagtgccaatgctgtatgcttttgtcttctaatcctgaaagatggaagaccacatttaagcatataatacctgagtatttcttacgtataattctatatacgagattggggtgtcataaactttttagtgggcaatatatattgatgacagcatattaggtttgttgtagtagccgtctatatcattgatgtagacgtttaaggtttaaggttttaggttttaggttgttctcccacacttcaattactgccatcatggcttaccgtagtttgtaaattttgcatttctgtaagcgagcattttgtttgtcatggcaagccaagaaaagaaatatcatactttctttatgtgtccactcttacatgtaaagttaaatatttatctgtgagcgagcattttgtttgtcatggcaagctaagaaaagaaatatcatactttctttatgttc

SEQ ID NO: 51625 - DNA, 1286 bp, Glycine max
  Clone ID: PAT_MRT3847_17631C.1
ggctcgagaaaccattacattctacaaaaaaccaccttaagacttcacaaccacaacaattccgggaacaaagaacatggtagtatcaaaatgtctaagtctaacactccatgttcctactcaccccagtactccttttctcaccccaccctccaaaaaaactccaaccttgtcttactcttccacccatttttccttccaaacaaaactgaacaaagcctttcccacctcatacaaccattccttaaccaaacactttccaatgaaatgttccaattcttccagctacacatcaccaccagattttgagcttgagtctgatgatccaacactcaccaatgaagacctcaagccaacaacaccaagtcaaaggacatttgcaggcttcgaaatagcaagtttatgggttggattagttgttggcgtcccttcttattaccttgctggaagcctcgttgaccttggcatggcatggtggcagggcatagcaactgtggtggcagcaaacatgatcctcttggttcctttggttctcactggccatgcaggaacacgttatggcatatcattcccagtacttgttagatcctcttttgggatcaatggtgctcatgttcctacccttataagggcacttattggttgtggttggtatggtattgagtcttggattggtggagaggcaattttccttctcttgccgaaggcaatgaaggaagctacttcattgtctcagtctctaccttggcttggcacttcccctcttgaatttgcttgctttttggtcttttgggttgctcaattggcctttgtttggaagggaattgatggcattcgaaagcttgagaagtactcagctccaatattggttgctcttacttcttgtcttctcatttggtcttgtgtcaaagctggtggcattggtcacatgctctctttgtcttctaggctttctacttcagaattctggtctgttttttttccttctcttactgccaatataagcttttgggccactgtggctattaacattcctgatttcactagatatgctaagagccagaaggatcaagttattggtcaaattggacttcccatctttatgggggcattcacatttgttggtctagctgttacttcatccacaaaagtgatatttggtcaagttattctgacccaattctgcttcttggtcaaattggtggcctcacaactaagatcgttgcaatccttggtataagccttgcaattatcaccaccaatattgctgccaatgttgtggcacc

SEQ ID NO: 51626 - DNA, 304 bp, Glycine max
  Clone ID: PAT_MRT3847_17632C.1
ggcgagcgccccctcgcctcgcgaagagaacgtttgcatggcgaagctcgccgtactaggcgagcgctacgaagagatggaggcgtctatggagaaggtctacgccgacgtcgacaaccaagaacgtaccgcggaggagatgaaccatctctgcgtcgcctacaagaacgagatcggagcgcgccgcgcctcgtggcgcatcatctcctcgatcgagcaaaatgaggagagccgcggcatcgatgatcatatgtacgtcaatcgctgctacctattcaagatacagtcggagctctccagcata

SEQ ID NO: 51627 - DNA, 527 bp, Glycine max
  Clone ID: PAT_MRT3847_17633C.1
cgagaagcacaacggcggtctagtcgatagagcagtcgatgccgtaggctatcaagctgtcggaacttctggaaataaagaagaacccaatatcgtccttgccaacttgatcagagttgttcgacctactggaggtcttggtattccaggactctacgtcccttctgacccaggagcgcccgattccgccgctgcccaaggaaatttggtcattcctttcggaaaactctttgagaagggtctctccctcggtactggacagtgcaacgtcaaggcttacaaccgacaactccgagacttgatcatcgccggaaaggcaaagccctctttcgttgtctctcaccacgtctcgctggaggatgctcccgaggcttacaggaagttcgacgccaaagaggatggctataccaaagtgcttctgcagcccgggctctctcgcaagtgaatgctggcatcgatatcggtgtagccagggaaccttttaggaaaaaaaaaagtttttttatacttgtaacgatttacgaccc

SEQ ID NO: 51628 - DNA, 296 bp, Glycine max
  Clone ID: PAT_MRT3847_17634C.1
gacacactctactccattacaaaccctaaacaagctgagggtgatacccgatcttacacacggcacttatagcaacacttatgcaaaggggtcaaaccgaatatgcacctttactagatgacatatgattgccgactcctccctgaggacgctggctattccaaagatgatatgatctgagacagctacaacggagaacatcagcgagctttgcatgtgaaaccctcttctcaaaactgtggctgagaatggcagctggccctacagacggcagggtcgagacgctcagagccaag

SEQ ID NO: 51629 - DNA, 191 bp, Glycine max
  Clone ID: PAT_MRT3847_17635C.1
gagattaattgttttcataatatgccaatcgcgatgccaggggaaatgagatcgtggattcctcggggaactccaaatctatgttttccagattgtatgctgcacaagtgttgcatatataaatggtattcattggtttcctaataaggccaaccctaatcccaagggaattggattcggaattccccggg

SEQ ID NO: 51630 - DNA, 141 bp, Glycine max
  Clone ID: PAT_MRT3847_17636C.1
cagggaaatacaactcttttaaacaacccttaccgaacacgacacgcagcgaccatatcggaaatatcagaggctgctatggacatgcccgacaatacaaggaacaggctataaaaccatcccatccaatagaactgactt

SEQ ID NO: 51631 - DNA, 459 bp, Glycine max
  Clone ID: PAT_MRT3847_17637C.1
tacggctgcgagaagacgacagaagggattaaaactcatggcaataagcaatctatgttctttgttgaatttaaattgaggtcaccctcaggatcatcctggtatgcaccaaaatgtagattgtaagtttatgtattttaggtgaataagaatttgtgcaattttaatatgaaggtggtaatatatgattgggatactaatatgaactttttataggaataattcaagcataaatagcactgtatgttgtgttattttgtttctctctcaaggttgtgagaaaatggaattgttcaattgttctgatattttcttggaactattcttgtaacaggtctctcacaattggtcaaatgcaagggaagtttcaaatggtagttgtaaggcgtacagggcatgctattcaggtttgtactagccatgtctctttctgcattcattataaaaatgaagttacta

SEQ ID NO: 51632 - DNA, 363 bp, Glycine max
  Clone ID: PAT_MRT3847_17638C.1
gcttggaacctttgggctgatttagtgcctgtattatctcacttttcataattttcctctagtcacgtctaggaaagagcgggacccctagctttctataggtatcctccgcgaagttagcgaagaggtagacgacggggaagagtaagggaacgagaaccgtacgttaagttattagtaccttcgtcgacagagctttcgatacgggtaaaagatagtctacgaactcgtcctcctccggcgttaccctatcttttctcgtcggaacgtccacctttcatattcatccccccgctttcttaggcctaggcctcctagtcggcggcatcgccgttaaggacgtcgccggaaacgacgcaaccg

SEQ ID NO: 51633 - DNA, 761 bp, Glycine max
  Clone ID: PAT_MRT3847_17639C.1
agaggaaaaggtaggcgaattgcaagttgcaactatggctaattagtatatcttttttaatacacgagaacttgaagaattgccaaggtcattttgcttttcaattacaactgccttcaggctatttcattcacacctgtatcgattttgtacactccacaatctactcatccccccttacaactaccagctcagccatatgaccattttaaccaaaaccatcatagtgctacttagaggtgaagctcaatttgttcacagacagcaacagacccaccgaggttggttcctcgtttgctttctctttgaccttggagttgagggagctctctttgcccattgcttctgcattggaggtacactccttgaatctgaagcaactgataatatggtcatttgttaggccagccacttgcatgaaagtatagatgactgttggaccgacactcctgaatcctctccttacgaggtctttacttatgaattctgcctttggagatttgacaggtacctgacgtgggtacctgaactggctgactataggcttatggttcacaaaattccaaataaatgtgtcaaaggacccaaactcttcaattaccttacacatctgacgtgcattttcaattatggatcgcaacctgagttcggatagcaatgagttggcaggacttcctggtgcagctatctttttctcattcattctagaaacagcacttggatcaaaatccaaaaagacttcccgaaataactggcttttg

SEQ ID NO: 51634 - DNA, 517 bp, Glycine max
  Clone ID: PAT_MRT3847_1763C.1
tttgagtctctcttgtcacatgaccaatatgctgggaaaagatagaaacaaattatctgtatcataattaattaattgtttgagccagaattttttatataatttaacaaagacaattagttccaacctctttcatattgtaacaatatgagattactcaaaatttggaaaaaatgtttttttttttaaataatcttactattttttgtacatataaaagtccaacccacctgctggttaaaagctattggctatgtactaacccattatttgttttaggaaaaaataggaaaagagaaagataagatagatcgaaatactacatttttggagaaatttttgtcaatggaaatcgcgagaaaaaactcccccgtcccctcaaattggcatgaaatggggcaggagatctagagaagatatctcttattttttttctttatagtttcttaaaaataaatatttttataacataaatattttaaaagataataaatatttttgttaaaaaaataaagta

SEQ ID NO: 51635 - DNA, 485 bp, Glycine max
  Clone ID: PAT_MRT3847_17640C.1
atctttttttttttttttttttttgacttattttttgatttttttctgacaagtttttgagaaaagggtcttttccgcccccaaatcttttcgtgcgcctaataaaaaaatttgtatgggctaactgttttactggggctccatcataaaactgagcagacaaaccagggttcatcgcctgcctcaaattcttttctgtccgcttaaacaaagaaaggctgctctcaaaaaacactccccttcaaagggactcccgctccttagcggttccacccccgcttgtttggggtccctctttgggatttcacccccttcgggtttataaccccctcctttgtgaaacttttgtgtttagcaagacaaaacccacacccctgttcacccccatcactttttttgggaccctgttggaacatccctaactgcgggccgtaacacccacgagagggatcatcttttttggcggacttcattttcttgcggcc

SEQ ID NO: 51636 - DNA, 605 bp, Glycine max
  Clone ID: PAT_MRT3847_17641C.1
atcgatttagttgacagatgaagagagaaagtgagctgatgaaaagatcctgaatcaacaaagaagagacgacacgacacacacacacacacaaaaaaaaaagcaaacaagctgactcggagttaaaatagaagaaaggattatcagagtcgcattgtcgattcagagaaaaaaaaattgaattcaatctgatagatcctatcacagcaaaaaaaattggattgaataaggtgtttccgattgcaaaaacaatcacacaaatggttaataaaagttaggtttcttaatttctgcttcttattacatcatcttaaatctttggttttggatccatccaataatcatggagagcataataagcaagctccgcaacctagacgcctaccctaaaatcaacgaggatttctacagccgcacgctctccggcggtgtcatcactctcgcttcctccattctcatgctcttgctcttctactccgagctccggttgtatcttcacgctgtcaccgagaccaagcttgtcgtcgacacttccagagccgaaacgctgcgtatcaattttgatgttacgtttcctgcgcttccatgttccatactcagtcttg

SEQ ID NO: 51637 - DNA, 668 bp, Glycine max
  unsure (1)..(668): unsure at all n locations
  Clone ID: PAT_MRT3847_17642C.1
annnnnngaaataaatttnnnaaatctgaannnnngagntataaatggaccctttatttctgtcnngcttcacaatgtaccttggggtgccgaagacacaatggcagcgctngatgcaaagttctccgatggttatttngacttgatcattatcaagaattgcccaacgttgcccgtccggtcaatgatgtcagagttgaataaaggaggacatgtaaaatctccatatgtcacgtacctaaaggtgaaggctttcaacttgcaacctggtccacgcaccaaggaccaagagaaagaagggatcatagattcagatggtgaggttcttgcaagagggaaaggaacttacaagtgtgagcagaagactttgatggcctatgataaattacagataacagtggatcaaggtttagcaacactttttacccctttataataatacttatggtttaattatgttcctcggcccattccattccgtgcttgttcacatttggtataaacagaaccttccatgggtttatcctgtacagtgtacagcaccgcataaattggagtgagtataaatgataaaagtaagcccgtatcccgttttgcactcaaatgattgaaatccaagcttaattgcttgaaatttaaatttgatctaagggtctaaaaaaaaaaaa

SEQ ID NO: 51638 - DNA, 299 bp, Glycine max
  Clone ID: PAT_MRT3847_17643C.1
tccttagcacccatggccaactgcaaagccagcaggagaatgggaaacactgacgctcaaatcccgatggtcccagggcgcatattcatagctcatggacatcttttcaaaaatccgactcaaaacgcgcgagtccaaatttgtacatctgaaaagagctactggcatgtgtatgaccctgacaagctccacatgtttgtcaacatgagaaatagcacctttattctaactcccacttctgtaagatctcccacattcacgcttgggacctgttatcgctgggacacgcgagacaactt

SEQ ID NO: 51639 - DNA, 388 bp, Glycine max
  Clone ID: PAT_MRT3847_17644C.1
cccactcatgcgcggccgcgagggcagacgcgcgggtggggttttttgaaagatgacggctctttacacgaaacgaacagtctctctcttcatagcatctggaaggtgggcggatgacaccagcaatgaagaggcttctccgcacaggccggagcctttgggagagattcaggaaaacagctgtaggaaatttgcacaagaggaatctattacaggttggacaactcgggtgcgtacagcaacaactgtgttggctgaaagggtgtcataaatgtctgctaaggcgcgtgaaatccagggtatacgataccaggcgactatgtgatataggactagctgactagcctaaacaatatgtgtgcatacgggcacaatcctggtattacag

SEQ ID NO: 51640 - DNA, 885 bp, Glycine max
  Clone ID: PAT_MRT3847_17645C.1
ccgcgactgcttcgccctccgtcctccccactcattgtgtcagcccggccgcgtccgctcgcgcgctgcgtgggccgcgccctctgctcgaggcgtcgtcgtcgtcggggctgtccgtgggtactgggcccccgatccagttgcctacgcactcgccctcttggagaggtgttgttcttcacagtggcatcctttcagggataagggtatattaccctgttaaggtgacattttggtttaagcaagaagaaaagatttacaaaatacgatcggttgactgtccagccttggtactccatggaactaagttgcagaagttggacggtgtccatggtaaaagtgccatcctttcagggataagggtcttgtaccctgtcaagatgacattttggttttccatttaaaaaaatatatacaaaatacgacatgtagcctgtacggagtttgttatacatggaacaaatgatgatattgttgattggtctcatggcaagcgattgtgggaactctccaaggaaaaatatgatcccttgtgggttaagggtgggggtcattgcaaccttgaaacattcccggagtacatcaagtacttgcgcaagttcattaatgcaatggagaaactctcactcacaaaacagacaaacaaacaactcacacaaaatcctagtattactgaatccagacataacaaatgcttaagatttggcaaaaaatagctttatattttttaggctttgaatgttgtagggaatcagaatcatggtttgattgaaggttgagcccaactgcaatagtgactgtgctactttgattcatagagtcatcatctggcgccccatcaatccaatagtcctgtgccagataagctattttgaaagaaacacg

SEQ ID NO: 51641 - DNA, 252 bp, Glycine max
  Clone ID: PAT_MRT3847_17646C.1
cttgatttctccagagagaagaagaaacttaatcgatcatcacttcacttcactaatacatcatggcagacgagatccagaacaagtatgagagctctgaggtttaggtccaggatcgttctacttatgactttctcggtaagaattaggatgaagaagataagcctcatccttaggaggaggtcatcgacaccgagtttcaaaaagtcactgtttcagaccatggagagaacaagcatagcctcttagaaa

SEQ ID NO: 51642 - DNA, 433 bp, Glycine max
  Clone ID: PAT_MRT3847_17647C.1
caatagtggcgaattctctttttcgttagatgtctttacctaataaattttgtgtggcgtgaatttttttttcttcctattaaagaatggttcaaagttcttcatttgccctaactggttttaggggtttgcccaagcatttccatacctgattttttttttaaaaaaaaatgctcgtattgtattaacaataaaacaatttcctggagtcaataagttcgttcacttagcattgcttttcttgtgtgaggtaattattagggcctttttatattataccaagatttttaccctattgattccttaaagcattctggggtttgtgtttcctctgtaataacaaacctttgaaaggagaaagacagttttccaaaaggtggattttatttattgaaagaatgccatatggattcacccctgtcatttgagggtt

SEQ ID NO: 51643 - DNA, 486 bp, Glycine max
  Clone ID: PAT_MRT3847_17648C.1
tcattcaacggccgaagtggtggaccagctggtgtacgcgattggcaaggagccgaaccgggaagtgcaggcgtactgctacagaacgatgaagaccatggccaactcgcagaagccggacgagacgcaaattgccaaacacgtcaaatcgtcactgaaacagttggcaaatgccgtggacgagcagcagttgcgtaccagcggaaagtggcagttcgagcagttgtacaacaatgcgcaacgcgagggcgtgttcatgtcttttgtgcacgcggtttcgtcccgctccgcgctgcccgcctacgcgcacgtgcagttggactcgcacttcaacgaccattatacgtacaacaagctcaacatttacatggtgcagcaggaagccgagcaatggtacgagcgggcaatgaacagcttcggcaacaagaaggcgaagcagaagcagcagcagcacggcagcaagcagttgagcttccattacgagca

SEQ ID NO: 51644 - DNA, 251 bp, Glycine max
  Clone ID: PAT_MRT3847_17649C.1
cttctccttttttttttttattttttttttttttttttttttttttttttctttttttgtggtaaggggaattcaattcaatttatttgccttgggaattgaagtaatttttaggccaatttgtttgccagggtaaagggatggggatttaattctgaaagcttgatatgacccaaaagtgttgtatcaaaattgtggatgggctttgaaaagaaccattgtgtggcagccccagtttttgtcactttgcc

SEQ ID NO: 51645 - DNA, 313 bp, Glycine max
  Clone ID: PAT_MRT3847_1764C.1
cccacgcgtccggttggtttcgtttcgtgttcctgaggttatcgtttttgacctacaatggtagctgtgtttatagaccatcgaatgaaatgatagtaagaaattatcgcatcaaaaaaaaaaaaaaatcagcaaataaaaaaaaaacaaaaaaaaacaccacagcatagtacatagggacactgatgcttatgcgtgatccagagattgctccaccattacataaagaatacaacactaaacaactaccaaacatctttaaacctcattacatagacatcagcaacaagtgaaccttcactacaacagaacc

SEQ ID NO: 51646 - DNA, 482 bp, Glycine max
  Clone ID: PAT_MRT3847_17650C.1
gataaaattatggcggtgatttattaataatgttaaatattataccatttaagaatttcatttttaattcctaagcattggcttagcaaactgatactatttcagtgagagattgttggtttttctgtccaataattgtggtgttggctgcaatgcactcatactaaaagaggttattagcaaaccccatatatgtgtgtgtgtgaccttatctgtaatgattcacatcaaatacaactttctaatgatttctgacatagtaaccagtgagaactcactactacatcatcgataaacattcaccaaaattatgtacagtaagtttgcctatgattgtctttagtaatatttaatttatatagttgtacccatgtgccatatgatggctactcttgtataactcaagacaagttgtacatagcccctttacctattataaagaactccacatacaatgctagacagtaacaaattcatagaac

SEQ ID NO: 51647 - DNA, 353 bp, Glycine max
  Clone ID: PAT_MRT3847_17651C.1
cccacgcgtacgcgcatataaagaaattttcgttcataggtgcacttacaccttatccagctggaggttttaaactctctaccctatctattacatatcgaaaccttaaaattactatcatttctgagccatctggtgatgataaccattagtcttaacgagtcaagtcttatgtcttaattacaccatcaaattcctactgcacttcttaccttttggtgatgcatactttgctgactccaatgcttagtcaaacgcgtatgaccatatacttttacagcagacacaatggtggtgataagcctgactcccgctcagggcttgtaaaaagccttcacctataacatgatact

SEQ ID NO: 51648 - DNA, 251 bp, Glycine max
  Clone ID: PAT_MRT3847_17652C.1
caaaaagtcagcgggggtaaccttttcgcgggtgcggctgttcaataatcctcacctctaagccagttttacaaccaccgactagaggcccgctccacaggatcttgtttccgggctaattccagctcacgacagcccgttgcaatgtggacaccggggatcatggacgctccaaagagggccccacccaacaaaatgttagcccccacaatgaaaccaaaggcgatgggagcaattattcccaaattacc

SEQ ID NO: 51649 - DNA, 490 bp, Glycine max
  Clone ID: PAT_MRT3847_17653C.1
aattcggctcgaggacaaacttggttctccatacaggatttgcattcccagaattaacaactttggtgcaatatttgctattatgatcaatccacccaacagcaaaccattgacgcttccaaagtgaggttgaaagctggagtccatgtgcagatatcaagcagacctccacccatataatccccatagaaagtgcaggaaagaaaaaatgagatgttcaagggatgatgtctcctgtaagcttctttagattagggttggggcagcaaaagaaatgaacgtgttttacgtttcgaaggatactttactttgatatcagaattttttttataccaaaactccgtttggaggtgccctcatggctcatgccaagttgctaacttttcccccccctccttgttataagtgcatcatcacagcgacaggtatcttctacactcgtattaggtgggcatatgcaaaggtaaaaagtaaaaactaactacctcag

SEQ ID NO: 51650 - DNA, 456 bp, Glycine max
  Clone ID: PAT_MRT3847_17654C.1
cccaaaaacaggggggccttcggggttttaaaaaatttggttccacctggtttatttttcggttctctttttccggatccaaaaagggggcatttttttgacccggttccccccaaccaaagggggacccaccccttttgttttttcacccccaaaacccccaggaaatggaatttttggggccaatttaggtttcccggccctcaatcagaattaaacatcccccccccccaaaaatggtttcgggtttaaaaggaccaggggggaaaacccagggtttttttccctttttaccccaaccccccaaaacatttcccaatttttacgggcagccccccgacccttttttggcatacccccatttttatcccttgggggaaaaggccctaaaccaacttttgggggcgccccccctggcatttcgggaaaaggcccggcaaacaaattgcccccaaa

SEQ ID NO: 51651 - DNA, 298 bp, Glycine max
  Clone ID: PAT_MRT3847_17655C.1
tttttactctaaatacaaatgcatggtgtgttaggccatcatcagttttctagtactagcaacagtcaacaagtcttgcacacttttgctttctcttgatcagagaggcatagcttttcgagcagaactttgtacgaatgcagtgaagcgaaaaacaaatattttcaacctttggactttgaataagtgtcttatccacgcatcctttgagagagtgaaaagaaattttggtacaaaagggacctcttctgcttgtaacaagggttgaacactatctactttgaaaaaatggccccct

SEQ ID NO: 51652 - DNA, 365 bp, Glycine max
  Clone ID: PAT_MRT3847_17656C.1
gcattttatgatgaatgctcctgattcagctgatactatagacactactggggggcaccgatttgtggggtgaacaaggggcaggttatgcgtctgcagacaagattggagctagtgatgagcttgtgctgactcacacactagaatgatctgttggaaatgttgcaccggattctttttttccaaatacagggattggactgtattctgctaggaaattaccttcaaaagcgggcgccagaaatgatacatgcactatctgacgtgatgagtgacaacaccactgattgtgttagatctgcagctaacaatatgtcactcagacataaacacaaagactgatacatcactcttgaaatgtatga

SEQ ID NO: 51653 - DNA, 416 bp, Glycine max
  Clone ID: PAT_MRT3847_17657C.1
agatcttttgtttcaaagccaggaacagccttaattaattgggatacatattcggctaaacgaagataatctaccataaccctgtgtctgccttcatagatatgatagatgctgagtaaaggcttcgaccagagaagatgtggatggcaaccccataaccacgatcaacatgagcgagaccggcgcctgaggttggatagggtatcacctctgcaagaagctcatgtcagataccgcgaacaaacatggaggctcgcttgtaggctatgacagaatgaggcacttaacggtatctgacacgctcacttgggccttttgcatccagcatcatcgcctaatcatacagcacgaccccggcatggtacgtctcatcaagaagccagaaatgaatagtgacctggctgacacctgaacta

SEQ ID NO: 51654 - DNA, 340 bp, Glycine max
  Clone ID: PAT_MRT3847_17658C.1
atgtaaaagcgtctcaatcaagaatattggggaagcattggaatgactgcatcgtgactgccgcacggaacatcggacagactctccttccgactacatcaacgccccgcttcctacctccggacatcacacttctatctcatcatcactctgcaaaatcagcatatataatatgccttcgaccatgcgcgtccagcgtacttttttaggcgtttctcaacttcaacttccgcaatgtctttatcaaaaacctccatgagccctctcgcgccacgcaaaccgtcaggatataccacagcgcattacaatggcagtccacctaccagcttcaaaaaccatg

SEQ ID NO: 51655 - DNA, 262 bp, Glycine max
  Clone ID: PAT_MRT3847_17659C.1
cgcacttcgcgtgttcgtgtcgtttccactttttctctcattactctctctgcctttccgtctttttctttcatcgccaaaaccctaattcgatccgccggacctagcactcaccgtagatgactgtacgattgaggaacaggtgagagatcagagaggctggatttcctcgccgaatggagggagggatacatccatggattatgatgacaatgattttcaaagccagaatctccatttacctggtgaagggagcacaaaa

SEQ ID NO: 51656 - DNA, 693 bp, Glycine max
  Clone ID: PAT_MRT3847_1765C.1
cccgcgtccgaaaaccctccccgtcgtcgcttcttcccaacccaaccgcaattgagtcactaccgccactgcgagacgtcgacgtttcggaacgcccggctctgttcctccgcaaaatccaagtgtgttgcttcttgtgcgatttctcagatgtcctcaagtacgtttacgagaaggaaactaagcgccaaacactcgaggagctcgtcgaaatcatccaatcaggctccttcggattcaccgaaaatcaagaagacttgatcaacatggtctccgttaacattttccgttgtttccctccatcatctctcaacacacagaatgtggatcctgaagacgatgaaaaatatcaggaaccatcgtggccgcatttgcagcttgtgtatgaaatccttttgcgttacattgtgtcgcccgagactgatatcaagacttccaagcgctacattgaccacatctttgtcttgaagctcattgagttatttgactccgaggaccagcacgagcgcgagtatttgaagaccattcttcaccgcatttatggcaagttcatggtgcacaggcccttcataaggacagccatcaacaatgtgttctatcggtttatatttgaaacgcagaggcataatggtattgccgagttgctggagatctggggaagtatatcaatggctttgcattgccaatgaaaga

SEQ ID NO: 51657 - DNA, 1078 bp, Glycine max
  unsure (1)..(1078): unsure at all n locations
  Clone ID: PAT_MRT3847_17660C.1
ccacgcgtccgcttatgataanctaggaagaaatgcatataaatatatcgatgaaaaaaaaaaactcacacttatcatgtgcatatgtgaggcttcttgtttaaaaaaaaaaaaaatcataatatatacagaagtccgtccctattatttttttctcaaactactaccaaccatgtagtacaagtcaattgaatcaatcctttaacatcttcactaatttaaagcttggcgctcaaataggcgttttatgttgcgaaattgtgatatccatctaatcacaaacaaatagttgatagacccccaaaaaaatagggtacagttgattgctatgacaagtaaaataattgcaatcactgattgtagtgcggagcaacaatttaaacttttactacatgataagaaattaagaatgcctgggttgcgtaagaaaagtgtacagtctgcataaaccgagactaaaatttattaaataagatttcaagtttttagaattttggaaaaggaaaaagtacgattaagaggaaatgtccgttgaagattgaagtgagctatttttttttttaaaaaaaaaatattaggtctcaacaaagttaataaatattttaacgtgtaacatgaaaatccaatttttttgttactcgtgaatttcaaaagacttttaattcttagttgaattatgaactgatctattgtagacatttatctagcctccatcaaaaacagcttagagccgcctttctctccaacatttgaatttagagatttgatttgggtttaaatttaaattaacttcaaaatctaatttatgaactgactaataaaaattctatctcacttatatattattttaatcataaccctaatatgtaactattataaattaaagtaataataatcttatttggtgttattcttttttaaatatttttacccttaaattattataaatcactacaacatcttattttaactttcaataataattacattttaaaaataagttacgtccaattacatataaaaaaatgtttgattactgcgaccaatgcaatcacgcttgccttcgatatccactatt

SEQ ID NO: 51658 - DNA, 420 bp, Glycine max
  Clone ID: PAT_MRT3847_17661C.1
cacatgactgtctcttcaataccttccatgtcttaatcatagaactaattgaacgatgagggcaataactaagtgtgcactcactgtcttaccttaccagtaaagcagagcctagcttctaaggctgacacacgatcactctatgcctttacaactgcacagactgctaatacgcttcttctactcacatgattacaaaatgctttacctactttatcagctataccgataccacatacagatcccaagatacaggctttgcttgttcatctaccaaatcctgcttatgcgatcgacctctatatagcactgtaccctgagaggccttttcggcaattgatcctgagagttcagactagacctgcttttaaggcgccaaacgctttaataaccaatgcttctattaaactatgaaggtct

SEQ ID NO: 51659 - DNA, 3089 bp, Glycine max
  Clone ID: PAT_MRT3847_17662C.1
ttcgtcctttcaggctttccctgatgctttgtttcaccaattgctcctggcgatggctcatcctgaccatgaagcacgagttggagcacacagcagcttttctttagtgcttatgccatctccattttctccccagttagaccaaaaaacaaaggggtatcagaaggtaccaagcgaaagcttctccattcagcatgaaagctttttaggagcagaacagatcaatgggaaacctatggaaggaaaggcagtagttggtgttagtgggaaatatgcagttcatccatatcatggtcacatcttttctggtgctctaactgatggaaaacatgagctacgttctctgatcctttaccatgtgaccaattgaaaacaaagcgtgtggtgaaagttaaactgaatttagagtccctggacctgttagtacagggatttcccaaattagaagacccttcaacagatatcactaagaaggatcctttgttgctgaaagctgtgactggaactgagatagactatgtgttgaatactgctaaagttcctacatattagtcaaaggtttgcttgtatcatatggtcaaattggcaagggaagctacaacattacggcgtgtcctacagcctctttttcactattttgattctgaaaatcaatggtcttctgaaaaaggagttcctgatcatgttttgatgtatttacaatctcttttagcagaatcaggagataactcctgtcttcttttgtccattttggtcaagcacttggatcataagaatgttgctaagcagcctatccttcagattaatatcattaacactacaacaaaacttgcacaaaatttgaagcaacaggcttcagttgcaatactcggtgcaatatctgatctcattaaacatttaaggaagtgtctgcaaaattcggctgaagcttccagcactggaaatgatgggtttaagctgaatactgaactccaatttaccttgtaaatgtgtatattacatctttccaaaagggtaagggatgtctgaccctttcttgatttgatgaactaggggtgtaagaggttgtcagaaatacagccatcatagcatatacaacaatctctgctgtttatcaatactgcaaagttaatcatgtccattcctaatgtatcatatcacaaaaaggctttccctgatgctttgtttcatcaattgctcctggcgatggctcatcctgaccatgaaacacgagttggagcacacagcatcttttctttagtacttatgccatctccattttctccccagttagaccaaaaaacaaatatgtctcagaaggtaccaagcgaaagcttctccattcagcatgaaagctttttgggagcagaacagatcaatgggaaatctatggaaggaaaggcagtagttagtgttagtgggaaatatgcagttcatccatatcatggccacatcttttctggtgctctaactgatggaaaacatgagctaagttcttttcggttaagcagtcaccaagtgagttttttgctttcttcaatctgggttcaagcaacatctttggacagtggccctgcaaattttgaggcaatggctcacacttatagcattgctttattgttcactcgttcaaagacatccagttacatggctttagtaagatgtttccaactggcattttccctcatgagcctctctctggaccaagaaggaggtttacaaccatctcgcaggagatctctttttactatggcatcatacatgcttatattctcagccagggcaggcaatttccccgagctaattcagaaagttaaagcattcctgaccgagacaactgtagatccttttcttgagttgatcgatgatgtcaggctgcaggctgtttatagagaaccggagaacataatttatggatctcaagaagatgatgtgtcagctatgaagacactgtcagcagtaaaattggatgacaagcagttgaaagagactgtaatatcatgcttcttgactaaattttctaaattatcagaggatgagttgtcaagcataaagaagcaacttgtgcaggggttttctcctgatgatgcgtatccactgggacctccattgtttatggagacaccagggaagtcttctccacttgctcagattgagttcccagattttgacgagattgtggctccattagctttgatggatgaagagacatggcccaaatcaagtggaagtcagtcagatcataaatcatcactatctagcaatagcccggacattctaagtgttaatcaactcttacaatcggttttggaaaccgcacgacaagtggcaagtttccccatttcctcaactcctgtaccttatgatcaaatgaagaaccagtgtgaggcacttgtaacagggaaacaacagaaaatgtcaattcttcacagtttcaagcaccagcaggagactagggcactagttctttcaagtgaaaatgaaacgaaagtttcccctctgccaattaagacactggattattcagaaggtgatctgaagttagtgagtcagcagccaattcaagcacaatatcaagttcgcctatgttcatatgactttggacagcaacattctttgaaactaccacctgcaagcccctttgataaattcttgaaagctgctggatgttaatggtacaagattggcataatagatgtgtatgtaactatttatttatatagagatgaacactctctttgtttttgttttggttagctgttgtctctttaccaatcagttggtcttattttcattctttttgtagtggtaaactggttgtttctttagcttccttccaccctacatgtccaaagtgagtaaaatgtgctccatggcgccacacagtgtgtctttctcttttctttttgttaggggaggagcatgcttcttcccgaaaatgtatgattttgtggatattttttcataataattgtcaatattccaaggggtttattttgtttggttaacactgttttcaccgtgtcatcagttctagtaacagtgtgaccattataatacaaaaaaaaaactgattcttctgggtaagc

SEQ ID NO: 51660 - DNA, 983 bp, Glycine max
  unsure (1)..(983): unsure at all n locations
  Clone ID: PAT_MRT3847_17663C.1
cgagaagacgacagaagggggccacaccaacccaagtgccaaaatgaaagcccatttggtccttttcttgctcatgattcttgtcaccttcactagcaatgttaacactctctcgattaatcccaaatctaactcttcaattcctcaattgacccaacagaaaaggcctgacaatgagaccatatatagggtgtcaaagcagctatgttggggttgcattgcggagtcactagagtttttgttcaggcacaacttggtgagagcagccaagtgggaacttccactgatgtgggacttccagctggagcaatacgcgaggtggtgggctggtgaaaggaaagcagattgcaagctcgaacattctttcccagaagatggtttcaagcttggagagaacatttattggggtagtggctcagcgtggacgccaagtgatgctgtaagagcatgggctgatgaagagaaatactacacctacgccactaatacctgtgtgccaggtcagatgtgtggccattacactcaaatagtatggaagagcacccgaagaattggatgtgctcgggttgtatgtgatgatggagatgtcttcatgacttgtaattatgaccctgtgggcaattatgttggagagcgaccctattagattcttataaactatgtgtgcattaattcatgtggatagattgaaactctagtattacataatatgtagtgctagcttatgtgagtgtcatgaatttactagctagtttagtttagcagtgagtatgtgcgagtgtatgtatatagtacttgtgggagaatatgggattggttttaataattacctagtacttggaacaataaataaaagtaccaagaagtaattaaagggtaccagtagttggagatctgttgccctgaggtanacttgggtctcagtgaaataaatatttatcctcccatggtgaatggcaaaaaaaaaaaaaaaaaaggcccct

SEQ ID NO: 51661 - DNA, 861 bp, Glycine max
  unsure (1)..(861): unsure at all n locations
  Clone ID: PAT_MRT3847_17664C.1
gacaaaagcaaaaagagcctcgctttcgtggcgtttgggttaccagaaagaaaagccaatcgaaaccgcgcagaacaacgaggtggtggaagagaaggagaaaaaaaaatatagagggtcttagagaaagggcattgaggtaattccacaccacgccccctctctctcccacgttccaccccatgttcacatcatccacccacttgaatagcaacaccagcaccacgcgtccggaaaccacctttctctccgtcggtggcggtggcaagttctggctaatggcagccgcggcctcgccctctactccggcggtgctcttcaccgccctcgccggcgtcgccatcgtcgctgtgattttctacggtgccagtaggtaaaaccaacaaaaagtatttaaaacaaaaatcacattagagcttccaaaacctctatctccgatttcgtttcactaacccaaaaggaaagcttgtacgtgtatatatttatattcatatttattatatttattaaatagatagcaattattattattattattattattagatgaatcctcatcgacgaagacacaatccatcttcgaattcgtctccttcatcttcaccttcttttaattcttcttcttcttcaacgatttcgtcttggacccaattgcgttcggttctattagttgttacctcttcctcaccggcttcttctcgttctccctctgatcggngagttcttcttcttcttctctctctctctttcacttgatttctttctcttgcaactcctttcgaactcggattcttcaattggtctccgtgtttgttggttcgtgccagatctctgtttctccgcatcccccattttttccca

SEQ ID NO: 51662 - DNA, 704 bp, Glycine max
  unsure (1)..(704): unsure at all n locations
  Clone ID: PAT_MRT3847_17665C.1
aaaccaaatttcccaggatcaaaaccaaacccactattaccgagaataaaccaatccccaanncnnnctaatatattgggcaaaaaccaaaaggattggaaggcccaaaatctaaggcatggaagtattaaccattaaccatatgaaggcccttggcccaaactttgggtataaccaacactcaaaaggggagacacatatcgggtatttaattcccaaccctattcaacgaaccggaacaccaaagggccggtgggtggccaatctgggactccctttgggaacctttggccggttttccccccctttgagncaantattaaacctttaccatttcccttcttaatttcaagaacccccaaattctctgggtcaacgctttcactggaaagagggaccggcctaatcctttcttcaattccctacctaaaggttaagacaggacgggccttgggaaattcatcaaaacaacttttccaggtctcaaatttttccttatcaannctaaacccaacnnnntaaaccatnttttccctggcagaattcactaaaaaactnagccatatctggcctggtanctcggacctctcaaaatcaaaannnccggtttttggggagctccccctggattcaacaaaaatttcatctaacctggttttttctgggatngccttggcnnnnnanngggtatgctcaatggaaac

SEQ ID NO: 51663 - DNA, 631 bp, Glycine max
  Clone ID: PAT_MRT3847_17666C.1
agaagatgttcaacctttctgctaactttttgactcccagagatgcatgggctgggacctttgagcatgttgttggggatttaagttcacccagaacagattgcccagtgactttgccggatgtgacacctcctaaggagcactgaagcaaaagaaaatgctggcctttctgagtttcagagtgaggtagttcaattggcagctgttcttaatggggatcatttcttgagcagtttccctgatgaaatgagcaagaagatgagtgtgaaggaagctcatgagtacgtgcgaggagctgtttcgagattcataagagccagcaaagaggccatcaagttaggggcggatgagtctgctattgtggatatgagatcctctctcactactagatcttcagttcataattaatacaaaacaaaactcaaacagaaaagagaaaagaaagttgtgtggctatctctgcatatctaattattatagtttttaggttgtctgataattcttatgctagattttgttaggtttttgaaagtgaaatgcagcagaatggagtgtttgatagaaggtcgcgcaaggaagggaagtctctcaagtctcaaggtctccgtttgcaaaaatttaaggatttttt

SEQ ID NO: 51664 - DNA, 342 bp, Glycine max
  Clone ID: PAT_MRT3847_17667C.1
cgtctttgaagttgttaagatgactgcttcctacattaaacggacacactgttgcttcatagcatctgaaaatatggctgatgataccatcaataagaaggcttatcctcacaagctggagcgcataggagagatacatgaaaaagtagctgtgaacacacaacaagaggtatgtattacagcatgatgaactcaggggcgagcagcagcaactaataacagctgatgggtgtacatatgagtatgcattggtgcatgatagggcagagtcgacaataccactgggattttgtgattatgtgtcaagatacacaaccatgatacaatatgagtgcatatggg

SEQ ID NO: 51665 - DNA, 580 bp, Glycine max
  Clone ID: PAT_MRT3847_17668C.1
gcacgaggctctggcggtctggtctcttaagctgcacaaggagatttgttgaggagatgtcaattgaaccaggtgcaatggtctggaggacccttttaagtgcttgtattgttcataagaatattgatattggagagtttgctgcaagtcatcttctggaactggacccaaagattcagtaacctatgttctgctttcaaatatgtatgcagtaactgggaaatggggttgtagggatcagacaaggcaaatgatgaaagatagaggtgttaaaaaagagcctggtcttagctggatagaggttaataactcagttcatgcattttttggtggtgatcagaaacaccctcatgtagataaaatatatgaatatctcgaagatttgaatgaactggcagctgaaaatggttacataccgcagaccaatagccttttgaatgatgtagaatgacgtcagaagggtccagcacaaattattcacagtgagaaactagcaattgcttttggattacttagtttgtctagctcaactcctatccatgtttttaaaagccttcgtgtttgggggattgccataact

SEQ ID NO: 51666 - DNA, 309 bp, Glycine max
  Clone ID: PAT_MRT3847_17669C.1
gggggaaataacagcattatggagcacccaaagggccaaccctaataaagtacaccggtacaaaccacaacttcatatccatttcgactggaacgggaatatgaactcaaaatagcaattggttcgtcatagccctagtgacattaacactctttgcaaaatcaaaataacccgctcggagtttaccaaaaccaaacactgtgtgaaaaccccccatgaatacatcaccaaggatccagagagggccacgtgcaggaggaatttctattggatagaagccactaatacactgaggcacaggaccttaac

SEQ ID NO: 51667 - DNA, 791 bp, Glycine max
  Clone ID: PAT_MRT3847_1766C.1
tccaatgcgttataattcttttcagaatgaccatactttgtgcttcccagagcgctttggtcctggcttttagagactccctaaggcatttcattatatttcttgtcagaattgccatactttgatcctcctcccaagggttgatggggcataggctgtgaatttttgacatgtttctgaaaaattccataaggttccactttccgattcccctgacctgccattgtgtgatactgaaatttacgagaaacaggaggtcttcgatttccctgaccagataactttggactatgcaaatcattgccatcaaaactactattttctctcataccaccagctctaggattggaaggattagagccaagactatctgcagatttttcctttttgttagaattctccaaatcatgtgccgcaccttctacatttccatcctttgatgattccaaaactaagggattcttctccatatgatgcttatactttcctggaacttcatttcttctatagcttcctgctgactctgcatccctccatacatcaaaattagggagctgcttgctgctttgctggctgaaccatgcagtgcctgaatttggcaatgtagcaataccatttgtaccagaatcttccccacaaacctgcatattacctgcagacttcacatgttccattccaacagatgaattagtatcagaatcaggttcccacatagcaggaatctggcccatctcggacgcgtggctttctcgtgatggggctgcgataagttttcacttttcatgggtttt

SEQ ID NO: 51668 - DNA, 183 bp, Glycine max
  Clone ID: PAT_MRT3847_17670C.1
cggatagagggctatgatgcctctgtccttgcattatggacgggaattgcaggtatactcgagtccatagattcggggataagaactgtttgggcacttataggtgcagggaaggtcctaatgagaagaggcgctatatgtaaggcttatatcttgcaaccagtggaaagctcaaactggagc

SEQ ID NO: 51669 - DNA, 237 bp, Glycine max
  Clone ID: PAT_MRT3847_17671C.1
ctcgagccgcgcactttgcgattactgcgtcatctccaattccccggcaaatggcaacccagtggagcatgaagaaaaattcgtagctgatggagtggtcttcgctgaactgaacgaaggtctgaccagggaattaaccgaaggccgatactccggcgtggcagttaaggttacgccgatgcgcaccgaaatcatgatcagaggcaacaaaacccaagccgttctcggtgagaaggg

SEQ ID NO: 51670 - DNA, 402 bp, Glycine max
  Clone ID: PAT_MRT3847_17672C.1
gaacctttgggctgatttatgtgcttgtttatgtgcttgccgtgagaagatgatagacgggggaaataaagttacgcgtacggagatgatcaaaaacgctttttataacctttaccgcgctcccaaaccaccaccacacggcgagtacagcctgtcatgcatatacgaccgactaagtgatactagtaaccggactggagtcttccaccaccaccactcccggtcgaacttctccgctagtacgctcttaataacgcatctcctcacggaacctccccgccccacgcgccgaccctccccatacccctcgaaaccaacaaacctgaccagccctcggatcagcccacccggcgctctacaactctcgaccttgaaccgatcctgtattcgtatcccgtaacc

SEQ ID NO: 51671 - DNA, 339 bp, Glycine max
  Clone ID: PAT_MRT3847_17673C.1
caagctggtgcaatttggttagattcaccataaatttgtattgaaggtttcacaagaggaatgggttgcagcttggtcaactcaagtgcgtcctgcaacaactctgttggctgatgggtgtccatatttgtatgcaatggtgcatgatagttcagtgtctacaataccatgtgattttgtcattggtgtcaagttgacaaccataaacaatatgtgttcatatgggcttaatcctggtattttaggttctcgttttttgggcaccattccttattccatttcacaacaaactgtttggaatcaaatgctaccagtgtgaacaccattgaattttgattc

SEQ ID NO: 51672 - DNA, 211 bp, Glycine max
  unsure (1)..(211): unsure at all n locations
  Clone ID: PAT_MRT3847_17674C.1
ctctcgcataccngaggacgggggagattaaatcaccaagctccgatcctatccaacggcccatagtgaaatcataaaatcctccgcagctactccgctatgaacacagcattaccacgtgcaatctactctctttccactgctggagatgtaaccctcacgcatgctcctccgagtacctgttggcaccgaataacatcactccttacct

SEQ ID NO: 51673 - DNA, 348 bp, Glycine max
  Clone ID: PAT_MRT3847_17675C.1
aaaaaaaaaaaattttttaataaaactacaatatacataaccacagacaagaaaggcatatatataaaaataaattttcccgctaaaaaaaaatttaaaaccaaacatcccaattctaaaatatttaacccaatgtacaaagtttatcaatcaaaaaaagaatatttaaaggtggtcgaataaatttctactaaataggttacattaaaatacccccatcaatttgtggaaaatcgcacgaatatacttttaaaaaaaacttattttcagaaaagaaccttaattcataagaaaaatatgattaacctcaaatccaggaaattcttgtaaaaaagttatttcaataga

SEQ ID NO: 51674 - DNA, 1012 bp, Glycine max
  Clone ID: PAT_MRT3847_17676C.1
cccacgcgtccgtacggctgcgagaagacgacagaaggggccctcaccgcacagaattagggttttccaattcacagagcaacacaacgaaccaacaatggcgcagcctcagccgcagtcgcagccgcagcacgggcaagcagcgctggagcaggtgcagtgcttcggtcgcaagaagaccgccgtggccgtgacctactgcaagcgcgggcgcggtctcatcaagatcaacggctgccccattgagctcgtggagccggagatcctccgcttcaaggccttcgagcctatcctcctgttgggtaagagccgcttcgccggcgtcgacatgcgcatccgcgtcaagggtggcggccacacctcccagatctacgccatccgccagagcatcgccaaggcgctcgtcgcgttctaccagaagtatgtcgacgaacagagtaagaaggagatcaaggacattctcgtgaggtacgatcgcaccttgctcgttgcggatcccaggcgctgcgagcccaagaagtttggtgggcgtggcgcacgtgcgaggttccagaagtcttaccgttgaagaagaatggtggtggtgttttcgtgtttttggcttttggtttcggttcatgttttatgctgtggaaaaaatgaatactttcgttgctggtggtttttggtagttttataattttggtcgcttttttataattgttggatttgatgttgttttaattcaactttttttgtttaggtacaatgaaggtatgaagttattatcattattataaattctagttttaatgtcatggctttttgcttgtgcttgctggaattgttctgggaatgttggaattaagcgcgatttagtgcttgtggaattgggattttttataagtgttaggccaaattaacacactttaaatattggatgtgctaaggcattctaggggggtagggctatggattataattgatttatgtaataagttttgcacatgttctttgttttggcattggcttg

SEQ ID NO: 51675 - DNA, 280 bp, Glycine max
  unsure (1)..(280): unsure at all n locations
  Clone ID: PAT_MRT3847_17677C.1
acnaaacacagccaaaaacctcaaggcgcccaatttaaaatctgacgtgtaaattaaccaaaattccaaaatgccacaattctttctatcatggaaattaaaatatatcaactccatacatataccacaataattttaaagccttttaccccttctaccactctttctacaaattctatccaaaagaatgaaattcacatcctttatacaaccaattttcattccttaactaacaatttcacaaataacttattcaccaccatctccatttgtttttctc

SEQ ID NO: 51676 - DNA, 107 bp, Glycine max
  Clone ID: PAT_MRT3847_17678C.1
gggtttctattgataaaatacaagggcggccaaaccaggcggattaaattgaggtgcattctttatttcctcgctagctgtaaaagccgatgccagagttcatgtac

SEQ ID NO: 51677 - DNA, 1147 bp, Glycine max
  Clone ID: PAT_MRT3847_17679C.1
cccacgcgtatagacacagaagaagtgaaagcggagaggagaaagaaggatatggaagcagcgtcagagttagaccaaggtatgaaggtgttggattcgtgtttagcgaatatcaattggcgcctcaaaccttcttccaagcgtcgcttacaattagatgttctcgctctcattacaagaatgagagcggttgtaatggtagactacggtggaatcatgcctcagctccagcaccacctctcttccctcctccaactcgcactaagggattccccctctattttcgagcacatacgagttatggttatacaagacatgatttacttaatacacataaccgaaattgcgcactttgtcagatcaagcttcaactctcaacaacatccgttgctctttgttgaccttgaacatcaaccccctaagatgataacacaaattgaggaaagccaattagcaatgcagctagtatccattcagaggttgtttttgacagtattctcacccgaggaacctaaatctgcggatgatcctaaagccaacgccaacgccaacgccgcgtgccagagctcttcctctccttctgctcactgcattgatctcagtaactgcatggacaacactgacatcactgtgccaaccttgaatggatggcttctaggctacccggtggtgtatctctttggcaaggaccatatttctgatgccatttatcatctttcgaccaaatatcttcatatttttcaagtgtttgtctgcaggaacagtactctcaagaaagggactcaagctgaagagctgttaagtttttcagtgccttacgatctaagcatgagagggagtaatgaacaatgggcagaggcttttctggctcacatgcaggcaaagtgggaaaggtgtgcaagtgcttggaagtcgttaaagatggaggttagtgaatgtcatcctcaagctatcgtgttataaatctcccctcttttaggttctacctgtcagaatagagctgaatccccccaagtacagggcgtactttaaagaatagaatgtatgtaaattaattcaaatatattccttagttggagaatagatcatactacattgcagcttgcttgccacatggattatataataaagttgggtagttacatgg

SEQ ID NO: 51678 - DNA, 701 bp, Glycine max
  Clone ID: PAT_MRT3847_1767C.1
gaaaagctgaagaaattgaactggagactgttgttacttccaaaggagatgaggatcaaaagcatgccataaaaggatttggttttgaagatgaccgcctcatgaattgtaattggttgcaagagcctaatgcagatgaccttttgatgttctttcgaatattagcagtttgccacactgccattcctgagctgaatgaggagactggcgtttatacatatgaagctgagtcacctgatgaaggggcttttcttgtagcagcaagagaatttggctttgagttttgcagaaggactcagtctagtattttcatacatgaaagattttctgcttctaggaaagtggttgaaagagagtacaaacttttgaatctgctggatttcactagcaaaagaaagcgtatgtcagtgattgtgcgtgatgaggagggcagtctttttcttttttgcaaaggggctgacagtatcatatttgatcgattgtcaaagaatggaaaacattatttggaggctactaccagacatctaaatgaatatggagaagctggtttgagaacactagccctggcttatagaaagcttgatgagcaagaatacactgcttggaacaatgaatttcagaaagccaaagctgctgttggggctgacagagattcaatgcttgagcgggtatcagatatgatggagaaagggttgattctt

SEQ ID NO: 51679 - DNA, 479 bp, Glycine max
  Clone ID: PAT_MRT3847_17680C.1
aaaaaagagttcactacatgcattaaaagaggcaaagactttaaacattttttgggggcagtttcctccaaacctttagctgatacaatgaactagcataaagaagaaaaacttataagtttctagtttacaatataattatggacaaactgactcttttttatagaaaaaaataaaataaaatatggacaaactgactcttttttatataaaaaataaaataaaatatggacaatttaacataaaataaatccacataacatacgacaatattcatcatgtttgagtgtaaaaccatttgccatcattttaaattcacctttgcctaaagaatacattgcgcttttgcttccctactcaatcttcatgttcatattcatcttctgaatcagatcgaacatgttcactaacttatcctcttgcttggatttgtttaacaagcattcgaaatatagcacccaccaataaatatgcataac

SEQ ID NO: 51680 - DNA, 217 bp, Glycine max
  Clone ID: PAT_MRT3847_17681C.1
cgaaaatcaatgcagggtgggaccgttcatataaactggcacgacaggaaacacgtcgtaagcctcgacttccatccacactctgcaagtctcaccatcgacgaggccgatttcgagatcacgttttggcacataaaagcagtcgggtcaactgataatctgccagtggatgcctaacttagtagacgcacttagtataacgctgcaggtaaagtta

SEQ ID NO: 51681 - DNA, 226 bp, Glycine max
  Clone ID: PAT_MRT3847_17682C.1
catctgaactggacttccacttattccgccatggcgggaaaggaagctcaagattgatcttggtttggttcttgtaaaaacttcgtcggcattcggaccgcctaagcacgttgggaatttgtaccggcgtcacaaaggataccgatcaaaatgagaatcgtggtcccacatttttcgatcaacgcttgcattggcaacaacagcaaggtccttgagatcagaaatt

SEQ ID NO: 51682 - DNA, 378 bp, Glycine max
  Clone ID: PAT_MRT3847_17683C.1
attcccccaataatcactttccacatacaccatttttgtattaccaagccgccgaacacggcaacaacgccaatggaactttactttgttccgacactgcagtagttgaatcgaatctaccttgaactgtgctggatctatttctttctttcacttcaactcaagtccttaggctacccaattaatggatccgagagctgtactgatattagtggcgattctagttgcggaaattggttgcattgccaacggaaattttgtgttcccggtggagcggcggaaaaggagcttaaacgctgtcaaagctcacgacgctcgccgtcggggtcgaattctctccgccgtggatctcaacctcggcggcaatgggcctcccca

SEQ ID NO: 51683 - DNA, 316 bp, Glycine max
  Clone ID: PAT_MRT3847_17684C.1
ttggtgatgatgaactttatagtattgaacttaatttttgatgtttcagcaaaaaaaaaaaaaaaaatatgaaatttataaaaaaaaaagaataaaataaaaaaaattattaatgatgggaagtttgtgtgagggtaaagatattactttatctaattttaatgtaaagaaaaatggtggggggctttttaggtgacaaaagtttggggaaggttctgtgtaatagatcatgttttttttgggctgcaatggtgagaataaatggggagcctttttctactgcaatgcatgggagaaccttggaaattataatttt

SEQ ID NO: 51684 - DNA, 272 bp, Glycine max
  unsure (1)..(272): unsure at all n locations
  Clone ID: PAT_MRT3847_17685C.1
atttatcttcctcagtagtgtcntttacgcttctcttctctgnagnaactatgnctaaccctaaggtcttcttcgacatgncnatcggcggtcaatctgctggccgcatcgtgatngagctctacggngacgtcactccccgcaccgncgagaacttccgcgcgttttgcaccggcnagaagggcgtagggcggagcngcaagcccctccaacnacaagggctcgtccttccaaccgcgtgatccccgagtttcatgtttcanggtgggatt

SEQ ID NO: 51685 - DNA, 176 bp, Glycine max
  unsure (1)..(176): unsure at all n locations
  Clone ID: PAT_MRT3847_17686C.1
tgatgtgctcatcttcgcctgaccctgagaattcgatcatccaaggcacattagcgtggcgttcnaatcctgagtgaaccggcgtttgaaagcaaacttatcctcaggaggatagatggggcgattcatgtgagatccagtgtacatcctactttgctcttcactcgggggatccg

SEQ ID NO: 51686 - DNA, 214 bp, Glycine max
  Clone ID: PAT_MRT3847_17687C.1
gacaccgattcgcataacaagaaacaatcgatcatagtttcacgtcggccttatccactttacggtttcggttctctacactaactttcacgtatcgaatccttacatttcacatcaggtcagagcaatctggttggtagaacctttggtcttagtcactcaagttttacgtccgaattaaacgatcaaaatcctactgccttcgatccttctg

SEQ ID NO: 51687 - DNA, 511 bp, Glycine max
  Clone ID: PAT_MRT3847_17688C.1
cccccttcccccttcccctccttttttttccgatgaacattcactaaaatttataattcacaatttgtttgagatttctttacatacttacgtatagactacaaatttacccagcaccccacctcttgtgggattgaatttgaattgcaaatcgcaaatacaacattctcggctgaactgcaacgcattaggatctcgaaaaacataatcaagaccgtactgaaacaaaagaaaattttaattttttgggtaatgtatataaacttatataaaggatcttgtggatattattattataaaactttttattctacaaaatttcaacctttatacaaaggagaccctgcctgaatcactttaaagaccttgttttgccggaaagccttcatgggactggggaagaaccaccctctccattttgtccgtggtttcaattctccgcccccggaaaccacggttaccgccgtctttgccaccgaccttgaccgctccatcatcgggtttatgcccc

SEQ ID NO: 51688 - DNA, 451 bp, Glycine max
  Clone ID: PAT_MRT3847_17689C.1
tgttttgttaaagttcacttagaaatccttcgccctctcataattttatctccaatggaattgggaagcataatgcacttccttcaagataagaccattttagtcactggtgccactggcttcctcgcaaaaatttttgtggaaaaaatattgagagttcaaccaaatgtgaagaaactttaccttcttttgagagccagagatactgaatctgctactcaacgtttacatactgagatcatagggaaggacttatttagattgctgaaggaaaaactgggtacaagattcaattcctttgtgtcagaaaagttggccgtagtgcctggggacatttctcaagacgacttgaatttggaggacccaattctaggggaagagattttcaatcaaacagatgttatagttacttaagctgcaacaactaactttgatgaacgaccgaacttgc

SEQ ID NO: 51689 - DNA, 249 bp, Glycine max
  Clone ID: PAT_MRT3847_1768C.1
catttttcgataatatgagtgctatggataatattcaatacatatacaaaagtcgggtaggtcaactgcaagccttaaacaattcaaatggcccacttgttttagttggtaagacaggcatctattcttactgtttgtttgacactgcactagatgtttcaccgttataaacctaaatttttaaaatccttgtatgcataaattaactttatcctcttcttgatgaaaaattattaggtagttcaggac

SEQ ID NO: 51690 - DNA, 468 bp, Glycine max
  Clone ID: PAT_MRT3847_17690C.1
ccgcaacaaccacaacaacatcaaacctcaatgtcgtggttttggggccagaagagtattgtcaaattatctcggggcagaatcgaaagaaacaaagattgtaagcaattcaactgtgatgaatggttcaaacccaagcagcaataaagcagaacagccagaacgtcaaaacaagtcacatgccatgaatggcaagacaaaactgactagtgaggttgtatagtaaagcagccatttctttgtatcatttgttttatcagcatttctttgtatcatttctttggttgaatcctaaaaaatcctgttgttagttgggaatggaaatgtgtagttgttggggttatttctttgtatcatgcctaaagtgatcgttcaggattccattttgagaggccataacttttaaaaaatttatttatttcattgtgatgaactttttaattcttaagatttttgtgtattaaaaaa

SEQ ID NO: 51691 - DNA, 319 bp, Glycine max
  Clone ID: PAT_MRT3847_17691C.1
ggttttgaccagtaactttgacatgatattttaattaatttctatactaactgatattaacaactatacagtctatacttcgcagcttggttatgttatagtatcttgcgttttaagttggaaattgatgctggacattaaatttggtgcccattcactatattagtgaatttaaacttcaaaataagattaacatgattgttattgaaaattcaaaggttgtttttgaatatacccaactgctcatattgttagaaatctaagtgtgtgtgtatatatatatatatatatatatatatatatatatatatatatatat

SEQ ID NO: 51692 - DNA, 170 bp, Glycine max
  Clone ID: PAT_MRT3847_17692C.1
agcagaactagggaaaggaaaaacacatgactcgtgcatcttagtatgttactaaattagtacaattggttaagatcttaaccgtcggtgagtttgaaatggcacatgtattgattttcagcattaaaatgcttccaaaaaatcaagtggcttttgtttgttggtttttt

SEQ ID NO: 51693 - DNA, 306 bp, Glycine max
  Clone ID: PAT_MRT3847_17693C.1
agtcttccaggccacgccgtggccggcgccgccgcacgggcgacttccccgccgacgcggtcgcgctgccgccggcgcccatgccgttgcaggtgatgaccgaggacgcgctcccgtcgttcccgcaggcgactgcggcggcggtcatgaacgggggctgcggcctcatcgtggacccagcctctggtctgccaaccgcgctgtcatcagctgcggcggcggcaacggccgtgtccggcggcagcaccacggagaaccccatcctcacggcgcttgtcaaggagatggtacgcgcgatgctgaacg

SEQ ID NO: 51694 - DNA, 435 bp, Glycine max
  unsure (1)..(435): unsure at all n locations
  Clone ID: PAT_MRT3847_17694C.1
gtttaagtgggttggattcggaaacttatcaagactcaatgagtttaagtgagttggattccgaaaaagtttaagccgttgggttgagatgctgagtttctatgttaagattcaattgtatttttatgttgtatgtgttggtttcaatccaaaaggaattactcttttcaagtnaaaaaaaaaaaaaaaaaaaaaaaaaaaaaaaaaaaaaaaaataataaaaataaaattataataaattaaaaaaaaaaaaaaataaaaatataataaattaaaataaaaataaaaaaaggggggggccccccctttggggccttctccccccggaattttattctggccggttcctgtgggcttaacatcttttcctaattggggcggtttaaaaacttggcctaaatatggggataagttttctccgtgtgaaaattttat

SEQ ID NO: 51695 - DNA, 444 bp, Glycine max
  Clone ID: PAT_MRT3847_17695C.1
ggggaaacaataacctaaattatttatttccaaactgggcatttttttttcccacaggaattatttaccaaaaaatagccttttcataaaaaaacctatgaaaaatcctaaatttttaatatggaccattcttggacccttaaaagggtttttttttatttttccccctaaaattatatgggggcggaacccccaaccaaaaatggttaatgaattttccacagccctttttttttttttcattttttggaaaaaaaaaaatttaaaagggttttctaaaaaaacaatgtttggttgggactggaaaattttggtggaaatttgtgtctggaatttccgcaaaaatggggtttttttttttattttgggggaaaatggaaaattttggtggagcttggcggcccttttaaaatgccccaaccccggcccggggggtggccccgg

SEQ ID NO: 51696 - DNA, 216 bp, Glycine max
  Clone ID: PAT_MRT3847_17696C.1
atttaaacaagttttacatggacttacacaaacagcacgcacggtacaactgcgcaacttataacgcagaagatggcctactgaacggaggaaagcccaagaccgaatctcatagagcccatcccaaacttggtgagaataagaatggagccaccaccaaagccaggaaaccccccggcaaaggggaaacagtctaagacccttacaaggccaaga

SEQ ID NO: 51697 - DNA, 409 bp, Glycine max
  unsure (1)..(409): unsure at all n locations
  Clone ID: PAT_MRT3847_17697C.1
ggttttgtttttttttatttttttttttttttttttttttttntttgggtttcatttttcggggaggttccattgggaaaaataaattaatttatggggttttacctgccgactaaaaaattgatgggccccacaagggatatattgaatctttttattgggaatcggcactgggcacaaaactcgcacatgtgggaaccgtccggaaggggaaaaaataaatgacaaaatgccttagtaaaaaaaccattttgggcctttggtggtggggggtcctacaagggccttttggggggcttttaatttcacccaaattgggctcccctgagaatttagcttccaaaaaaaattttcttccacatggcgggggggcctggggttttattcccttttcatttattgaccctgc

SEQ ID NO: 51698 - DNA, 261 bp, Glycine max
  unsure (1)..(261): unsure at all n locations
  Clone ID: PAT_MRT3847_17698C.1
aaactcttgagcacgccatgcgagtgtgtagaacgtgggatnnaatcatctcattgatgccaaaaggtggtgaaaccatctggggtggcttggattggtgtcttgaagactggaataactatgatcaggaaatttcatggggaagtaattctgctacttttaacttatcatatgaggctgtgtggattgattgtgatgagatgagcagagaaagcattcaaaaaatttctaaaaaaagagcttatactgcaagaacagttt

SEQ ID NO: 51699 - DNA, 498 bp, Glycine max
  Clone ID: PAT_MRT3847_17699C.1
acactcaaaaataacttattgataaaagtaacgcacaagcttaataatgatgcgtttgtaagtaactttttgccagatgggctgaaactacttaaaaatgaaaacctttgtattgactgatgactactatattgacaagaatgaagaaaaaaactcagttacatgctcctcaagcaaagagtaacattcttaatttccctattcttgatggagctatatattagacggtctaactgcaagatgcataaaacttttcctgtggaaagcaatacgtagctttttgtatttctggaaaaaagcaccaagggcaatctctctgacaaggacttgctaatgcagattttcagattcctgttatgtattattgataggctcttgaatccattagagaaggtatgctggggacttcaaccccaacaattcctctttctgcttctgaagctaaaacattatctcttgagccacatccaactcagttgtacaaataatgttatactg

SEQ ID NO: 51700 - DNA, 383 bp, Glycine max
  Clone ID: PAT_MRT3847_1769C.1
gcccccccgggaaaggggtcaaaaagttttttaaacggggatcccccactaattcccaaggtcacattgtttattaaaatttagggccggccctggaaagctttgatccccaattttttttttaagaccccccctccccttttcaaaggggtttgggggggacccgccgccccggttaaaatctttcccaccctcccaaagaattggccaaggggccctcctgtttttttgggccctctcaaagggggaaaaaggttcttggggggggctttttcccaccgggtgccaaagcagggaccttcgcccctcccgggggaatcccccgggggccattgagggcccgcccgtgctaataaaatgatttgttccagggcccccccttt

SEQ ID NO: 51701 - DNA, 264 bp, Glycine max
  Clone ID: PAT_MRT3847_176C.1
ctcacgcgggagcatacgcgttaatgtcatctttgctcaacacacacgttatacacctatttggggtgggatcacgcgttgaaaaacattcaaaaagccggatgcgagagtatggtaaaagctaggagacaactaatggaacgcaaccctgacacaaaatgagacaacgagccgtctgattcggctgaggcaaccaactcaaatgttcaaacttcaacgctatctgcatcatatgcaccctgatactatgcatccatccttaaa

SEQ ID NO: 51702 - DNA, 366 bp, Glycine max
  Clone ID: PAT_MRT3847_17700C.1
cgccattgttacacaagctactgtctttcttctctcggagggtgtcaattgtaacataagcgaaccctcattagcttgccttgcaaattttatgctccttctgtcctggggtcaaagctagtagctctgactttttttatcatcatgggtgggagcgagactcctgggtgcggttatgggtacggctgcttgagtgcatgaatgatatatgtgggttgccagagtgtgctatcttcgtcaagaagatgattggaaatttggatcgcaaggctagagacttgtcatgactctcttccacgaattgcatgatggagatgagtccgccatcaagcaacagcttcagatcttagaggtagtgtttgaagc

SEQ ID NO: 51703 - DNA, 650 bp, Glycine max
  Clone ID: PAT_MRT3847_17701C.1
aaaaccttggaatagatacgattcaatatcggttgggtcactcatcattagcataataaccctataaaggtctaaaactcctttctaagaccatgatttgttttacttttgaatcaatcaacagaaaacagcaacatcccaaagaaacaagcattccactatttcatagtaacaactagcacaaagacactcattgaataaatttccctggctgacacaacgtatgatggcagcattgaaacttttgcacattggttcccttgctttcactgaatattctccaacttttttagagaaacttagtggttcagccaacacagtatttctggagaagcaaaccagcattctctttatcacctttggcttgtatggtgagtatctccctactcaggctttcaattgctccttcaatcttggtaaaatcaacagagattgtgccttcagaatcccagacaaaggctcctttctcatataaccagttgaactgcaatgcttgtccttttccatgagcttcctctaaaccaaaacgtacagactggaagcatccagcaagaaaagaaacatacatgggacttcaataaactatcagaaagcaaatcctgggatattaagaatctcaatgcccaaaggccaactatatcagcctttgc

SEQ ID NO: 51704 - DNA, 273 bp, Glycine max
  unsure (1)..(273): unsure at all n locations
  Clone ID: PAT_MRT3847_17702C.1
aaaaagacgcacgcgngcgaaagacaggaatacggctcgagggaaaggcacactgttttcaaacttattggctcaccttctgggtgtgttttttacactgaaggaggtcaattgaccaatacaattctgcgttaatcttacactgatgtactgcttgatgagattgagaaagcccatcctgatgtgtttaacatgattgcttagattctgtaagatggaagactaacagacagtatggtcagaacattctatttcaagaacacacttcttata

SEQ ID NO: 51705 - DNA, 421 bp, Glycine max
  Clone ID: PAT_MRT3847_17703C.1
ggggaggaaggatttaagttggatgtccaaccaggaaacacctacttgctaagaatcatcaatgctgcactcaatgaagagctattcttcaaaattgctggccatgaactcactgttgttgaggttgatgcagtctacacaaaaccattcaaaactgataccattgtcatagcacctggccagaccacaaatgtgcttctaacaaccaaacatgcagcaggcaaatacttggttgcagcctctccttttatggatgctcccattgcagttgacaacaagactgccactggcacattacactactcaggcacccttggttccaccatcaccaccctcacttccatgcctcccaaaaatgctacccctcttgcgcaccagtttcactgactcactcagaagcttgaactccaaaaagtatcct

SEQ ID NO: 51706 - DNA, 1220 bp, Glycine max
  unsure (1)..(1220): unsure at all n locations
  Clone ID: PAT_MRT3847_17704C.1
atctgctgcttctggagcaaaatctcccaatggacagtgcatacaaatcagaagatgtgaatgcagcacctatccgtgttattcagcttctatataatgcaggggatgtcaagggaccacaaactcttgctttcaatcttccaaatgatgagcgtattgtaaaagaccggggatcatcaatggtcatgcttaagaatgtttcagaggctaagttcaagcatattcttcttcctatagctgctgcctgtgttgcaaatgaccaacaagaacatgtagattttgaatcattctttacacatacaatttgtcatgaatgctgccatggaattggaccacataccataacacttccaaatggccaaaagtctactgtcagattggaattgcaagaattttactcggctctggaagaagcaaaagctgatatagttggcctttgggcattgaggttcttaatctcccaggatttgctttctgaaagtttattgaagtccatgtatgtttcttttcttgcgggatgcttccggtcagtgcgttttggtttagaggaagctcatggaaaaggacaagcattgcagttcaactggttatatgagaaaggagcctttgtctgggattctgaaggcaaagtctctgttgattttaccaagattgaaggagcagttgaaagcctgagcagggagatactcaccatacaagccaatggtgataaagagactgctggtttgcttctcctgaaatactgtgtgttgacagaaccactaaaagttgctctaaaaaatttggaggatattcaggtacctgttgatgtagctccgacatttcccattggcaacaaaatattgcaatgaaagcaagcgaaccaatgtgtaaaaaattgccagcctggaaaatttattcaattagtatattttcactagttgttactgtgaaataatggaatgcttgtttctttgggatgttgctgttttctgttgattgatttaaaagaaaatcaaataatggtcttagaaaggagttttagaccttgtcttagttacagggttattatgccaatgatgaatgacccaactgatattgaattgtatcgattgcaaggttttgattccaaaaaaaaaaaaaaaaaaaaaaaaaaaaaaaaaaaaaaaaaaaaaagaaaactcgactggtnnnnnnnnnnnnnnnnnnnnnnnnnnnnnnnnnnnnnnnnnnnnnnnnnn

SEQ ID NO: 51707 - DNA, 476 bp, Glycine max
  Clone ID: PAT_MRT3847_17705C.1
ctcaagttgcagaagtaaacgtcttatgcttcaacctctttgtcagacccccttttatcaacaacaacggagatgactacaaagatgaaaggatcagagaatttctcaaaatgataaacacatatgatgtcatatgtctacaggaaatgtttggtgtctacagtcgaagaagagaattgcttataaacgaagctcgtaaggccggatttcttttccatgcagtatctcccaaaccttctactttatctcggcattatattgatggaggacttcttgtgcttagcagattcccaatcactaacttcgagttctgcccgtatccaatgggctgtggcgtggattattatgtgcaaaaaggaatattatacaccaagatacaaattggaagcgcatcattgcacttatttaacacacatactcaagccaactatgagcctgatataagctgtttactgagaaaagctgaacagttgaga

SEQ ID NO: 51708 - DNA, 396 bp, Glycine max
  Clone ID: PAT_MRT3847_17706C.1
attcagtcaggtgttccaagcacaagcaagcacgcctgcatgtatttgactattgtaagcaaatgtaatttaattttgtggtcatcaatgaatttggcattgaatcgaaagctgcgcgatgtaaggcagtggcaacggacatggaatgggtcctgcttctccacgcttccacgatcacaacatgcagagcagctgctttgtcattgcaccaatctgagccatcttcagcagacacaaggtttcatgcttaccagaggtctcgaccaagatgacatcctactcgcccgatttatatacacctccgcttctctgggcttatcctcctatgcctattctgttttcatcagtaaccaccgacccagcatctttttctacaacaacgtcatttgggctcta

SEQ ID NO: 51709 - DNA, 378 bp, Glycine max
  Clone ID: PAT_MRT3847_17707C.1
cactactgcacagatcttttatgcaacccaacaggtgagcacgaacaacaatctgtagcaaaatatgctcaaaacatgtccaggattttgttttggaacctgtaacatctaaaaaggcagatggtcccttacatgttgttattaaagactttgctcacaagtgtgatgatgctaccaaaattgcaccctacgcccttgccacctatgccctcggagaatctgaggcaagcactgaatgtgttccaaaaaggtaaactgatacaaaatccaaatcaagtacctacttggacacgaacgggacaggtaacaaccaaccagcacccaacaatatatgagggcattggactaattaacccttcaagccgggtgaaatacaat

SEQ ID NO: 51710 - DNA, 377 bp, Glycine max
  Clone ID: PAT_MRT3847_17708C.1
gcaagctcggcgttgctgattacggtcaacgcgcgttgaagagtcacgtggggtagtgcgacctcttctggttgctggctgaatgactcgatccgctggttcgttcggctgtggcgagcggtttcaagtcagttaaaggcggatatgcggttatcctcagaatcatgtgataacgtacgaatgatcatgtgagcaaatagccagcatatggccaggaaccgcagaaaggctgcgatgttttcgaaagtccatatgcttttggtgcctgaccagactcacattgacctaaatggagttgagacttggaaatcctcgagagtctatccggtatccacgcgcattgatgtgctggccaaatcgtatgaccatggtaatag

SEQ ID NO: 51711 - DNA, 648 bp, Glycine max
  Clone ID: PAT_MRT3847_17709C.1
aaaaaaatgaattcaaaccggaaaagtgtacgatttacattcatgggtcgatcaagtacaatttcaatcctctccgctcgatgccctcaaaacacacaaacgaaaaaaaaaaaaaaaactccagacatccttagccgggggggttaagtcgttcccttttcttctatgatacccactttgattctttcatatttaatagaaggcataagaagacgtgggatacaatgttgttgtccaggatataacaattttcttgcaaggatctataaaccctttgagttcattctctactgctgaacctggacaactcaaaacagtgccagcctttgtttcagggagatgcctggcagcaattaagggtttttatgctctctttgaagttgagcctctaactcggcaattctttgcaaggatgcatgttcaatgcaagcacggcgcttacattcttcctctagtgaactagtaaattggtatctcagctctgccatttcctgaactaaatcctctgcttcttctttggccctcaacttttcctctcttaattcttccttaagtttcttgataagacattcatattcttggatctgttgtgacatttccatcttcccttttaaatctgcagctagtaataggatcattgccaatctt

SEQ ID NO: 51712 - DNA, 230 bp, Glycine max
  unsure (1)..(230): unsure at all n locations
  Clone ID: PAT_MRT3847_1770C.1
cgctcgatcggctgggagaagacgacagaangggatctcatttaaaatcaaggcggctaattcccagactcaacaagcttcgaaccaaatcttattgagaaaatgtctggtcgtggaaagggtggaaagggtttgggaaagggaggggcccataggccctctctggttcttcgggactacatccatgggatatctaaacctgccctttgcggtttatgccgcagcgctcg

SEQ ID NO: 51713 - DNA, 330 bp, Glycine max
  Clone ID: PAT_MRT3847_17710C.1
cccatgcgtccgaggacaggaatttggtatgatgggggctttatttaaatatgagggagtggtatcgaaagggcaagaaatggaaggcagggagagagtctcctgatctcagttacactccttatagatcttcctcaccacaggtgagtgatagacttctatcctctgacttcagggcaaaatcattgcaggagaagacaagagggacttctatgcagaatggaggaaaagatactatgcctttgaggggaaaccatatgcttttaagaggtgaagaaaccgaatcagactcctctgaacagttgggtgatgatgatgataacactcctt

SEQ ID NO: 51714 - DNA, 271 bp, Glycine max
  Clone ID: PAT_MRT3847_17711C.1
gatcgacgctaagcatgtactgccccatacaagatcactccattctatatgattcaacttatttaaaccacatgatatttaaactatctttatctgtggatatctaaaaacagttttttctcattcgcttcagaaaaaccgagatcagtcaggtgcacagagtcaaatggggggtaatggaaacactaactgagcctatgggtgactgataaatctgacaaggataaaagatcattctgaacttatcttgcttacaccattgtatatgtga

SEQ ID NO: 51715 - DNA, 331 bp, Glycine max
  Clone ID: PAT_MRT3847_17712C.1
gggaacccaattcattttatttccttatcttcttcgggaagggttcatagataagttttttccactgagccctgtttccaaattaaaaccctttttccgatagtttcttgaaaggtttatttaaaagtggccatcagtatggagcccaaatagcagttttatggccctagactcagccacatttaactgggattcaaccttggaaaagacttttggcagccccttttttgagcgaatttgaaaaacctggtcaaatacccattcccaaagcattttacacaaaatttttatcaagccccccaatttaacaggggaaaaaaatcctcgagcc

SEQ ID NO: 51716 - DNA, 393 bp, Glycine max
  Clone ID: PAT_MRT3847_17713C.1
tatattcactcgctggcattggcacatcaggaaaggatgttggacattagcaactgaggcattgcagctgatgccgtatcacagcgagctgattatgttgacaaagatgatctacatgatagcctctaggatcactgctcagctgaagactaggcggattctgctaaggataaatagttcgcgctgattatgcatctgaaacaacgtgttgtggacgaaccacaacaaaaaactgagggggacaggtgaggaggtgagcgcatgtctgagtataataggcatgccgggaaatgtatggcaaagagagctcattaatggcacaagaaggaatcttatgaaagactgcaggagcaaacacctcgggatgcaaagtgaatattactagcgttaatc

SEQ ID NO: 51717 - DNA, 895 bp, Glycine max
  Clone ID: PAT_MRT3847_17714C.1
ataaattgggatgaaattacttaacgacatcataaactttacgtgtggaactgaaagaaaggctaaaaaaattatagagcttttcacattagaatagaaaaccatagaagtaaatataatttattcaaaccaagaggaacaggcaaatgaccatagtaatttgaaccctcctggaaccatcatcctcaatacatacataacataacccatagaattctcgtatcctccgcttggcatgcatgcatgctgacatggagccaaatcagcagggcttatatatatatatatatatatatatatatatatatatatacgtaaagccatacccaaagacttaccattacaataataacattaataataaataaaataaaaatgcaagaaacttcatctacttcaataataccgtatccatgggcttaagcttcagtcttctcaacagaaacttgttctgttttggtttcctcaacggtttcagctggtttgttctcctcttgcttctgttcctccactggtgctgattcggtttctttagtttcctctttcacttcttcttcttctgttctctcaggtgctgggttctcttctacctcaggcttcacttcctctgtcacttctgttgcctcattagtctcaactggggcttcttcttcctcttttgcttctttggtggtttcttcctttggttcttcggtggtagtaacctgggtagctggttgttctggggtagtttcctcaatcttggttacctcggttgcttcattttctgtcacagttgttggtgtttgttgtgcaacctcaacagtggccatttggaatgcaaagaggaaaagtaataaaagaaatgaaattgaagaaacaagtatgaacaggaaaggaaagctaagctcgagcc

SEQ ID NO: 51718 - DNA, 232 bp, Glycine max
  Clone ID: PAT_MRT3847_17715C.1
ctcgagccgattagactaaccgctccgcaccgatcggctcgaggttataatttttaccaataaccgagtcacagcgaaaagctcatgcacgagatgttaccaatagcagcagaagggggccatgccatcgtaggaaatgaggtattggcgacagatgtgagcaatgaacgcactggtcttgaagtctctgagcagcgtgggttggaagcagggcctgctcatgtagtgaatg

SEQ ID NO: 51719 - DNA, 378 bp, Glycine max
  Clone ID: PAT_MRT3847_17716C.1
ctttcctaaagaaaattggaacctgcctctgttgttaaagtttgtattttttttttgagtggggtggattgagagaactgtgcaagctttggaacttcttcaaagtctggtacttcaatggctactgaagaggttaataaacttcaatcacttcctccttaccctgaggtaattcacatcaatattcagaatcccttttttattttattttttctctccaaaattattaaaccttggaacaattttcctagtaaagttggcagatttcacactgatgtaattgatctgtgcattttccctgacttgggtttcttgttttggtcacccagcttaaaattttagtacttttggaaacaaaagggttggaaaaaaaaaata

SEQ ID NO: 51720 - DNA, 471 bp, Glycine max
  Clone ID: PAT_MRT3847_17717C.1
aaaacctgggtaccaaactttaaaaaaaatccaacccaaggaaaaacccaagttttttggggggaaacccaaaaggggaaacgagggcccacaaacccccccaggggaagggggaaaaaaaaggaaaaaaaaggacaacaaactaaacttgggccccccttacgagggaaaaccccccacaagaaaaacgacccccaaaaaagggggggggggaaagcccttgggcaaaacttaaaaaccaaaaaagccaagcccggaagccctccccttccaaaagggccaaaagccccgaaaaaaggggggtcccggaaacaaaattccgggtcccgaaccgggggcccccaaaaaatcggccaacccggggggggccccaaaacaaaggcccccaaaggccgggggaggggaaaaggttcaaaaaacccttttccgcaagttggccccaggggggccgggcaaaaccatttgggggcc

SEQ ID NO: 51721 - DNA, 274 bp, Glycine max
  Clone ID: PAT_MRT3847_17718C.1
gaaattgggtttttaaggttaaaaagtaaatatctaacggggggctcaacccccgacactgacaaccattttctggccccggggtcggacccctggggccaccccatcatttcgcggccggtccccgcaggcctaccaactttccctatagaaggggggtttaaagccaaacctgatcaccggccccagcagctccccgcgccgaaacggtaacgcggtaaccttttcacacaccatacccagccggaagcccaaaatggaaagcctggggggc

SEQ ID NO: 51722 - DNA, 388 bp, Glycine max
  unsure (1)..(388): unsure at all n locations
  Clone ID: PAT_MRT3847_17719C.1
acgagtagtaacgcggaaaatttttttgtgaaccatttcaattttttgtttcaaataaaaggttgatttgatgttgttaggttcaagacaacatgctcaacctttatacttattattaccaagatggcaaaacaccnnnagcggattatttttagnngnnnnntctntntttttttnttttttttnnnccccccccccccccccccccctccttaaagaaaacaagggcacaaattaaacatgacaaactattagagattcttttaatattccaaattattaaagagctctatctatcttattattactttggttaaattatttggttggaactaattaattgcctttataaaaaccccttacatgagtagacttactttgggggatt

SEQ ID NO: 51723 - DNA, 118 bp, Glycine max
  Clone ID: PAT_MRT3847_1771C.1
acgcacacacgtacatacacgaccacacagatactactacacgtatctcatgacacacgcgcacacacacacgcatagtcacatatacgcgcatatcacacacgcacgagacacgcac

SEQ ID NO: 51724 - DNA, 195 bp, Glycine max
  Clone ID: PAT_MRT3847_17720C.1
aatacactgattttcacaacatattagtatatatttatatgcatacaatgatgcacacacacgacgagcgcgttctcatgctgaatgcttcaagagctattatctgatactccgtacaattcatctctaacttgtactgcctttcccctctgacgaacacttaattacttatgatctcattggcagtcctgctag

SEQ ID NO: 51725 - DNA, 234 bp, Glycine max
  Clone ID: PAT_MRT3847_17721C.1
ggaaaccatgggaccagggtacttaatcttttgcaaaataggcgacaaaaccaagttgtcaaagccacaaaaatcccatccagggttcgccagatgaaacccataaccacggaatcacacaccagcataaaggaaaaatatcgaccaaatcaggtccccaacgcccttatgataagtacctcgtcaaagctgggaaggttcaatcacgaacaaactatcgtcttctatgcaaaa

SEQ ID NO: 51726 - DNA, 554 bp, Glycine max
  Clone ID: PAT_MRT3847_17722C.1
atcccaacgcataaaaaatgatttgttttgtgttcgggggggaaaaaataaactatagaaaaactcaaaaaaaaaacaaaattgttaaaaaaaaacccaaaaccaaaaaccgagcttacttacccgggcaaaagaccgcaatccccttccaaagggcgacccaaaaacacatgtggggccggggatttacaacggggggacaggaaaaaccctggcgcccccaaaactaaggggggggaaggaaattcccccctccccggggggggaaaaggggggaaggccccaaccgctcccccttccaaaaaaacccccaacctgaatggggaaagggaccccccctgtgcccccaaaataaccccgaggggggggggggctactcagaggaggaccccacacctgggcagggcccaaacaccccctccttgaagggatttccctttctttcccgcccaagtggggggccttccccggaaaagcttagaggggggggtacctttaggggccccaaacaggggtgaacggcgcccccaccccaaaaaaatttggtgggggga

SEQ ID NO: 51727 - DNA, 432 bp, Glycine max
  Clone ID: PAT_MRT3847_17723C.1
ttatacatttgcgatattctaaaggttcatattattaagagatgaaggagaaggttttcttcctttggtggtttggaatgactctgaggctttgtttcttgctcggtgccagctgttctgagaagacaacattaagaagaggtttaagggagaccttggccaagcaatcgacaacttctaaatctggggtcatggtgaattcaaacaatcgtgaacagttggtggttgacaatggtattgttgccgtcaccttttcaagacctgagggctacatccttggaatttcatataacggaattgacaatatacttgaagaagaaaaccaagatcaagatagagggtacttggacgtggtctggaatacaccgggaaagcctagtaactttcagagaataccacgggacaattttttcggttatagcagctgacgag

SEQ ID NO: 51728 - DNA, 427 bp, Glycine max
  Clone ID: PAT_MRT3847_17724C.1
ccaacccgtccgaatatagcccaagccctattcaaccaaaccttaacacacacccatttggtgcaggttcaatggttggcctaaaggtgccattttgggttgaagggttttgaatggttgaggggggggcacccatggcacatgcagttttaacgtccggccaggtgacaggtagcctgcccaattgcatcggttacctccagaagggaggaacgccgtcgtcggaatgctgcaacggagggaaaagcctaaaggccgccgccaagaccaccgccaaccgcaaaacgggttgcaactgcctaaggtcggccgccagcaaaatttccggtttaaacgccaacaacgccgcttggttcccggggaattgcggggtttccatcccttacaagatcagtactttaaccaactgcgttacaatcaaggtttg

SEQ ID NO: 51729 - DNA, 356 bp, Glycine max
  unsure (1)..(356): unsure at all n locations
  Clone ID: PAT_MRT3847_17725C.1
nntgnnnaanctgacanagctcggagttntgctngacgnnanccgtgaaggngannaactananaatagnccaacagtngagangncgantnattcanantttncctnncggagagatgacagnagtgtngntcgcttgatgtccatnagagttnanangtgtatnnnantcaaaccantngatcnagangcnttgnccntgttgtntngangcgttngatggcnaatctacgtgagcntggagtttgtagaactttggcggaagngcgcaaactctgtgcaatgnggagntacnctnncctncagacgntcttagcatcnatcgcccctntgacnagtggtcaagnaagtttttn

SEQ ID NO: 51730 - DNA, 601 bp, Glycine max
  Clone ID: PAT_MRT3847_17726C.1
ggatgttgttgtaaatgtcgtcgtcgttgtctttttgggaatacacggtgctcctccttctgcggcccctcttcgccgtagcgttcgttctcttcttaatatccctcggttggtttgtggcgtggaaactggtgctggtgcacgtgccattggtgcaagaggttttcggcctcaagaagaaagctgttcgagtgaagcccccaactggtcgcttttccaaaatctacagcacccttcacgcccaaaaatcaccttccacctcataagatcattaaattgtaaaatatgaagtgacatgttggagatggttagcatgggatcttggacagtagaacacccgttgaaataaatgaagaaattccaagcagcaggcaatcgtttgaattgaaaaggaagcttcagcggctcacttcaaaaacttttatacaccttgtacataacattagaaaactaagccatgaatgctcttacttcatatagtgctctgtataactagattatcaatttcaattggtgatgaattatgatttattcttatgatagtttttggctatatatattgtatgcaggaggtgcaagcacctatataacatgatgctta

SEQ ID NO: 51731 - DNA, 334 bp, Glycine max
  Clone ID: PAT_MRT3847_17727C.1
cgaaaccttgcgctgaatttttccttgtttctctaaccggctcacatatttgtgtatactaacgtacatcttagggatgcgtcatatgactacgctgggtatacggaccctggtacgagtatatagactgacgagcataattcataatgtacataaaattgccgctccaaacatggaaattttctttgccttgataaagacgacgaaggatgtccccgttcgctgctgtctggtgaaattgacatgatactaagatgattgttggataaagggcagctgcaaggagtactatgcggaacccactgttccaaccagaagactctgtcgattctgg

SEQ ID NO: 51732 - DNA, 316 bp, Glycine max
  Clone ID: PAT_MRT3847_17728C.1
ttccaaaggatatttcccagatggtggccaactgttatcaattccaacgcttctgtttttgacgccgatgaacaggaggaatacaagacggaggcttatagagtggttcgagcaattaccaacagtagattgggcggaaatgacaacatggagagtgatataattcaacctgaaatggagatggttagccggggcctagaaaaacacttgaaaccggaacaaagagaacaacttatgtttctctttggtaaagtttgtggcgaggacagtcacaggattgcaagagaagcccttgggttgatgcattctcaaaaat

SEQ ID NO: 51733 - DNA, 403 bp, Glycine max
  Clone ID: PAT_MRT3847_17729C.1
acgagattggccacctgaccctccaccacgcgaacacgacagacttctttgtatcttctttccgtcaaatttcccaaatttactttccgggtatggctcctcactctcccttttcattaatttttactatctcaccattattaattaatatatacaaaaccccttttgttacgtttcgtcaaattgccaataaaaaaccctagctttgctcgtactggaatattcccaattttcagctccacaattagctcgcgcacgcgtttctggagttggggaagagcaaaatagcaatcggagcgcgcattaaatttgatttcgtagattattgctattgcgtattcagcctcatgtagagtatatagcttggatttgatgttaaagtttagatttttggtcgattcaa

SEQ ID NO: 51734 - DNA, 725 bp, Glycine max
  Clone ID: PAT_MRT3847_1772C.1
cctgttcctttggctcgccctccttttcctgttctctcagcctttgtagttcctgctccttttctctctgttgttctaactctttctcttgctgtcttgccctctccatttccctctgcttttcctgctctttctcaagctcccgctctttctctttttcaagttctctctcccgctccttctctctctccctttctctaagttcctctggagatggctgcttttctatgatcccgagcttctcatccagctgcttcaatttctctgcgcacgctgccttcctctgttcctccatccttcgctcttcctcctcacggcgtttacgagcacgctctactgctgcagatatttcagactgttgttttcgtctttgcttccatatttcatcgttatcaggtactggaggcttggagggaaaggggccttgtcttccaggtatttgtcgatctggaggtgggggatgctgttgtgcaagcaacttgggaggtggtggcaagtgtgaagatgggccacgttcctgattaaatggtggtcccttcccataaggactttttgtgactggaggctgagcaggtatctgagaagatgatttagtgctggaagcttcatctacttcttttcggttttctgtgctttcaggggtttttgcagtttgatcctcactgctgctctctttaggactaggacttccttgctcatcatcatcactgaagttcagctgttct

SEQ ID NO: 51735 - DNA, 637 bp, Glycine max
  Clone ID: PAT_MRT3847_17730C.1
tttaaacgacgcgccacacctagctactgcatgctctgaactcttaactctcacgccatatatatatatatatataatgcgccggcggtgcgcatggagataacctacgcatcgccaagtttctcagacctccgcgccgccgctacctcctcctccatgccgtcgtcagcgcgtcccgtcaggatcattcctctccagcacccgaccgccacgacgtcgtcgtcatcgccgccgaacgctgcgttctcgcgctggacggcgaagctccggcgaatgacgtggatggagtggatcgagttcttcctcccttgcctccgctggattcgcatctacaaatggcgcgagtatttccaggtcgatctcatggccggaatcaccgtcggtgtcatgctcgttcctcagtcgatgtcctatgcaaaattggctggacttcaaccgatatatggactctactctggttttgtgcccctatttgtatatgccatatttgggtcttctcgccagcttgcagtaggtccggtggcattggtttctctcttggtctctaatgtgctaggtaacatagctgattcatccactgagttatacacagagctggcatattactggtccttatggttgggataatggagtgcat

SEQ ID NO: 51736 - DNA, 613 bp, Glycine max
  Clone ID: PAT_MRT3847_17731C.1
ggctcgagctcgagccgaattcggctcgaggcattgcatcgcatttgatttttaaacgatgcgccactgctagcgcatactctgaactctcaccatatatatataatgcgccggcggtgcgcatggagataacctacgcatcccctagcttctccgacctccgcgccatgccgtcgacggcgaccgccgcgcgtcccgtcaggatcattcccctgcagcacccgaccgccacgacgtcgtcgccgcagccgaacgccgccttctcgcgctggacggcgaagctccggcgaatgacgtggctggagtggattgaattcttcctcccttgcctccgctggattcgcatctacaactggcgcgagtatttccaggtcgatctcatggccggaatcaccgtcggcgtcatgctcgttcctcagtcgatgtcgtatgcgaaattggctggacttcaaccgatatatggactctactctggttttgtgcccctatttgtatatgccatatttgggtcttctcgccagcttgcagtatgtccagtggcattggattctctcttggtctctatgtgctgggtagcatagctgattcattcactgaattatacacagagctg

SEQ ID NO: 51737 - DNA, 273 bp, Glycine max
  Clone ID: PAT_MRT3847_17732C.1
tttagaatggctcccaagggtttaacctttctggctgtgttaatatgcgtttcatacctgtcactgtgtccttatggcgcggaggaagggcataataatggccttgttatgaacttttgcaatgaatcatgccctcatgctgaagacattatctcagatcaagtcaagcttctctacaagctccacatgaacactgcttttttctggctcagaaacatcttacatgactgttctgttcacagttgtgatgcttcactgttgctggacctcaca

SEQ ID NO: 51738 - DNA, 512 bp, Glycine max
  Clone ID: PAT_MRT3847_17733C.1
gaaaaaaggaaaccaaataaagctttaaaaaaaaagggtccttttttaaaaaaatattccaagtcctaggggggggatttttttttggggaaaggccaaaaaaagtgctaactgttaaaaaaaaaattttttggggttgggttaaaaaaacggttattttttttttccaaccccaggattttttgaaaaaaaggggggggcatcggtttgttttaaaggaccatcaacctaaaattttggggggaaatttggtttaaccaaaaaaaggcccccataggcaaccaaatttgcagaagcccaaaaaaaagttttttttcccttattcctatggtaccccccacccaaaataaaagccccctttttaaaggcctttttaattggggttagggacaatttggccccccaaaacttggggaattgggttaccatccttggttaaataaaggaaatataaaaaatgcccttttctttaaatgactggcccttgtaaacccccaatgcttgagggtcaa

SEQ ID NO: 51739 - DNA, 829 bp, Glycine max
  Clone ID: PAT_MRT3847_17734C.1
ctacaacactgaacttactacatcttgtttagcaaaccaaattcatatagtccctcgaacaaatgtcacttgattttgcttggcaaaagaaccatgtaggccgcaatgaataaggctaagactaggaaaatctggggaaaaaaaattcaaattgtcacaacctcgaatgatttgtcaattcagtctatcactttcaagccaaagtgttcctttacaatatcattggatgtcctgccaaaaccattggcaacttttttcatgatttcaaattttgccacctcccgtcttatctgtttctttctttctcttacagcactagacgagacatctgaggtagatgagttttgacaagccaattcatacttctcacagtccagttgctgatacaaattttttaagtaagtcttttggtcttgaagtgtttcttccgccaccttatattcaagctcctgtgactttctaagagcctggagaacctgatcaacctcagactcaagttttaatgaacgaggtagaaaatcataagattccaaccctgtcctaacttcaaaagggtcgtcatagaccataacttccatcacatcgttgccgttatctgcagaatgagctataaaactgtcatcttccttccagatatcttcaagattagttccacatttaagctttgagatggccaattcaatacgacacagcagctcctttgcaacaggtttctgtgaaccacgcaggagacaagcaccaagattcaaaatcttcttccgaatttcatcatccaaatcagcccacgcgtccgcccacgcgtccgcccacgcgtccgcccacgcgtccg

SEQ ID NO: 51740 - DNA, 233 bp, Glycine max
  Clone ID: PAT_MRT3847_17735C.1
atcgccctaacagcattgcacacatgacaatgcagaggcaaccccatcaggtatatttacaacgataccaaagaaaactcacagttccaggcacgatcctaagccggaaccaccgaactggatatcaagttgagggaagggaccgtgtttcggaggaactcgagggacagggaatgcttaagaccccccgtggttacggaccctccacgtggagcataccgctcgtgtgggct

SEQ ID NO: 51741 - DNA, 691 bp, Glycine max
  Clone ID: PAT_MRT3847_17736C.1
tagagcatttgttcggtccaaaaccctaatcagcgttgcttccaatcgcatctcgtcttcaggaccaacatcgttgaatccatggcaacccctttacttgtataggcagaagcaacaagaagcttcccactcctccagctgcaacagcggcaacaccccattcgggtcaccagctcgagtccagaagctaatagcctcccaatcagaccctcttctggccaaagaaatcttcgacttagcctctcgccaacccaagttccgccacacttactccagctacctcatcctccttctcaagttgggtcgctccaaacacttctctctcctcgacgatctcctccgtcgcctcaaattcgattctcaccccatcactcccaccctcttcacttaccttatcaaagtctacgccgaggccgatttgcccgacaaagccctcaattccttctacaccattctccacttcaattgcaagcctctccccaaacaccttaaccgcattctcgaggttctcgtttcccaccgcaacttcattcgtcccgcgttctatctcttcaaggatgctcacaggtacggcgtggaacccgacaccaagtcctacaacattctcatgcgcgccttctgtctcaacggggacattagcgttgcctattctctgttcaacaaaatgtttaagagcttagtaaaatgtctg

SEQ ID NO: 51742 - DNA, 216 bp, Glycine max
  Clone ID: PAT_MRT3847_17737C.1
tttttattggaaaaaaaaattggtttaaaacctccaaaagaccaaattcaacccttactggtgttacccaacaaagagcgactccctgtgtccaatttctatgtgcacattgaggggaaaaactgtgtgagcccggtatttgggcgctctgtagggtttttatgcgtttttatactaactagcgcttttcaaacaaaaaagagggggtcatgtgtt

SEQ ID NO: 51743 - DNA, 546 bp, Glycine max
  Clone ID: PAT_MRT3847_17738C.1
tttttaagctgtccggtgtaaacatgggacacgtgcttggctcgtgttcaaatgatgcatacactagacactgcggggaaagtttacgacacttcgcagctaccttacacccggtcagcttctctgcttctcgaccgccttcggcgcctctctgtgggtgacattcatcggcggcatcataatttactcaaatctgtcaagctatcacctaggacacccgcgaagcaagatgttttcggcgtatttctctgatgagtgaggtgtctagatgcgcgcgtatacactctcttgattagctgccttatcccgaggaaaactgccttcatcactgatagatgccaaccagggtactggctccattacttagcgtgcaatcgtaccgacatgtatgcctctacaccccagacccttgagatgatgaagctgatgcattatgtggagagaggggatcatatctgggaagactctttgtggccaaatcatgtagaaagtgcagagtcaaacccagatcttgcagccatgaataacatatttggtatgactcat

SEQ ID NO: 51744 - DNA, 302 bp, Glycine max
  Clone ID: PAT_MRT3847_17739C.1
gatacccaccagtctgaactaacttttcgggcgtggctacattaattctaactttgacatccaggaaactatcctgtctggaaaatgccaaggtgcaacccggaaggagatttcccggaagcactgtcaccgcattcgctgacacctgagaggggctgagcggacctccatctgaggagctgcacctgagaagagccttgtgtttcatacacaacaaaggctgccctgagtgaccacctcagctccgcgatgacgcctgatttcccaacccagagacttccgtgcagaccatgcaccagtac

SEQ ID NO: 51745 - DNA, 424 bp, Glycine max
  Clone ID: PAT_MRT3847_1773C.1
ccagatgacaaccgacggccagacatctgatataaattatacctttcacccaactcaaactttgcttatctattggttattttaatacgggacattggaacactcaatctaattaaattgttaaacataatatttagaatcatatcaagatatttatccccttttataaactaatgtgaaatacttgacaacggattaaatactaattattatgagtacattacttgatttattcatgcaacttttcaatacctcccataatattcttactataataagttctttgctggagcataaataatccttaattatctattttgtactatgagatatagctatattgcacataaatattaatctagacacaactgtttgtacttccatcacatttataaaaatcatattataaaccttgctcaatccc

SEQ ID NO: 51746 - DNA, 429 bp, Glycine max
  unsure (1)..(429): unsure at all n locations
  Clone ID: PAT_MRT3847_17740C.1
agtagggcggtttcccaattttttttttttttttctcaacttttttttttagttctgatttgatctcttcccggaaaatgtccccaacaccttttaaaatagacgtacaacgggggcacatgcgtaagggaaacaccancgtttttccatgtgggtgggtcaggaagttggccacccccccagaaaacgcaaaagaaaaaaaccccccnaaggggggggggggggggggaaaaaaatttttccctccctgcctaacagggggggggcccaccaaaattttcaggggggggggaggcacccaccgaaaagggggaataacaccccccgcgaggggcgaaaaaaaagctaatggccctggccatgtccctaaaaaacagagaatttggggaaagagcaaaaaaagcggggtaggacgggccaaaccgaaca

SEQ ID NO: 51747 - DNA, 553 bp, Glycine max
  Clone ID: PAT_MRT3847_17741C.1
aagtagagaaaaatcagtaacattacatcaagagtaattttgataggctaagttctcaatattttcatattttgaatttaacttctataatattggtttttctcatcttatctgtttttaattaattaatttaaatttatgtttaatttcttctcttgtttattttaatttaagtttctggaaagttaagttactgttcttctacaatctttttcaaatctttttatttaaatattcatctacttaaatgtaaataaagttcatatggattcgacacttgattttctgtttaaactttatcaaccatgaaaatttaatacacttgtcaagtgacagcggtgtaagtgacctaaaacggtaacagcgacagcaaaattagagttgcacaatgaactaagaaagggatggactttggaaagtttaaacaaaatgaaacaacgagtgagaactgaaaacatgctacaaatttaaatatataaaattgttgacattggttttataaaaaactattgttaacattagcctctagcgacattgatttttttaaaaatca

SEQ ID NO: 51748 - DNA, 482 bp, Glycine max
  Clone ID: PAT_MRT3847_17742C.1
aagaaaataaacttagttgtcattagttacaaatataacttaactttttatttatttattagaaagtgcttcttaacgctcatcacgatttatggtttatgaaaagatccgaaaatagttttgcattctttgtggttcaaatttcttaaccttggcgataagatcaaaacattacttgggatgtataaatttgtcatcaattactttacaagtttgttgtccccagatcgagcttaccgaatataagggccctatacaaaaggacatgattaatgttataggacagaagtgagagtcacatccttaattaatcttatagcacatactccatcttattactacggcatttagctaagtccaaaataaatattcttctggaatattaaaacggaaattagtagatcaaaacgggaattattatcatctataaaaaaaaataggagtttgagatcgaattaacatctatttagtaatagtattta

SEQ ID NO: 51749 - DNA, 775 bp, Glycine max
  Clone ID: PAT_MRT3847_17743C.1
acggctgcgagaagacgacagaaggggagcccaattgaatcaacgaatccaatcatcatcatcacatcacgacgacgacgacgacgcatgattctggtctttctctgctccaaaaaaactgaatcccaatcgcgaagaaaagaatccctcgcttggatcttgcaacatcgccagagggatccatgatactcctgcagtctcattcaagattcctgctccagaccttgttgaatcgggcccaaaatctcgagaaaggagttgaactggatcaccactgggttgagtttgatgatgttcgatatcatattcaggtgtcaatgaagaatcctcatgttttgttgctatcagtatcgttgcctactccttcttcagaaactatttttgtctgtggacttccttttggagccattgaagcaatcaaagctgcatatggtaatcttgtgcaaattcttgatcctccaagggatggctttaatctcacattaaaaataaatctgtctaagcttccagcaaatcaagggcaaagccacgggtttttcgagagcaaaaacatgcttttttaggtaaaagttgcatcaatattgggaggatgtccttggtgcaccattgagagtaattttagaacatcttgctgccagaactgttgctccagacctgggcccaccgggtccccctgtccttcgccccaggctgtcttgctttctgtttcctcaggctgataaggtgactgtagtgtatcctatgagattcaacgattcaatagacattgttctcg

SEQ ID NO: 51750 - DNA, 548 bp, Glycine max
  unsure (1)..(548): unsure at all n locations
  Clone ID: PAT_MRT3847_17744C.1
tttaatggcctttggatataccaatgctaacacctatgccagataagttttattttctggctctgttatgcttcaatgactacaaatactaacagtttgaaactttgaatatactatttcatatgggatttgtgctggtgaaagaattctatattttgtttgttttttagaaatgttaaagcagccaaattcacaattaatcttaaattatgtgttctgtttgttttcttataatgagactttgtgctggtgtgagaattttgtcacagccttatgcccctaatttttaagcagatagccatgcgtatttatttttaagcaattctaacttttaagccaaagagtaattttatattagagaatatacaatgttgcattaatagttgctaactaaacaaatttaagacaaaacaaatgttgnggattaataataacttttatattgtaaatgaagtttagaaatgatgaatgaagataaaaaaaattggaatgaaatgactaagacgctgataaagattaatagaaaactagaggaaatgtttaacata

SEQ ID NO: 51751 - DNA, 998 bp, Glycine max
  Clone ID: PAT_MRT3847_17745C.1
gtcaagaaagcacctgatagagaaaagggattgtgctaatcaattcggctcgagtgccatggcaataaacagcaatgttcttgcagaaatagatatcccagaaacatatatagataatcttcccaagctgaaattctattgccaagtgattgaggattcctttaaatgtgaccccataaagcaaatgtcttggaatttttcatcaaatttcataagccttttatggaagccaataatagcagctgagtcttgtagaaaacgagatgatatagtttcaattaagagtggaagatcaagtgtaggggactcaatttaccactacatgcataccgcagacaagttctcacctgaacaacttcttgactgtctcaaaataagttctgaacatgaagcacttgagctagcagacagggttgaatcgtcgatgtacacgtggagacgcaaagcttgtctgagccattcaaagtcatcatggagcaaagtaaaagatctcattgaagacacagactgtaaggacaaaaactacaccttagccgagagagctgagtccttattgctttgcctgaagcaaagatatcctgaactttcacaaacttctttggacacatgcaagatccaatacaaccgggatgtggggaaagcagtactagagagttattcaagagttttggaaggcctagcattcaacattgttgcatggattgaagatgttctttatgtagataaatcaatgaggaaccgagatgtctagaaacctcaacttggtaatcgcatcctaacagtgttgctttccatccaacaatctttcttaaactatatctttagtagaatgaagacagatagtacatgattgtacgaaaaagatattaacttgcatctgtgtgaatcatagttgttaaatgtgctaaacagtaaagacagaaagacagttttcacattctttaagcaagattttgagcagcttcacctaagtttaaataaaattggtggggaatgag

SEQ ID NO: 51752 - DNA, 292 bp, Glycine max
  Clone ID: PAT_MRT3847_17746C.1
ggaattctgctcgagattaaaacaaatggccaataaagccaaacagacactgagtcttttgttggtgtaaattcctttacacatttcataatgtcttctatgatattggtttacttttgggaattgaaacctttacagaaaactatcagtttcactaagattttaccatgaaattatatattagatcatcttcatttatttaataaagtgttaaacacaaagttatttctaattttatttgggttttctatgttttaaaaattaagactgtgtattctttccccgacaaaat

SEQ ID NO: 51753 - DNA, 377 bp, Glycine max
  unsure (1)..(377): unsure at all n locations
  Clone ID: PAT_MRT3847_17747C.1
cggagcgggaggtgagcgtccggcgcaggtctggaccctttgccctggaggaggcggagttccggcagcctgcagtgctggtcctgcaggtctgggactatgaccgcatctctgccaatgacttccttggtattacaatgcttagccttccccaccctcagcccctgccttcagccctcacctncgcccctgcctncagccctcacttncgtcccccagttccctactctgacccaaccttgaatcttgngattntggacccgaggtgtgaacctttgtttctggctaatactgagtaattaggctagacacagaacctcattccaccagagtcttgttcaacttgattgccctacttgcaccctgcactgactcac

SEQ ID NO: 51754 - DNA, 255 bp, Glycine max
  unsure (1)..(255): unsure at all n locations
  Clone ID: PAT_MRT3847_17748C.1
gacagtttcaccatcagtttcttccaaaaaatttggctccctctctgcattggatgccaggccaggctccatttcgaaaattatgggagatgagttagaggaaggggaaattgtagtatctggtnttctcacatggatcatcaacagtcaggtagttggattcatgatcgtgatgaaggtgaagatgaacaagttttgcagaaaccaaagattaagcgtaaggtnagtcttcgtgttcgtccccgccatgccatg

SEQ ID NO: 51755 - DNA, 716 bp, Glycine max
  Clone ID: PAT_MRT3847_17749C.1
acggctgcgagaagacgacagaaggggtaaaataaatgctcagcaactataatatcaattccaattatcatgcatcatgcatattttttattttccttaagtaatttgaatttaaatacaaaatatcgaaatatactactttatgtaattctttgactttaatttctatgttgtgaactaataatcgtacatactaaatctctgcctattatctcttttcttttttctcattctgacgatgatactaataaagttaaaaaataatgtacccgcttgatgtatcgctgtaaaaaggatatgtatatatgtatgaaaaatgcatataaagagtaaaaaagaagattgtgagcaattgtgcatgtgtttgattgtttgagaagtagggtaaaattgaattattttgttggcggagaaaattaatgattgaaaagtgaagttgttaggcctatttattactcaacaaaaagttgttagggcctaaacaggttatttgttagaaagtaatagcgcgattaaaattaatgatttatggcaaaagttgaggaaagtttttgttggaattgttaaaaaaaaacctttaggatgcgtttgacaggatttttaattgagaaaaataatttatcaaataatttaattctgtaatctaaaatttattatttttttgaagaaattaaaattttaaaacagagttttaaacaactaaaaatttaaaaatt

SEQ ID NO: 51756 - DNA, 127 bp, Glycine max
  Clone ID: PAT_MRT3847_1774C.1
acagaagactcaggaatcggcatatagtaattccttaggctaaagtccaacaaggaccctgccaataatgccgacgatcagtccgcacaggccttgcctcaagctaggagcgagcatcacaatccca

SEQ ID NO: 51757 - DNA, 424 bp, Glycine max
  Clone ID: PAT_MRT3847_17750C.1
ctttggtctgatttatgtgcttgcatggtcgtgagaagatgatagaccgggatttactaacagtaaaacgattaagccgatagggtcttctactctctcggctcgtcgtactgtttatatccgtagtgttcttaaacggtagtattagtaagacagtcgttgtacgtagtcttagggggcgaattctatgtttcgtcagaagtatactacggagaacacttaaggttgtggtgacgatgacgacgacgacgatgatgataactatacctctaggattacgtggcgaagaactaatcatacaaggaggaatgaaggaaacgatgaagatcaacgagaagaaggatatacgtagaagcgtcgtatagaaacgagtgagtcgagaagttttaaacgttagcgtaaagtgtcgtaggaagacaacgga

SEQ ID NO: 51758 - DNA, 331 bp, Glycine max
  Clone ID: PAT_MRT3847_17751C.1
ggggaccccccaaaacttatttattgactgaagggactaaagacctttttgtttacaagcttgggggatgaaaattgaaatgatctttttttttttagagattaaaacatccccgtaattttttttatggacaaatttgaatattttacctaaacttttaaaggttaaagttattctatttaagcttttcgaggggactgggtccattataattccaattgaaagctggcattgttttttcgttctccagcacagggcttattgggtgtaaaaaatttttcatactttggatggaccgatcctagctctggaatttattgtgcgagataaa

SEQ ID NO: 51759 - DNA, 476 bp, Glycine max
  unsure (1)..(476): unsure at all n locations
  Clone ID: PAT_MRT3847_17752C.1
ctctaccattccctcaaaagtcttaaacccaatttccatttctacaaaccctatctctcttcttacctaatatatacaaatatctcaccaattaagttttccaaccttcctcaagtatatatctctatacaaacactttgggagcaaagtatagctatgagattgtagattactatataatcataaagaaccatttcaagtttgaattcattcattttattcttttctcaattcatcaacaatgacccttatgaaaaccctatggaaatcaatcttccccggttgttacaagggtgaatatccctctccaaagccaaagaaagtggtggctacaaagccaaattcttcacacagaatttctgtgacggatttgagttatccaagcacgactctttcggaggatctgtcaatttctctagcgggaaccaacctncatgttttctcactcgctgagctcaagattattactcaacaat

SEQ ID NO: 51760 - DNA, 427 bp, Glycine max
  Clone ID: PAT_MRT3847_17753C.1
acttacctatctgaaacacttaatctaacgctcaatgtaaccgctggcggaggcgcttctgaagaacctgtaatctcctacaacatcaacttagctaagctaccccttacatctctaacacatttaccattgtatgcaacaccaccttacaacttacaactttaatatccaagtcaacactcacttatatataaccaccaactcctaatgtttgacaatccaaatatacctacaacaggttaacaacatgtcatataacaaaacctatacttcacctatatcccatcgtaataactccccagaacctgatttgcaatggaaaccataaccacttcctattaacctgcttgctaaaccacaaccttcaaattgtcacaactctcttgaattccaacccttctctcttgcaccaaacaactctatacca

SEQ ID NO: 51761 - DNA, 470 bp, Glycine max
  Clone ID: PAT_MRT3847_17754C.1
ttccaatgcaggttttccggatcatcactgtatgatgatctgtccgatcgttggccggtctgttgggcggtatagaccgagagaagaagaaggaagacgcatgagacggcaggctaagagagtgtaacaagtcgtacaaaccgtaataactaaagaatttgccaaatggtgaccctgcgaaattagtggacctcttataacagcttggaaaaaatgaggaacatgtagtaaccatggctctgcttagattcgaatgtttacttgagatagcctaaagttggagttttggacgttctagaattacagattttgagggacgcttgagagagaagtgaagttactgtggtatggcatataggaaccacacagttatgatatttagaccccaattattgtgggtatccttaggcgtagtgccaagccctttgccgcaatccccttgcacgagcaatcatgggccaacatttagg

SEQ ID NO: 51762 - DNA, 428 bp, Glycine max
  Clone ID: PAT_MRT3847_17755C.1
attagagttactgattgactgaactaaaatttaatcggattcaagttggtgctcaatatcttgaaatcatagatgaaaatactaaagtcttgaattttgggctgtgtaaaaattgctaatgacaattattgtaactgaactcagttttatatgtatagcttgatagattgatcagattttggtttcataataaacaatctactacaattataacatttcatatactggcaatagagaacagagaacacggatgaaatcttgaaagacctgtgtgagagaacatttactgcaacaaaatgaaaggcagaacaatctcagagagcagggaacagtgagagaatgaactgaacagaattagttgaacagaatgtccgagatagtgccaggaaacagagcaggtgtggggacacccgccaggtgctggaaaa

SEQ ID NO: 51763 - DNA, 449 bp, Glycine max
  Clone ID: PAT_MRT3847_17756C.1
atactcactaagtcaattcttgcaagaggtatccgagctgagctatgcttgagattacatgcctagaacgctaatgagtcccctcgttccgcatgctgatgccgctcaaagaacttgtcggcgacctggccatgtcgttaagcactcattgcagcaggacaacctctattgcaactcagggatactgccaataactgtcgctgcgctgataaacgagatccagatgattccgtagaacatatcgacaacgcagaggtcctagcaactggaccccttctacctcctttgcatcaccgatgacgatgatcatggccttagtcatcattaaaatgtgcgcctacagaaccactccagagttgctccatacgacaggaatgcatgtcttccagagatagagtgttgagctacttctctagccatctgagagggttgttggagattagtgatct

SEQ ID NO: 51764 - DNA, 528 bp, Glycine max
  Clone ID: PAT_MRT3847_17757C.1
acgagtatgcttcttagggtttcttcttctttaccctcttaaaactttaacccctatctattccttccttctacctcaagcccctccttctttctctttctctttcttttcaaacccttccggattcctctcacctctctacaaaaccccgctatttgagctcaactcacgacaactacaagtgggcttccttcaaaattcaatctttcggtttctcgccagtagggacagtgagtggggtgtggggggttcggttcgctttggttttatcttatctggtccttttaccagcgtttcctgtttaacattttttttggagccattcgctgcaatttttctttttctcaatgaaagagagtttctttctttctctctctcttcccttttattttttattctctgagctggttccacggtagagaagaagaagaagaagaaacaaccgctaactgtggttgcactaaaatatactcactctttttctctgactccattacatactctacgctttaactctgacccacctaa

SEQ ID NO: 51765 - DNA, 362 bp, Glycine max
  Clone ID: PAT_MRT3847_17758C.1
gtcgaccacgcgtccgattaatcttcatatctgtctccgggagagtttctgtgttccggaaacaagggtacatcgtgcgctcatgctccatcaaattgaaatcccaatgcaaatttgtaattacattcctggagtgttctgctttagatcgccttaatgattgcttctgtaatttgaatctgggataacttcctatcaaaggatgcctctaagcttatagctgcaaacatgtctgatcggataaaaaactctccatcagtttcgagactgacatactcgattatcttgtaaaatcattcgacactgattgctcctcaccagatcaaaccttattaaccagaaccagtcggactctactatct

SEQ ID NO: 51766 - DNA, 244 bp, Glycine max
  Clone ID: PAT_MRT3847_17759C.1
cggctcgagccagttgctactcgaggacccggtattttcctcttttctttctgcgccatgatgaacactatgtactgcaggctctattgcggtgggtgccactcctgacagcccagacctggactgtggtttgattccatagttccccttcatacccagaacgtgagggtggaatctccgcctttatcccgaaaagggtgagcctgcttgtacatatgcgtcatacctctagttgaggcagcgg

SEQ ID NO: 51767 - DNA, 651 bp, Glycine max
  Clone ID: PAT_MRT3847_1775C.1
ttctctatagcggccgctttttttttttttttttttttttttttttggtgatctgagcgagatgcgtagaaaatttctgagtatttgatctggaaccattggtgtttcttaattaatcaacgaccctttgccatttagtttctaaatggatcttgtgtcatatagattttaagtcagaaattcatgcttaagtttcatcactcatttgagtcagcattcaaatttaccataatatccataccattggcttcatttgtagtttttctcccacttgggatgtatgcttttcatgtttgtgagaaaattgttgttttggctgccgttttcccagctaaattgtatcttttaacttggtctaataaatctgaacttaaacagggtttactccttttgtatttctattgcttggcattggatgcaatgcaaggcctttgtatccacttcccagcaaaggtgatgatggaaataggaagcccctacaaacttttcgcccttataacattgctcatcgcggttcatacggagagcttcctgaggaaactcatcctgcatacttggtgagaagactcttttcactaaacttaaatttttcggatatggaaattgactatataggttttttcatcagatgcaatcatgctacaattatgc

SEQ ID NO: 51768 - DNA, 1005 bp, Glycine max
  Clone ID: PAT_MRT3847_17760C.1
gaaggagaatggatctggagtaacattgcatttggcagtgcaagtttaataatgcaaaatgtagactgtctaattatttttctttgtttgcattcaacaaggaatcttataaactatgatagatttaacatttcatttatgcatctttttgctattattgaatagttgaatttatttctcactagaattcatttcaaaagagtattgcagatccctggaaccacaacgcctctgtaagccttgcaaacataatgtgcaaaatttgcatagtctttttcaacaggttgattattcaccaccacccatggcacaaatgaaggaggtgggtcaagttgtgcgatttgattaatatatgttttccctagctctgttccatttcccatgttgaagcaattcagaaaaggctccttaggcaaacccaattggtttaaacattcttccttccattccttaatcgttcctttaattgccagaaactcaagcagttaacaaattgatattgtatgtccactttagaccaaagattaagggcacatgattccaatgaatttagctcgcattcatctggtccattctgacatgatatggatttgttggtattattgacgtaagcattggcccaaggcactagctgaagattgacaatgctgatgaggttgttgccaaagatatccctcagatcctcaataatgaattttgcacaagttttgcaaagactatcataatacactgatagattaactttctgatgtgcaagtgatgtattaatgtcagcaccatgaccagcattatgtgaagcagaagcataagatgcaccctgagattcacatatgaagaggaaaaggactaatatcaatgcaatggtgataactagttttggaaaaaccattttgattatattttgtagaaaaactttctactctgtctctgggtgtaaggctgtgaacccacgcgtccgcccacgcgtccgcccacgcgtccgcccacgcgtccgcggacgcgtgg

SEQ ID NO: 51769 - DNA, 331 bp, Glycine max
  Clone ID: PAT_MRT3847_17761C.1
tttttggataacatatgagaaaatttttcaagtttatacctgaatgaggtgagaggagccatatctacacagtaattaacgcgggggaataacatggcttcaaaaatcaaagtttttattccaaggcgtacgatcctgaatgtcgccaatcccttctttgtcgcccgcgaaaacacccccgggcaaagatcctactctttaaaaaagggaactttttttggcataccatcccttaccctgaggataaactcccgacacaagccacttgtcgaggtgatgctctgtctttcacaaaaaatattccttttattccccgcggtcttttataaaa

SEQ ID NO: 51770 - DNA, 386 bp, Glycine max
  Clone ID: PAT_MRT3847_17762C.1
ggcacaagtgagtttgctgatcgagatagcgagaaacagcgtgatgaaaatgaaggtgcttggtttcttcgttgctacaatcatggtagcatggcaatgccatgcgtacgatatggtccctctctgaatgaacactgtctatggtgcccgtactcccgaggtgaaattcccaagttggacgctctctgtggaagcacacaacatctttggctgtaagaccattcctgaagagtgcgttgaagcaacatatgaatacatgcatggcgaacaatatagatcagactccagaacagttaaccagcaggcttactcttatgccatagaccgtcaagtccattccaatgacacatttgagttcagtatagatggcaccgtactgtataata

SEQ ID NO: 51771 - DNA, 511 bp, Glycine max
  Clone ID: PAT_MRT3847_17763C.1
ggggggggttgaaaagaatcgcgctataaatatcattcttgctgtgggacataccttgatcagcttgagcgcctctctctaattaacccgtgtcgggaaactagagcggaaaaaaaaacgaaacactatacgagggttttcacctgacaaaaacataacggaggggagacgtgacgatccataatatgttccgctaactcggagccgaacgaaaaagcatgggatcaggcgaaaccttccacttatgaaactgcggctggtcctggtccttaatccttttgaaccctccttccatggcaacatggaaaggggccggcacacaatcgaacccttgctgcgtgtgagccgaaaccaacctgggaaagtactcaatgacggtctacctgatcatccttacctcctctttagtgcacttctcgaggacgattgtcaccgtgaaggtgccattcttgcccgcgttccggtctatgaaaaccggataactctgcgggtcgaccggaaagaacccctc

SEQ ID NO: 51772 - DNA, 210 bp, Glycine max
  unsure (1)..(210): unsure at all n locations
  Clone ID: PAT_MRT3847_17764C.1
gnaaaaaaaggggggactttgatttcattaaattatgcggttaagaaaagggcggggttgaatttccctcgttatgagaatcaaggtttggtccggttttaattacaaatgtttgggaaaaaaaaaaacctttcaaatttagttgtaaattccgggccaaaagaaaacctttccatatggaggccccgtttttcaaaaaaaggaaccggg

SEQ ID NO: 51773 - DNA, 1372 bp, Glycine max
  Clone ID: PAT_MRT3847_17765C.1
cgcggcacttccttgaacaagaagaggaagtttcaatttgagtgataataaaagtataaaagctccttcattcccttcgcagttcgcagccaatcaaatccattgttttctcttctcctcctccttcaatggattctctgacttccatcaacggcgatttcggcttcgccggcggcaccgatcgcagattcgcgttttcgcgccaagcctccttccaacagcctcacacgccgatagacattccggcgcacggccaccactactggtccgcgcgtgacgataaaccctcctccgcctcgctccaaagatcctctctgtcctccttcgttttctccgttttccgaaacgttaggtccggccacaggtacatgaagaggctctttctcttgatctcgctcaatgtcgcgtactccaccgcctaatggctcactggactcttcaccggtcgcgtaggtttggtgtctgatgcggttcacttgacttttggttgtggtcttcttacattttcgttatttgttatggctgcgtctaggaagaaagccgatagagagtatacttatgggtataaaaggctagaagtcttgtctgcatttacaaatgccctgtttcttttgtttatgtcattctccctagcagttgaggcacttcatgcattcatacaagatgaatcagagcacaagcattacttgattgtttctgcagtgaccaatttatttgtgaatcttgttggtgtatggttcttcagaaactatgctcggattaatctcacttacagaaatgcagaagatatgaataatcactctgttttcctgcatgttgttgcagattccattcgcagtgcaggtctgatattggcatcctggttattgtcaattggggttcagaatgcacaagtcttgtgtttaggacttgtttctgttgcagtttttatgcttgttctgcctctctttagggcaactggtggtatcttgctccaaatggcacctcccagcatcccaactactgcattgaacaaatgcttgagacagatttctgctcgggaagatgtaatggaagtctcccaggctcgtttttgggaattagtgcctggttatgtgtttggttcacttataatacaggtaaagaaagggacgaacgatcggccaatactagaatttgtgcatggtctataccatgatttgggtgtacaggacctcacggtgcaaactgatgatgcatgagactatcttaacacttttatgctaatagttattaccaaggattgtatacgcattaatgtcattgtttattactggtggaatagatggttaacgtgatttctcatttaaaaaggattattgatttttaaccggcatcgtttttcctgccaaaa

SEQ ID NO: 51774 - DNA, 2187 bp, Glycine max
  Clone ID: PAT_MRT3847_17766C.1
attcatcagaatcactccaacatttcaaccgaacgttatattcatcagaatcactccaacatttcaaccgaaagaaacctctctctctctctctcccatgcgtttctcaaaaaaccaaagctattagtttagttgcttccttattttcttcgccagagatcgcaggatgtcgtcgccgaggttcccaggtggtggagcctccgatttctacggcggagcaggaggatttcccagtcagttcacggcggttcaacccaccatgaacaaccactccgccaccacaccccgccctctctaccgatcccaaccttcaattctgcttaacccctcgtcccacatcgcccaacaccaaccatcccctctcatcgggaaacgcaccctcgccgaattccaaacccacaacctcaacagccgcaacaacaacaacgataacccactcctttcaaaccatctacttcgttctgtgaagcccagaactttccagcacacagaattatccacctttccgtcacgtcgttacggcctaccccttctccaccaccttcgccctaacgctgttaacgcacaacaacaacccgttacgaattcgatcctcgccaatacaaattatttgtctccggttcacagcagactaaccgcaacccacgaaccggagaagaacctaatagccctccgtctccaggagttggaaaagcagcttctagaagacaatgaagacgacgccgtttcggtcattaccaccaccacttctgaatggtcacacacaatacaaaacctaatcactccgcagaaacccgcgtcttcgtctcccacttcctctacgacgtcgtctaacacctccgtagaatccagcagttacaaacagtccctaacggaggccgcaaccgcgatttcagaaggcaaattcgatgccgccactgagatcctaacccgattattgctgaattcagatcaacgcttcgtgaattgcatggtttctgcgctcaaatcgcggatgaatcacgttgagtgtccaccaccggtagccgaattgttcggcacagaacacgccgagtcgactcagttgctgttcgagtactcgctcttcttcaaggtcgcacgcatggtcgccaacatcgcaatactcgaatccgcattaaccgagaacgggaagctgtgcgtgctggatttcgatatcggcgacgggaaccaatacgtgagccttctccacgagctttcggcgcggcggaagggagctccatccgccgtgaagatcgtcgcggtggcggagaacggcgccgacgagaggctgaacagcgtgggattgttgctggggagacacgcggagaagctagggattggtttcgaattcaaagtgctgattcggagaatcgccgagttgactcgcgagtcgctggattgcgacgccgacgaggcgctggcggtgaactttgcgtacaagctttatagaatgcctgacgagagcgtctccacggagaacccacgcgacgagcttctgcggcgtgtgaaggcactcgcgccgcgcgtggtgacgctagtggagcaggaggcgaacgccaacacggcgccgttcgtggcgcgcgtgtcggagttgtgcgcttattacggcgcgctgtttgactcgctcgagtcgacgatggcgcgagagaactcggcgcgagttaggatcgaggagggactgagtcggaaggtggggaactcggtggcgtgcgaaggaaggaaccgcgtggaacggtgcgaggtgtttgggaagtggcgagcgcgtatgagcatggctgggttcaggttgaagccgctgagtcagcgagtcgctgagtcgatcaaagcgcgactcggtggcgctgggaaccgagtcgcggtaaaagtagagaacggtgggatttgctttggctggatgggaagaactctcaccgtcgcatctgcttggtgttaattagttaactctactttttactttttattttctatggatattgtatacacattgttattatattttaatgttacatagagattatggaaagctaaaaaaaccatagagttggaaaattgtgttaaagtataccccactcctcttccttctcccaaccaagcaatagtaaaaagtgtttggattccgagaaaatttatgtgacttgatgcagcatttatgaatataatgattcatttatgtacttttataaccaa

SEQ ID NO: 51775 - DNA, 399 bp, Glycine max
  Clone ID: PAT_MRT3847_17767C.1
actgatagtgaaagatttatatttctctaggataatatacaatcgaacataacccttgtagcgaggttacaaaccatccatgccacagactactagaagtcgaatgaacatccagatacacgcacagtctgtaacttttgtttttatcactcataagtagatcacaggatgggcaaaagggaacaagagagagagagagagatagagagaacttatggcgcacccctcgctactatggtccaataaaccttttaaatatataaggtgatgcatccatgttaatggactgtcactgctgctggctgctagtcatggccatgctgatggccatgctactgattatggttatgattatggttatgattgtagcactaggagggaccgtccttaacatggatc

SEQ ID NO: 51776 - DNA, 1105 bp, Glycine max
  Clone ID: PAT_MRT3847_17768C.1
cacagaacacgccgagtcgactcagttgctgttcgagtactcgctcttcttcaaggtcgcacgcatggtcgccaacatcgcaatactcgaatccgcattaaccgagagcgggaagctctgcgtggtggatttcgatatctgcgacgagaaccaatacgtgagtcttcttcacgagctttcggcccggcggaagggcgctccggctgccgtgaagatcgtcgtggtgacggagaattgcgccgacgacgagaggctgaatattgtgggcgtgttgctggggagacacgcggagaagcttgggattggcttcgaattcaaagtgctgactcggagaatcgccgagttgactcgcgagtcgctgggttgcgacgcggacgagccgctggcggtgaactttgcgtacaagctttatagaatgcctgacgagagcgtctccacggagaaccctcgcgacaagcttctgcggcgtgtgaagacactcgcgccgcgcgtggtgacgctggtggagcaggatgccaacgccaacacggcgccgttcgtggctcgagtaaccgagttgtgcgcgtattacggcgcgctgttcgactcgctcgagtcgacgatggcacgggagaacttgaagcgagtcaggatcgaggagggactgagtcggaaggtggtgaactcggtggcgtgcgaaggaagggaccgcgtggaacggtgcgaggtgtttgggaagtggcgcgcgcgtatgagcatggctgggttcaggttgaagccactgagtcagcgagtcgctgattcgatcaaagcgcgactcggtggcgctgggaaccgagtcgcggtaaaagtagagaacggtgggatttgctttggctggatgggaagaactctcaccgtcgcatctgcttggtgttaactagttaactcaactttttactctctttattttaaatttctttggatatttcatatttgtatacacattgttattatattttaatgttacctagagaaagtgaaaaatcatagagttggaaaattataattaaacaatatcccgcgccccttctttcttatgccaaacaggcaaatagtaaaaagtctttggattccgagtaaacac

SEQ ID NO: 51777 - DNA, 424 bp, Glycine max
  Clone ID: PAT_MRT3847_17769C.1
gcaaaaaaattttttttttttttcaaaaaaaaatggtttttatattatcctccataaaaaaagggagggaattccaaaaaccggaggaggggaattcattccccccaaaaagaaacaataatattgatttattacaaacagaacctttacccctttttccaaagggcaaacccctttcttcccagggaaaagcctcttaaaaccccccggaaattcgatttacccccaacccttttagggtttcactaaaaactttctttttctttaataaaacttttatttttttttttgaccccccttttgtctttttttcccccttagggccccctgggaataccgtgagggtcccccgggaatttccgacctgtcccttgaggggttccaatttttctttaggggaagctgtttaaaacttgggcctaat

SEQ ID NO: 51778 - DNA, 499 bp, Glycine max
  Clone ID: PAT_MRT3847_1776C.1
ccgcgacgtaagctcggaattcggctcgagccgtccggactgagaaaacagaacaaaacaaaatggaagacacagtttctgcgttgaggtctttgatggtttctcactctccgccgctggatgccttagtggtgccctctgaagattatcacctgagcgaatatgtgtctgcacgagacaagcgccgcgaattcgtttccggcttcactggaagtgccggcttggcacttataacaaagaaagaagcactgctgtggacggatggacggtattttttgcaggctgagaaagaacttagtgctgggtggaagctaatgcgaattggtgaagatcctgctgtagatatctggatggccgataatttgccaaaagaagcatccgttggggttgatccctggtgcatttcaattgatactgctcaaagatgggagcgtgcttttggcgaaaacagcagaagctggttccaacctcaaaaattttggcggtgaaagttggataa

SEQ ID NO: 51779 - DNA, 1787 bp, Glycine max
  Clone ID: PAT_MRT3847_17770C.1
ctatctaacaactttgaaaatgtgatggagcaaagaacaagactacaagagacatcacaattttgaatgtcctagaccatctggccgaacacagcgcactgcagcgttgtgtcttcgcacgacatcatcgacgtcgtccgccatcgtcacatctcgccggacagtcgtgtcgctgtctaagtgccacagtgctgttgattacaatgtggtttgtaagtaaaagcgagatttaaacacgaatagcttgctgtaatagcggatcaagggtgttatatattgataaccacgtgtgagggagatagctaaaaccatagaaaaaattgttaatagctgtaaaaactgtctcaaagtgaccttttttgaagcatgcttgctagcgcgtattaattaacgtgcagtgaatgaatgcccctcagaattaactggttttcaatttccctgtcggtagcatgctttcttgctccactgaatttctgtgtcatgattgacagttgtccctaagaattgacaggttttccatttaatttagggaaagggtcttgctctgctcaatacaactaccttgcttttgtgggcaaagtaacctaccataagattcttatttaccagtagggccacgatacactctacctcatctacgaccatatcaatcttcagcacttatatttgttatacattaacttctaacttctcttggtcaacatatactggttccttctgcaaccgaatgatgtaattttgctgtgcacaccgaagaagccgaagatcgccccttctaagagcttgtacgattttactatactcaaggagattgtacttctccaagagactgtttttaggtaatatgcctagtgaaagcttcactggaattagatgtttaagaatcatccttatattggcttcactttgaggattgcaatgcttcagggcatacgataatttataatcagcagcaggaaaattttcattgaaaacttcaagacgaccagtatagtacatgtaagtgaccttgtctcttttgggaaattcctcaaaatcaaatatgcgtgcagtttcaatgcttcttattacactgcggcaaaggtgaactgtgccaagcttaaagtaaatcttgaataactgacaagttacatataatgctccaacacgcttagagccttttcccgcaagggtgccaaaaaatttcataaggacggagccagcgcctttcaacttctcaggggatttcccattggaagccaattctttatcagccttctcggcaagaaccctaatatcgtaaacaatgacgtacaaagcctccagagcccaagcggattcccaattacgaaactcctggataaacgcattggcggttttttcgaaagcgttataggcttcgagcaagttgttctggcggtagtttaggagggatcggaagagagggacgaggatgtctgcgaactgggaatagttgtcggattgcttgatgagtctgttggggtcttggaagaggttgagagcgtcgcccagagagagaaggaatggggagttggaagagagagcgaagagagacttgaacgtagctccgtcttgcgaagaaatcgcgtcggaaaagcgattcagatactccgtgatccttctatgagcttcccccatgctcatgtaagtgattgctaattgctactacttgcttcgtaccactaatgtttcaccagcactctctcccttgttttcagcgaaccctaaacttgggctttgcctcactccggacgcgtggtaacggaccggcacaggagcccaaaaac

SEQ ID NO: 51780 - DNA, 396 bp, Glycine max
  Clone ID: PAT_MRT3847_17771C.1
cgaaacatggttaaatatccccctttttatataccctttttatatacatggaccataacattatccctttgggcaaaaaagggggggatattttttcctaaaataaaaataaagcccgggggggccaatggtttaaaagaaaccccaaaactttcaacattattgcattttaccattaaaaggtctgtcatgatgggtcctacaaagggggggcatagatacaattttatcccataagggaaaaagagagatttagatttggcatctttttttttaaggggatcctccatggaagaagtctaaaatcttaccttttttaggggaacatagaatattcccgtggttggaatttaaccgggggcctgtgcagtaaatttaatccaagccggatttggg

SEQ ID NO: 51781 - DNA, 493 bp, Glycine max
  Clone ID: PAT_MRT3847_17772C.1
ggaggagtcttccttgacaattttaatgtttccacgcggtatgcgcccctcggtggcgctgaattgcagcggtttgagcactcaccaaacttcactctgaactctgatgacgatggtgatgatcacacaccagaggatgacaatgtggggaacaagaaggtggttgttgtggagcatgctgttaatggtaatggcgtattgcctcacaccactgagtgaatcatgttatgttaagagaacaatagttcaaattgtataaaggggccggtttgtattgattgtttttgctgtttgctgtgtcttgtgtttggcatgataaaatagtacaatgtgccgtaaattgctttggattgaattatgcaattcggtgttgttgtgaatcagagttctttatagagcatgtacggtcttatttgggattgaattttgtttggaatttgggacttggttgccatcaatgtaaacttttttagaaatgaagtaatatgttctg

SEQ ID NO: 51782 - DNA, 138 bp, Glycine max
  Clone ID: PAT_MRT3847_17773C.1
acgcgtccgcccgcgcgtccgacaacacgtccattaatatagactctacgctaccgatgatcgagtcaagaagcatttgagagcggatcatgcacgcagcgaccactatgctatacagaaacagcgatagagataaaa

SEQ ID NO: 51783 - DNA, 142 bp, Glycine max
  Clone ID: PAT_MRT3847_17774C.1
ttattttttttttttttttttttaaaagctgaccctgcaatgggaagtcttaattgtcatcatgaaacacaaggtttgttaaatctgataaaccttgagattactttatgcattttataggatattcaattgagaacacaag

SEQ ID NO: 51784 - DNA, 322 bp, Glycine max
  Clone ID: PAT_MRT3847_17775C.1
tagaagttatgtgccgattaaataggttgaacaattatttgaatattataacataaaagaagaaaaaatagcatttgctggaaaagtttgttgtgtattggtggcctccctctatcgtctctgtgatcgtcgtttgaagagtgtgttgatgatttatagcccaagacgctgatttccacgtttcattcattccctccctcagcctcttgtgtcctccgcccccttcccattttttgcggctcttctcaaactcaataagaataactaaccttttctcattcattcacaaacaaatctcaatgtctctctccgtacccaagtt

SEQ ID NO: 51785 - DNA, 302 bp, Glycine max
  Clone ID: PAT_MRT3847_17776C.1
ggaaagcgggcgcccgcaggccgggaccggaatcccggccgaccacgcgtccgctcaaaccagttttctgtttggccccatggaggacacagataaccaggggggccgaatcgaccttatgaagcgcagtacgcttttagaccgacccctctcaccacgcgtacctggaattcctgatccaggccacagaaaatagcgagcacagccaaggagggtaccgacaccggcaccggcgtggaacaaaaagcaaccatagcgggtggattgatcacaaccccagaaatcgcgtggaactgtctata

SEQ ID NO: 51786 - DNA, 248 bp, Glycine max
  Clone ID: PAT_MRT3847_17777C.1
atatctcttccccggaactaacatggatctcggtactgcctgcggtaaactccacggcgtctcaactttgtctatcatcgaagctggtgattctgatatcttgactgctgaataagagatttcataaagaaagtgcattaaaattttagcgttttcgtattttgtcctatcttcctcttgtaaagattacgtgatgtccacaaacatagattcaatgaaactaaaggtagtagaaaaaaaaaaaaaaa

SEQ ID NO: 51787 - DNA, 559 bp, Glycine max
  unsure (1)..(559): unsure at all n locations
  Clone ID: PAT_MRT3847_17778C.1
gccttctccgaaatggtacccggtttcacggggtgtttcttctggggtgtcggagaagtcatcaagcgtgttgtttgcggccagggaagctggtgggaaaatattcaaggttaggagaaaaacaacgtaaaagatgtagaaataatagaaagggagggacatggacaacattattcaagaattctaaatgatgtttgttttaaagatattaatgtgacgaagtaggagagaagagaggggttggcgatgacctcttgcgtttgagcatgtgggagtagatggaaatggagagagctttgcattgacttatctggtggagtcagttaagttcctgagttgaggttgttggttgttcaaacttgatcggctaactaatcactttaaagagttttttatttttattttaatatctaagagattaaattgtttaacaaaattaattgcgatcaacatttcattttgttgatgttgtttttttatgcctcatcagcaagaagcttccgaaattaaactagcctacagaggcttgaattgtanaaaaacgaataaatttattttg

SEQ ID NO: 51788 - DNA, 2013 bp, Glycine max
  unsure (1)..(2013): unsure at all n locations
  Clone ID: PAT_MRT3847_17779C.1
tggtancgcctgcaggcgcgtccgcctcaaattcgcctcgagctcgcgcattgccaaactcatcctcaaatttcaaatctctctctctctctccactccccaataaaaatctctctctccactcgtgcactctaatagagagatagagcgtgtgtgtgtgtgtgtttgaaagaagataaggatgacagggcaagtggtggtgaccaacggtggcggatgcgctgctgtcgggaagggccggagagccgccgccggcgaagaggagcagaacccggcgtcaccggtggcgcttctgctggcggcgctgaggaagtcaatggtggcctgcagcgtggacagtcccgacgatgtaatctccgccgtccatcatcccatggagatcggatggcccacaaacgttaagcatgttagtcatgtcacgttcgatcgcttcaatggctttctgggtcttcctcttgagttagaggttcatgtccccgctcctgttcccagtgctagtgttagtgtgtttggcgtctcagcagaatcaatgcagtgttcctatgattcaaaaggaaacagcgtccccactattctactgctaatgcaagatcgattatactcacaggatggcctaaaggctgaaggcatatttcgcattaatccagaaaacagtcaagaggagcatttgagggagcagttgaataagggcattgtgccagatgatattgatgtccactgtttagcggggctgatcaaagcctggttccgagagctaccttcgggagtgctagatggactttcccctgagcaagttcttcagtgcaacacagaagaagaatctgttgagcttgtgaaacagctaaagccaactgagtctgctttactcaactgggctattgatctcatggctgatgttgtagcagaggaggattttaacaaaatgaatgcaagaaatattgcaatggtttttgctccaaatatgactcagatgtctgatccactaactgctctgatgcatgcggtccaagtgatgaatttactaaagaccctaatattgaagacacttagagaacgcgaagaaacagctgcagcaggatattcacctatgtcatctctttcatctgatcatcagtctgaggatgactatgatagtcagcaagaaatggataccagtggtgaattgagagagaccaagtcagatgatgatcatgatcatgatgttaactacagtcatgccagtgaagaagaaggggaagctgatgcatcagtaagcgatatagtggaatgcttcttgaagcgtttggatgagaaaacaaaaagattctcagaagaacctgcagggtatttgcaagagaagttagagagccccaagagttgctccggctacaacttggaatctgctttaacatttactgatatcaaaactgtggattcgtgctcgagtccctcctatgaaaatgactcaagaacaactttgactgctgaggaatcaaatgctgacacaagtagtccatcaatagaaagtacaagcaccaatgatgtggagatgattgataagtttacagattccgtttcactagttccactgtttgcatctagttaagaactgagtgtattttttaagcagtgtttaagtaccttgttttagattttgtccctacaagcagggttgcttgtgtaaattaatttgttacacggtgtaggaagtgtttgttgtagattgtgaccagtggttatgttcagtttagggctgaatttgacctgattctgtatgtcccagtactagatgggatgggtatttgagggagtagctaagtgtattttctaatttcacataggtgggaacatggaagttgtatgcattgatgaattcttagggaatagggagattggtttagaatgaaatggtgcttgctttgttcgtatctgtgcatgaccaaaatttggtgataatgtatgtattccgattacattactggtagataaatgttgaattcctttcacagtaaaaacatgattagaatcctatat

SEQ ID NO: 51789 - DNA, 710 bp, Glycine max
  Clone ID: PAT_MRT3847_1777C.1
attcatccgttgtgttctaagattaaggccattatatataatattttgtttacaacttcctgactcagtgacaggcatgctagttccctttatgctgttcaaaaacatgtcttttttctcccccttggtctgacacaagatttttcggtgaatgagactctagcatggaaagaaggaagtgagtttcttttcttattttgaacaccacagtgatgaacgaacacctatttgaggactgttaacgttccatattaacatctttgttggttacacttgaagttagaagcctcaagtgaagtgtacttgcatcttgttcttggaaaagttccagttgaatggggacttcaaagagggatgtgctccttgcagtagtttcacaaatcgttataagatcttgagctctggaaattcattttactttagattatggggattggacttggagttgctagctgtaatgggcacataatatccttttgaggagcgaaacgttgtactagactggtggtttggagtctacatttttatggctgtagctggcctatcatcgcatacctttctgaaaacctggtcattgtactaggcactcccagtaaaagtttatctggtactccagctctaggaatactcaactagcttcaaatacttgatctgctgctacactttaacagtgggggtatacccctctcttcagagttaggcaaactttc

SEQ ID NO: 51790 - DNA, 1041 bp, Glycine max
  Clone ID: PAT_MRT3847_17780C.1
cactgtttcacctacgagacacaatattcctcaccccttgcagacaatggcttcctatctcagccgcgccgctccgcgcgccttctccagctccctccgcgctgctgccgctgcccgcccagggctccgcaccgctcagcgccccgcagcaccgctcttccgtcgcttcttgcagacgcccgctgagcagccccgcctgcgcctgggttcgaccggtaccgccctctcgtaatcaacattgggtgggcaattggatgaagctgacggtggtcgccccccacagctcctaacttcacggccaagacaacccagggcgatatcgaattccacaaatggatcggcgacagctgggccatcctcttctcgcacccagccgacttcacgcccgtgtgcaccacggagctgggcgccttcgccaagctgaagcccgagttcgagaagcgcggcgtcaagatggtcgggctgagcgccgacgatctcagctcgcacgacaagtgggtcgccgatatcaatgaagtcagctccaccaacctgcagttccctatcatcgccgacgcggaccgcaaggttgctttcctctacgacatggtgaccgaggacgacatgcgcgacatcgccaccaagggcctgcccttcaccatccgctccgtcttcatcatcgacccggccaagaagattcgcctgatgatgatctacccggcctcgaccggccgcaacagcgccgaggtgctgcgcgtcatcgacgcgctgcagctggccgataagaagggtatcgccacccccatcgattggactcagggcgaggacgtcatcgtcccgcccagcgtcagcaccgccgacgcgaagaagaagtttggcgaggttagggagctgaagccgtacctgcgctacaccaaggcttgaaagaaggcgcgtactgcttcgagacagggaggagggattctggagtagagaagggagacctagaaatgtaatacatgtagaattagtggctcagttgtttgaaccgaacgtaaaagcatggatctcatcatttgcagc

SEQ ID NO: 51791 - DNA, 608 bp, Glycine max
  unsure (1)..(608): unsure at all n locations
  Clone ID: PAT_MRT3847_17781C.1
cggacgcgtgggcggacgcgtgggcaacggcggagtcggccaacctgcaaggcgggtacggtagaccttttgcagcttgagcacggcggtggcgtggccgagagaaggttggttggcggcattattgggagggaagtaggtgtcggtggtggattgggagagaaggtggattaattcaaaggtgggggaagaagggcngcaagnttttgggaaaggnttnntttttcccaaaaaacttccatggaagagactagtgacaaaaacaaatcactggtgtttacgtcttcgtgtcgtgtccggtgtcggtgcttcataatgggagagngntcatcaaaagagtgctccactcactgccttaattagnggatatgatgttcttctagactctcaaacaagcaagctggacaagggacacttcgttttatagccattcaaatgataaagaaaaaatatacagtacccacatgggtggtgaataacaataataggaatgggataataactctacagaaaagagtgcaagtagcaacacccgaggcagcctgtttgtgacccaaaacatttgttggatcaaatgtaatacatagcccatgggtaaaaaaatcaaa

SEQ ID NO: 51792 - DNA, 1416 bp, Glycine max
  Clone ID: PAT_MRT3847_17782C.1
cccacgcgtgaacacacgcgtccgtacggctgcgagaagacgacagaagggagggaaagaaagggaggaaagagtgcttctgcttcaggaaagatgactctgaggtcctatctgataataatgttgagcaatatgatcttgccccacttagattcccatgtgaactttgatttggatgagcttctcaaggcttcagcttttatgttgggtaagagtggaatagggattatgtacaaagtggtgcttgaagatggacttgctttggctcatagaagatttggagagggaggttctcaatggtttaaagaggcgtccacagaggtagaagcaatagggaagttaagacatccaaatattgcaactctgagagcctattactggtctgttgatgagaagcttctcatatatgattatgtacccattgtttggttccattttataacttcagggaaggctggacttgacacatttgtgccactatcttggtcctatagattgaaaatcatgaaaggaactgcgaagggattgctctatcttcatgaatttagtcccaaaaaaatatgtccatggagacctcaagccaagtaacatacttcttggacaaaacatggaaccccacatttctgacttcggagttgggcgccttgcaaacatcgctggagggtctccaaccttgcaatcgaaccgagtggccgctgagaaactacagggaagacaaaagagcttgtccaatgaagtcacaagcaatgtgttgggaaacggttacatggcaccagaagcaatgaaagtggtgaagccatcacagaagtgggatgtgtattcatatggtgtgatattgttggaaattatcacaggaagatcatccattgtgctagtggggaactcagaaatggaccttgttcagtggattcagttgtgcattgaggaaaagaagccactcttggaggtgttagacccttacttgggtgaagatgcagatagagaagaggagattattggagttttgaagattgcaatggcttgtgttcatagcagccctgaaaagaggcctactatgaggcacgtgcttgatgctttggataaattgactatttcctctgattgagaaatttcagggagctgtgcactgtgaatccagctcatttgtgtagcttttgcctttacctcttgtcttggtcacgtttaacaatgtcttcttcaggctcatgaatccttgtaattggaacactagaagagaaattgaatttgcttgagaaaaatcgtcaatttttctgctacaacctacgactacgagacatggcatgctttggggactcattattttttatcttctttttaacccggatatattaatttaatttaccatccatatgatccaaattagtttttatttaatccaagtcatcggtttactac

SEQ ID NO: 51793 - DNA, 1043 bp, Glycine max
  Clone ID: PAT_MRT3847_17783C.1
tttgcattggcaatacgacccacgcgtccgcctaaccccaaaccccgcaaactcaccacccctcactccactcaccttcttggaaagagcagcaatcgtctacggcgattcccactccatcctctacaaccgcacttccttcacctggtctcaaacccaccgtagatgcctccaactcgcttcctccctcacatccctcggtctaggacgcggccacgtcatctctgttctctctcccaacactccttcaatgtacgaactccacttcgcggttcccatgtgcggtgccattctcaacaacctcaacctccgtctgaatcctcacatactctccgtgctcctccgccacagcgaatcaaaactcgtcttcgtccattcccactctcttcccctcatcctccgcgccttatccaacttccccaaaaccacgccacgcccttccctcgtccttatcacagacgatgcagatgcagtcaccgtctcactcgcacacgtcatagacacctacgagggccttataaaaaagggtaacccgaacttccactgggcccgccccaactccgagtgggacccaataaccctaaactacacctcgggaacgacgtcgtctcccaaaggcgtagtacactcccaccgcgcaaccttcataatggccctagattcactcatagactggtgcgtgccgaagcaaccggtttacctatggacgctaccgatgttccactctaacggctggaccttcccgtgggggattgccgctgcaggcggcaccaacgtctgtccgcgtaaaatcgacgcgccaatgatctaccatttgatccaatcacacaacgttacacacatgtgcgccgcgccggttgttctaaacttgctgttaacgagaaccgagccggtgaagaacccggttcacgtcctcaccggcgggtcaccgccttcggcggcgatcctcactcgcgcggagagttaggatttagggttcgccacgggtatggcatgacggagacactaggagtggtggtgtcgtgtgcatggaagaaggagtg

SEQ ID NO: 51794 - DNA, 833 bp, Glycine max
  Clone ID: PAT_MRT3847_17784C.1
ccccattgttggtgggagaaattagggttagggcttaatcggatctgaatggggggacttcaacctggcgctggtgatcgtggcgatcgtggtgtgcgtcatcgtgttcctcttcaacgtctacctcctcgtcaacttccagcaccccgacgacgtcaaccaggcctacttccctaaattcgtcgtcgtcctcggcctctctgtcgccgctatctccattctcatgccgcacctcaaaacgatgccgttccatctctcccaaaaccaaaacctccttctccctccattcattatcacagcccaaaaccaaaccaaaaagccacaacagccagaaatgatgataataaaaataaaaaccataaagcgcctctcagtatttattcgcatttaattatttatattccgaatcacttttttttcttcttctcttcactcaaattcgaagcgaaggagagaaaagaagaagcgaagtgtgtttgggaacaatggcagagcaaaagaaccggtggagctgggacgtcgccggctttgacccgtggaagtcgtctacgcctccgcagtcgccggcggcggcggaacacggcgatcggaaacctagtgcgccgttggtgcggcggtactccatttcggccacgtcggttcttccgcaatcgaagcacgctgtggccttcaagcttcagcggctgaaggaccaagtcaagcttgctaaagaagactatttgcaattaagacaagaagcaagtgaacttcaagaatattcaaatgcaaaacttgatcgagttacacgatatctaggtgttcttgcagagaaaacccgcaatctagatcaagtt

SEQ ID NO: 51795 - DNA, 416 bp, Glycine max
  Clone ID: PAT_MRT3847_17785C.1
ttttttttgggaatataactctgtttctgacatttcatatttgatcacaagtgtttctacaagatacaaaaaacattaaaaaaaaaaatacagagctcatcttgtatacatgataattgggattctgctttacatgagaattcaatactcaatcttgcataacactgacacacaatcaaacaaaagaaatcagttgtccattaattaacatgtcaacttcttccttatgataagtattttaaatcggtttcaggcaaaactgttccagactaaaaataagaataaggaaggaatttgatgatactctgatccttactatatacacacacaaacaaatcggaagaaaattcacagctgttatttacgtcgggatctgcctcttaatgaaacaagataaatacgcccataaacccact

SEQ ID NO: 51796 - DNA, 425 bp, Glycine max
  Clone ID: PAT_MRT3847_17786C.1
ataaccaacttaggctgtacttaaagggacaaaaatgaaataaattaaccaacggaaaaagccggtaaaacggtcagatccattaaagggtgtgggaaacaaacggagtggccccaaaatacaagggggccaagacaagggaaaaacttgaaaacatgcaggaagcggatgccaaggaaacggagctagattcgcaagggaccgccgcgcggccattaaaggacgcattctgaaacagcgacctacctgcaggttacgggaacgaccagccggtttttgaaagggtaacaggtggggcagcgaaaagctgtatacaccccaattacccggggggggtcaaaaacacaaatctttacaaccgggaagcttgaacaatatccctaagcgggggatcccagagagggggaaatgaaacggaattgacc

SEQ ID NO: 51797 - DNA, 736 bp, Glycine max
  unsure (1)..(736): unsure at all n locations
  Clone ID: PAT_MRT3847_17787C.1
acgagaaaaaataaagtgacttttaattatttatcttcccttgaaaaaataatttatattttgttatattttctttcatttagaaagggaatcaaatttttatttttattttaaaaaggattttatttttttagttttttttttttgtcgacaagggatttgtccttgctcctacgtatccccaggtgcaatgagaaaatcagacttacgtagttttttgtagaaaaaagtgttttcgtgtttattttattttatttttttattttattttgaaaggttttgattttgtggcaaactatgataagtcaagcaagttggagacccaacatgtcatccacaaaatttactcactttattaaaacactgtcaagcaagttgaagacccagcatgaagtgcatataacattgagggattatttatttgagaatgttaccattttttgaaaatattttacttttgagggaaactttttgaactcaagcaagtcgaagacctagcatgtgtcattcacaaaatttattcacacgttaatgaaataccatcaaacaagtcgaagacccaccaacatatagtgcacagaacgaaaaccagtactaaagaatgctaatgcggatttgcnnaaataaataaatatttgacacaatgctacgaaatcaaataaatagaatggaaatggaaagggacaaaataaaagtgaggagtacacttagtaattaaggatgcaagattgaaacg

SEQ ID NO: 51798 - DNA, 278 bp, Glycine max
  Clone ID: PAT_MRT3847_17788C.1
aacaaagaaaaaaaaaaacccttagccaacacaaccatcatggccacctctgctattcagcaatcagcattcactggtcaaactgctctgaagcagctcaatgagttcgtgcgcaagaccgggggcgccggcaaaggtcgcactaacatgcgccgcaccgccaagagtgctcctcagagcatttggcatggccctgaccgccccaagaacttgggtccattctcggaggagattccatcatacctggccggagaatttcctggtgaccacggatggga

SEQ ID NO: 51799 - DNA, 380 bp, Glycine max
  Clone ID: PAT_MRT3847_17789C.1
cttttttttttttttttttttttttttttttttttttttttttttttttttttttttggagccctatacccttacttgacaatttacaatacaaaacagtttcaagaaaatgatttcaaactcaacgggacaaaaggggtttcgttactttgctacctggggaacatataaaagtaaaagaactttttaaattaatcccgctggggaacccaaaaattcaaatttgggccaaaacaaataggaaaaactgggtaaaaaaaatctccctcatttgctattacccttctggggcaaaggggggggcttttaactcgattttttatccttttttttcgcaaacccaaacttaaaatacttttgaaccctttattttttccaac

SEQ ID NO: 51800 - DNA, 1004 bp, Glycine max
  Clone ID: PAT_MRT3847_1778C.1
ggctgcgagaagacgacagagggggaagcacccaccaattcggctcgagggaaaccgttcaaaagagataccttacaatcgttttacaatgcagcataagaacaactaacagtagcacgctactctctttttctctcgtgtgtgtaatcctgcaagtaaatggcaagagcagcttgcaatcaccttcacttggttcccagtttagttcatcctctaaagtcaaccctcttcacaaatcacactctttccaccacacgcactcgcttctatggcattcaccgaaggttctcttcttcttcatccaaaataagcatgagcctcaaggctggtattgttggccttcccaacgttggcaagtccactctcttcaatgccgttgtggaaaatggaaaggctcaagctgctaattttccattttgtacaatagagccaaatgtagggattgttgctgttccagattctcgtcttcacgtgctttctgatctcagcaaatctcaacgagcagttccagcatcaatagagtttgtagatattgctgggcttgtcaagggtgcaagtcaaggagagggtttgggcaataagtttttgtctcatattcgtgaggtggactctatacttcaggttgtacgatgttttgaagacaacgacattgttcatgtgaatgggaaagttgatcccaagtctgatattgatgttatcaatttggagcttgttttctcagatttggaccagattgaaaaaagaattgataagctaaagaaaggcaaggcaaaggattcacaaaaactcaaggaagaggcagaaaagtctgcactggaaaagattcgtgaggcgcttatggatggaaaacctgcgcgatctgttaccttaactgattttgaaagggatgctgtaaagcatctctgcttgctcaccatgaaacctgttatatatgtggcaaatgttgcagaatctgacctagctgatcctgcaaacaataattatgtcaaggacgtgacaaatgt

SEQ ID NO: 51801 - DNA, 455 bp, Glycine max
  Clone ID: PAT_MRT3847_17790C.1
ggaatcttaggcctgcctggaaaaaataggcaaaggggggaaaaagtgcctacttgtggaaaccaacggcggggggggaaacccccccccgaagggggaaaaatcccccattggagggaaaaaggcgggacaggaaacacactgggggggcatgggggaaaaaactatgggctaaagcaaggggctatcccctaaaacctggggcaaggactaaaaaacctttttaattcttggggggccggcaccggccaacaaaaaaatccaccgggaaacggaatgggcagggggataaaaacaccccccaagtgaaattaaggggccgtgggggaatatcaaaaaccaaccaaaggggccctctacccaaccggagctcccgggacgaaaaactaacccccctccccaagggggttattttttaacaaaactcattaccttccaaagagtgggcttccctt

SEQ ID NO: 51802 - DNA, 414 bp, Glycine max
  Clone ID: PAT_MRT3847_17791C.1
aattcggctcgagtacggctgcgagaagacgacagaagggggcgacggagaggatgaaagaaaggattccctgtgcacaccacacggtggcgtcgccgcaacccactgatgatctgacgatgggtttctttgacacagtggtttcacgtgttggtggcaacgggttctggtttgagggtttgacggtggtgagtggcggagttgtgacgtgtgcgaaggggaacaagaaaaggggaagaaagcatgcgtcgtcgccgccaggggccgtttccgacggtgtcacacggttcaacacagcgacgaaggtttcacatgcttatggtgagaattgaaagatgtttcagaggttattaggattatttacttggctgtgttgaagctgaattataaaagacacccactccctcgtactga

SEQ ID NO: 51803 - DNA, 1955 bp, Glycine max
  Clone ID: PAT_MRT3847_17792C.1
ggaaagttcttctgcctttctgataaacattcacgaacctattatttggcgccttcatgaaatgatccagcaggtgaagctcagtaggctgtatgattctaaaacaactgctgcatcagttgatccaataattcaaattggtgtccttaatatttcggaagttcgattcagagtgtctatggctatgtcaccaagtcaaagacccaggggtgtgcttgggttctgggcatccttaatgactgcattgggcaacacagacaatatgcctgtcaggataaaccagaggtttaatgagaatgtatgcatgaggaagagttctatgattaccatggctatctcaaatgtccgaaaggatctactaggccaaccacttcagcttctctcaggagtcgatatattgggcaatgcaagtagcgcacttggacacatgagtaaaggtgtagctgcattgtctatggataaaaaatttattcaaagtcgacagagacaggaaaacaaaggtgtggaggatttgggtgatgttataagagagggaggtggagcattagctaaaggtttattcacaggggtgactggcatgttaacaaagcctcttgaaggagcaaaatcttctggtgttgagggttttgttcacggtgttgggaagggaattattattcggctcgcacaaccagtgagtggagttttggatcttctgtcaaaaacaaccgaaggtgctaatgctatgagaatgaaaattgcatctgctataacatctgatgaacaacttctcaggaggagactgcctcgtgttataggtggtgataatctgctaaaactatacgatgagtacaaagctcaaggacaggtcatactgcagttggcagaatcaggttcattttttggtcaggttgatctgttcaaggttcgcggaaagtttgccttatcagatgcttatgaagatcacttcatgcttccaaaagggaaaatcctcgtggtcacacatacaagagtcatactattgcaacaaccatccaatattattgctcagagaaagttcagccctgcaagggatccatgttcaataatgtgggatattctgtgggatgatcttggtactatggaactgactcatggcaaaaaagacaagccaaaagctcccccatcacagctcattttatatttgcaatctaggtcaatggatatgaaagaaaatcatcgcattataaaatgcatccgtgaaacccatcaagctcttcaaatttactcttcaattcagcatgcattgaacacttatggtccaggagtatcaaagggagttctgaaaaataaagtggcaaagccatattcaccccatgttgatgcccgtagtgttgacctatccccccaacagatgcctggatcagtccctctctcctcaacttttggaagcagtgcccgtgactaggactatacattgttcatcacattcaacatagtcaagtccctatctaaacagccctgtgctctattgaaattctaccgattagtccacctgatgacttccgttcaacccatgcagacagtcacatgagcccactcatatcaggactcagattgtaatgctggtttcaggaatgcaaccatatacctacccgaagataacggttacagttagttggagggaattggttcgaaatctatctattgctatgagtctcggagaaggcccatatctccaattttttcttagaatatcatataaatccaatacttcttgtataatattgagtgaaatagttttctttgtacatatacagaatcacacagctcatataggatcctacttgctctcatcttgcccctttcacatatagaattttttatttttgaactttttaacaaatattcgtgtaacacccatatctagacccaaaataatttcaaaactttataaaaataattcttattttcatacaaaaaaaaaaaaaaaaaaa

SEQ ID NO: 51804 - DNA, 1498 bp, Glycine max
  Clone ID: PAT_MRT3847_17793C.1
cgaattcggctcgatgttggtactaaacggtgcattcgggcgcgtgtttatctagtctctctgcgtggatctgcagaagtggaagaagaagaagatgcagtggtactttgtcgctgcgctcctcaccgtcctcaccagttctcagggaatactaaccaccctctcgcaaagtaaaggagagtacaagtatgattacgccacggtcccatttctcgccgagattttcaagcttgcggtgtcaagtttgttactgtggaaggaatgcaaaaagtcacctttgccaaagatgacaacggagtggaaaacggtgtctctgttccccattccctcagttatatatctgatccacaacaatgttcagtttgctacactcacttatgtggacacttccacctatcagatactgggcaatttgaagattgtcaccactggaattctatttaggttgttcttagggaggaggctttctaacttgcagtggatggctattgtgctgttggctgttgggacaaccacaagtcaggttaggggatgtggagaggcttcttgtgactcccttttctcagctccaattcagggctacatgttaggagttctatctgcttgtctctcagctttagctgggatttatactgagttcttgatgaagaaaaacaatgacagcttatactggcagaatatacagttgtacacgtttggtacacttttcaatatggcacgactacttgcagatgattttagaggtggatttgaaaatggaccctggtggcaacgtattttcaatggatacactatcactacctggatggtggtattgaatctagggtctactggtcttttggtttcatggttaatgaaacatgctgataatattgtaaaggtctattccacatcaatggcgatgctgctgacgatgatactttcactatttctcttcaacttcaaacctacactgcagcttttcttgggcattattatttgtatgatgtctctacacatgtattttgccccaccaaatatgctcttagatatgccattaacagttaagccagatgaagagaagctcattgaagtttctgttgatcgaagaacactttcatgatgttgtattgacatctgaatacaatgcttgggtagcagaaatgctgaatattattccatgctgctgcattgattcagtgactttgtaggcatcgttagggggatgacttcaactctatatagctaatttgaacatcccatgtgttgcctgcgtttaaatatatggaaagggtatactgtgggaaaagtctgttgaatgaaagtgagcagaatgtggtttagaaggaaatagaattttcaattttgccattggtttttggtaagtcttcataggggtgttacccattgacacacaaggcactttatgtcttcctcgaatgtgatctttctacctggttgctgtacaaactaaacaattcttcaccattaattattttaaaggttaaattagtttttc

SEQ ID NO: 51805 - DNA, 432 bp, Glycine max
  Clone ID: PAT_MRT3847_17794C.1
gcgtacgctcggatgctagaagacgacagaagggggagtttagaggatcttgtgaggggcagtttccgggattccgtctgttgcaaaaatgaagactattctttctaccgagaccattaacatcctggactgtgtgagcataaaagttcatgccaaggtcattgaaagtgaaggcccccgctgaaaattggtgcaagactttactgcatttgaatctgcatggtcatcacattactgacgaaaacggttaatgaaagctcacaattgtcgcctggtttggtcttcagaaaacattcgtcggcattcacaccgtcatgagtcacaagaggaatcttattatctgtattcaccaaagtctacctatacataatgaggctggtagatacgcattttactatcatcgcaagcattaatcacaggaacaagtctatt

SEQ ID NO: 51806 - DNA, 381 bp, Glycine max
  Clone ID: PAT_MRT3847_17795C.1
ttttggacgcgtgggcggacgccagggatagtgtgggacttttactacaatctctccaacgccgggggcaacaccttttttgacgaggcgaatttgtttaaggacatgcaggtggaggagctatcgcgcgccatcgagggctctcagatcgccattgcagacttgtgcgagacctacaccgagtcttcatggtgcctgtgcgcgctcgagaagagcgacaagagccatgaaacctactggcaggccatcgcgccgatattctacgacgtcaccccggacggggtgcgccacccgacggagcacttcggcgacaccctgtgagcggctgctccacagaagtcttccgcgaaggatagggagtgtgggatactcaggtggaaa

SEQ ID NO: 51807 - DNA, 291 bp, Glycine max
  Clone ID: PAT_MRT3847_17796C.1
caaaaaaaaattttttccttgggagtctttatcccatagccaacggcggccaaaaaacagataaccttttttttttttggtttcccttcagtccgaccccaagataggcatataaggaaaacccgggaggtttttctacaactaaaccgaacagggggagtggagtttctgaggtttttgggccgccctaatttctttccacaatcccctagtccttggggaccaacattaaaaaaacaatttctccccatgcaaagaaggaagggggccattttttttaattaacacccc

SEQ ID NO: 51808 - DNA, 375 bp, Glycine max
  Clone ID: PAT_MRT3847_17797C.1
cccacgcgtccgaaaaaaaaaaataaaaataataaataataactcctttaaatatacatgagaaacgtttcatctgcctatcgatgtctagaaaaccgtcgttcactccccaactttcgagaatggcatgtcaatgttccagcctcagcttacgatgtccacagtcatttttaatcacgccattgattagaaaaagactggtgttaacccacagtctccactaaaaactgatactgatcctcatagctgacctacaatagatcctgccctaactcatactccttaatggctatgctgcatgcaaaacccttatggcgaatcataccataacaatggaatctactgcgaaaagcctttacataacaaccatgttta

SEQ ID NO: 51809 - DNA, 1408 bp, Glycine max
  Clone ID: PAT_MRT3847_17798C.1
ggctcgaggcgagaaacggtgtgtgggttcccggtaatccggaggcgacaaggcacggacatctaaataggggtatttccttcatttcactcctcaccctgttcgtccgcactttccatccaaccaacaatggcagatgtaaccacctacctccgccaccaccccgactccgaccccaaccccaaccccaatcccaaccccaaccccaaccccgacgacgaccaaaccctaattccctttccctattgggatttggacttcgatttcgaccccgaattcccctcaaacactctctccttcaccgaccgcgaaaatcaggtcaatttcatcatggatctcttccaccagagcgtggagcagtcgcaactcaccgatcctctctccaacgacgccgttttcggcgccatcgatggaatcgatttaggtttccccgccgctgacgacttcttcgtcggacagagattctccgtcggatccgacgaatcgcacactcacccacacacgctcgcggcgaacgacgacggcgtcctagggttctgcgcgcattccaacgaaaacgacgacgttgcaagcatccctctctgctgggacgcgcttcaattagaagaaaacaacaacaacaacaacacctacgaggatttcgagtgggaggaagtgatggacgagagagacgttatcagcatgctagatgacaccgtttccgtttccctcggaattgaagaggaaacagaagcagcagcagcagaagaagatgcagaatctgaagtcagcattttggagtggcaagttttattgaactccaccaatttggaaggaccgaattcggagccttatttcggagatagcgaggatttcgtttacaccgcggagtacgaaatgatgttcgggcaattcaacgacaatgcatttaatgggaaacctccggcctccgcctccatcgtgaggagtcttccgtcggtggttgtgaccgaagctgacgtggcaaacgacaacaacgtggtcgtcgtctgcgcggtttgtaaagatgagtttggtgttggggaaggggtgaaggtgttgccgtgttcgcatcgttaccatggggagtgcattgtgccgtggttggggataaggaacacttgtcccgtttgtcgctatgagttccccactgatgatgctgattatgagcggaggaaagcgcagagatctgtaatgtgatgatgatgatgatggggttattattagggtcagttttttgactttcagtaatagggtaatggatgaaaacttgaaaaagtatagattttttttttgctgccgaagaaattgtgctttttaattttaaaaaaaattgagtctagggaatgatgtttctctttgaattgtactttttgggatacatcacagaaatgaatcatttttccatcaa

SEQ ID NO: 51810 - DNA, 710 bp, Glycine max
  Clone ID: PAT_MRT3847_17799C.1
ccacgcgtccgggtacctgtggctctttgttgtgctgtttttgctgatggatcttgaaggtaaataaatacttaattaattaggatcctctttggctatattctattgaattgaacaatgactgttttatatctacctacttatgagtttactatgcaggatggcacacttatttctggttagcctttttaccattgattgtaagtgatttgcattcttttcaaatagatattttgttaacattaggactattacttttttttttccctaaatgatgcctaaagaaaaaaatatatatacaagtaatcacttaattaagtattaaaaatcatgttaagtaatcttcttaggctatgttggactacccgttgccttgaacatacttttggagtcccaaacttagttttgtattatgtttggatttttcaaaaattaatgctgcaaccaacagtttggggtaatttgttacttttaaagtaaaatacttttaatttgtatagttacgatagaaacatgaagtagtaaaaatacttttgattgatattatccaaacaaattttattttatcaacttacttttgaaaataaaatatccaaacataatcatgttattataaaactcgttaacaaacttaagtttataacatactttttgattcaaacaaaaacttatgtttccaaattttaatccaaacatagcatttacgtatc

SEQ ID NO: 51811 - DNA, 705 bp, Glycine max
  unsure (1)..(705): unsure at all n locations
  Clone ID: PAT_MRT3847_1779C.1
aaatagtagaaaacaaaatggaagacacagtttctgcgttgaggtctttgatggtttctcactctccgccgctggatgccttagtggtgccctctgaagattactcacctgagcgaatatgtgtctgcacgagacaagcgccgcgaattcgtttccggcttcactggaagtgccggtttgctactatctttaaatttttcattgatgcatttccgtttttgtttgtttctttattattgtagcattcatcagtttagggtttaagttgcctcctgtttcggcgttttcctgcaattgtttcaacatttcgcgtgttaagtattagctgattggttcccgcggaagtaagaattgtttctataattttgaaaaagaattgcggtttcttgttgtttgctatacatccatgccgtgtgtgtggtctttgtgtttttcaaacccgatgaaatagccaggtgtctttttgtgatggtattttcatttttttaacaacgcaattcaggcttggcacttataacaaagaaagaagcactgctgtggacggatggacggtattttttgcaggctgagaaagaacttagtgctggngtggaagctaatgcgaattggtgaaagatcctgctgtagatatctggatggccgataatttgccaaaagaagcatcgtttggggggttgatcccctggntgcattttcaanttgata

SEQ ID NO: 51812 - DNA, 311 bp, Glycine max
  unsure (1)..(311): unsure at all n locations
  Clone ID: PAT_MRT3847_177C.1
nttttgatangcnnatgtnatctcggaattctgnnnnatnattattatgtantattgtgtnangnnnagnacgtgtgtggtngtgtgtggtanttgtgnngtagtgnntgtttgggtantngtanggtgtttngttgngnnnggtntgtgtgtgttggnggntgtgntgtagngtggtgtntnnatangaggngttgtnatgttgantgtnnagngnngntnnngtgntgngtggagnaattgggtnttgtctnatgnttgaanggnttttgtttgntgtgggtgattggttatgggtgtgntnngngtgg

SEQ ID NO: 51813 - DNA, 296 bp, Glycine max
  Clone ID: PAT_MRT3847_17800C.1
gacaacgaagaagaaggtttacagcacaacaaggccatcattaatagcaggtctatgctttctatgtgccctccaaagcttgtgaatagcaaactaagcccacaaatcggacacggatgcatactaagatgaagattatggatggaaacgaaactcttgatggaacgaaagatcatgagaccaatgagctaaagaaataaaatgaggatagctctatggtcaccaagggctggaaaagaagagaacctggtatggtaaggcttgcgctcgagatgaccaatgtgactaccctggga

SEQ ID NO: 51814 - DNA, 432 bp, Glycine max
  Clone ID: PAT_MRT3847_17801C.1
tctacacggacgcggacgcgaggcaaaaaatggatactttaaccaactggggcacaggctcagacggcaacgaatctgaagaatccggctacaaatgaggaggaagctgctaggggattcctgacctactatgatattggacaagatacaaatgcactgaggaaaaacacagcatggccgagcgctactaattggtagccagatggctacgggattactccgaactattgcagcgctagggagaaacatgagcgcagtcaacacattaagggactgagcaaaaaggacagcacgggcatagggcggatacaacctgtctaaaagggacactcaacagctggtggatccggggggactggagcccacccttaaatgtagggcagaaagcttagaagggcaaagaatttctttcaaacagctggcacaacgcta

SEQ ID NO: 51815 - DNA, 300 bp, Glycine max
  Clone ID: PAT_MRT3847_17802C.1
gccctacaacagctcaagtgttttgaagttctaaaatttgttatactttcaagggctggatatcctattccaatgggccatcaatatttttccagaggggatggctttcttctatctcaggccaacatatcataagatccattgagcatctcagctgctgattttcaaaaattttatattccttaacaaatctaccattttagctacaccaaattgtatctttcagcacggcagattgatcctctcgataattatataaaacaggttttgcctggaatacttaagattcacaaatgcttc

SEQ ID NO: 51816 - DNA, 808 bp, Glycine max
  unsure (1)..(808): unsure at all n locations
  Clone ID: PAT_MRT3847_17803C.1
gaattcgagctcggtacccggggatcctctagagtcgacctgcagagaagggatattgtttaggcacatacttgataaagcaagacaacagagatgaaaatctttaaagccctgttcctacctttattaattcatcatatataaacctggcacactgaagacttggatccaatagacgggatatttgccttcgcacaaggactttaaatggcacctgattatatggaaataaatagataacattgttttagatttggattcacaaagtatggcaaaacatttacaatcaactgagaaaatttcaaaatataatttctgtctctccattgttttttaagtaacaagacctacagatggagcaaacactgctgatttaggtccagtagcattttgtatggcagtacgaatgtcgtcatcagtcaggtcttcacacggatccacctccttcatgataggattaagttacacaacaaggcaaggaattagcacattttgcctatcacataaaactcaacaccataaaaccatacaagcaataacaaaattatattttcctttcccttgaaaaacattgaattataatccctgtgaattcaaaaaggagcatttaacatttataaaattgttttgaaacaaaaaggaaattacnttatttcatagtttaaaaaaatcacacatgattaggaatattcaatagtattattttggttaacaatatttggattaatatcaaatcaaataaataataataataattattattataattataataataataataataataattaatgattggggtaat

SEQ ID NO: 51817 - DNA, 1672 bp, Glycine max
  unsure (1)..(1672): unsure at all n locations
  Clone ID: PAT_MRT3847_17804C.1
gctaccggttgagaggaagtacagaaaggagaggctgctggagccgaactggagggaaaacagagggttgttgaaagggaggcaaagattgaggcatatgaaggccaactcaacccctacctccaacacgtcattctgctcctcttcacatggacaatatgaccctctctccaaattcccccacccacacgccagcttttcctcccaattctaatttactctttatttgattctgggttctattattcttttttgcaatacacataattgtcttaagtgagaacgaataagagagatgcgaagcatggccaagctccgcttcctcggcgaggcattgcagctatcgtcggtgtgggccccaacctcggcctctccatcgctcgcaagttcgctcacgagggctacacggttgccatcctcgctcgtgacttgggtatagaggttgtcaagatttgctgatgaaatagcgagggaagacgcaggccaaggtttttgctataagaatagactgttccgattcaagaagcgtgagagaggcatttgaaggagtgctctctctgggattcgtggaaattcttgtctacaatgcttaccagccactaccttggtgcccttcctccttccaagatcttcgcatcgaatcctttgaaagatcccttgccgtttcttccgtcggcgccttccactgcgctcaacaggtgctgccgggtatggttgaaagaggaaaaggaacgattctcttcactggctgctccgcttctctaaacggcattgctggatactctgaactatgtaaacaccaattatccttacttttggaatgtgtttttatattttnngtgttgnnnngtggtgtggnnngttaaattgagttgaattaattttaatttatgagaacactgcannnnatgggggagatgagacaggctgtgggaaattcgcnnngagagcactatcgcaatgtttggccaaggaatttcaacctcagggagtgcacgtagctcatgttatcattgacggtgtcattggcccacccagaggaccaatgttgacgacgacgtcatcatcgtcgcagaggagaaattcattgggggagcaaagcagtggagtagtgggaggaggtgagggtactatggacccggactcactcgctcaaaccttctggcacttgcacgttcaggaccgaaacgcttggacccaggagatggatcttcgctcaccctctgctagattcttctagctacttcactccctacctcaatttaattaaaaatgtccccagctcaattatatatttttcacgctattgtcaaatctcaatcacttcatccatgatgtcacggcatcaaccgtgaattcaatgatgtttccaatcaacactgttggggccttgccggtgtgctaagctatgtgtatgtacaaagtgttatatcatacgttgtgttgttagtttgggtcaattaagtcgtaattatcactgtttttctttttagagagaacgaaaatgatgtattttagtatatcatatgaatatcaatatcatccgtttgtgtgtataatttatttaatttggatttggattattctctcttgtcaaaatatgtttggcatttgcaaaactcgtgattaatgagtgatttgtcggtaatgagccgagttgtatgtttaaaaa

SEQ ID NO: 51818 - DNA, 282 bp, Glycine max
  Clone ID: PAT_MRT3847_17805C.1
gcctttgttttgttgagcgagagtacccttgaaaatcaaaagcgttcttacatttaacacgatgcagttctacttggacttgtcttcaaatgctataggggctttatttacaacagcttgccactgactcctttgcttttgctaaccaacttagaaccaagctcccccattcaacatggtatctatgagagaattatccataggcatactatctcactttaaaaaaccccattcttcttcatgtcaacttgtctttcttcctacaatgacttccaaagtttt

SEQ ID NO: 51819 - DNA, 295 bp, Glycine max
  Clone ID: PAT_MRT3847_17806C.1
ggctgtcgccctgtcgtccttttttttttttgagcaatgcgtaaacagatttcatgaatgtaaaacaagccttgttaactacagtgaagatacgttcctttatacacctgacctaccatcttacgtgtcactttaacacgtgactatgggttattacaagcactcatacgagttgtttcctcgagttttagctatggcttcataccatgggccgatttatattgcagggagctccagacacttacgctcctgttaagctgaactgaatcattaagatgagcctgtttcctttacc

SEQ ID NO: 51820 - DNA, 240 bp, Glycine max
  Clone ID: PAT_MRT3847_17807C.1
aacagaattgcgaagaaccctaattgattgtttgattgattgattcccatggcgtcccgaggaggtggagtctcactcccagaaagaaccaaccacaactcaagcctccgccttgccaaaaatctcgcgcctcttcatcggcaacccgcgcaaggaaacccgcctccacccccgattcctcggcaaaaaacttcttcggaacaaccgcaaaggccccttgatcggccgcaccaactttct

SEQ ID NO: 51821 - DNA, 604 bp, Glycine max
  Clone ID: PAT_MRT3847_17808C.1
ccacgcgtccgcgcagttttagcgaatcaacaaggtagtcaaaatgtgacccataaagaaaagtgaagtgaagtgggtaaaaactctagtcaagcaaaaacagccaggggatactttatattttatatatgcaaaataatcaatccatcacattcatgtatagaaagctaccctgccattacagggtgagagcagcagttcaaacaacatgtagacggaggaatttcttatacaaatttggattttactggaaactgcccttcgtggaaagcttcattcattggtatttgcctcactttttttctttctttcttggatataaatatataatatccccccttccttttttctttacagagatatgttttgttcccacatatgatggaaatatggccatagtgtacgagggccaccggagatatcttgtgttcaagaaaacgattttgttgaacagataactcctagtcgaattgatagatcaatacattaatggagcgctgaactgggatgaattctcttcagcactgaatgaagcccatgccaatcacatggctagccaaaccaagaggtttgtaatccctgacaagccaaacgaagacgatta

SEQ ID NO: 51822 - DNA, 261 bp, Glycine max
  Clone ID: PAT_MRT3847_17809C.1
taattgacagtctttctcttcgacggttctctctccatgcggccttctctctatacagcttgctctctcaacgcagttgtgtttttgtttgctctccctctctctctaatggtcgttgcttgtagcttgttgcctccaatcttcgtagatcaaaccttgtcgcctccagacagtgaagggagtgcaaaggagacgaagaggttgcatcaaagccaaaagcgaaggcttgctggtgggtctgcatgttgttagcacgggatt

SEQ ID NO: 51823 - DNA, 148 bp, Glycine max
  Clone ID: PAT_MRT3847_1780C.1
gctggcagtaccgccagctctctgcgctgcacagggctccccgccccacccggcctgataaggcgcgaacgctgcgatacacggctaagcaaggttatgtcatttacaggatccgcgtccgtcgcggtgtgcttaagcgcccagttcc

SEQ ID NO: 51824 - DNA, 247 bp, Glycine max
  unsure (1)..(247): unsure at all n locations
  Clone ID: PAT_MRT3847_17810C.1
gggtcggaccaggcgcacggctcgcaaatccacgaggggaaaggctaaaaggaagcaactcgccgccgttgctgcaaggaaatcagaaccgagaaccgagggagnccngaagnctcnnnnaaaannnccngggtttttttttcnttcggagatccgaaaataccataaggagctcgtatgcttctcgactcccttgctccccttccagggttttgttggnnaaattgnggaagacttggagaacgat

SEQ ID NO: 51825 - DNA, 330 bp, Glycine max
  Clone ID: PAT_MRT3847_17811C.1
acacaacactacagatttttgttgttaacctaactaaccaatcccccgctgcgctttaacttaaatctacatacccaacaccaaaataacaatattataccaaatatatcccctcaactcccaattatccaaccccattctcaaggtcctcacctcaaaaaacctaactaataatattatcataatataactctcatctattttttctcacttctaattcttatacctttcaactcatcaccaacatccatataaaattacatatcattttcttaaaccgaactctaaattctacaattaaaaattttacatatcaccaaaatccataac

SEQ ID NO: 51826 - DNA, 165 bp, Glycine max
  Clone ID: PAT_MRT3847_17812C.1
ccctgatcccactactaagagagatcctgggaaattataatatcctatatacatatgcatggaactaggggaaggagtgagatttatattgacgggagctagagtcataatagatgagtataatgctacagtagcgaggtatggtcaaaaaaaaaatataatgac

SEQ ID NO: 51827 - DNA, 337 bp, Glycine max
  Clone ID: PAT_MRT3847_17813C.1
ttgcccatgtttacgggggaagaggcttacaacacgctaatagtggaacttgagagaaacgttcctacattgcttggcacagagtggcctaaggataaaaaacttcctcgtcgcaaaatttgtgacatacctaagacgcgccgcctcactattctacgtagggagttaaatcttgtggaccgacagaagctcttaaaaaatagcgaggttcattgtgccaaaatgggacaagcttaattgtcaagttggaagcaacccatactccatggaacggactggattggccaatacattactgagttaggggaacgatattctgggttgccacaatgctagt

SEQ ID NO: 51828 - DNA, 201 bp, Glycine max
  Clone ID: PAT_MRT3847_17814C.1
ccgctccgtaattgggtggtccccccccgcgtgcggtttctcgtgcgtgcactcgaacgcgcgcgcgttcgggtaatgaggcccgagagaaagaatagagggagggaggcatgaccctcttgttgagtatgctctgtctattggaaaatttccacactacttatgaacagtcgtgatgatgtgagacgtgtgtgttatttt

SEQ ID NO: 51829 - DNA, 928 bp, Glycine max
  Clone ID: PAT_MRT3847_17815C.1
gaactcagatatcatatcaaagagaccgagtgagatgagatgctagcacacgttataatgtgtttcactcctcatcctaactgaagatacttgcaagtacttaatgatcttctctttcttgttaggataattacctctccaataagaattttatagctcttcgttagcagcatattgttggtatggtgtcttcgagcatgctttcgagctgcttaaactctctatccaaacaccatcagctacaaccgcatcagcatcattgtttcggtgccatgaccaatgtgcatgtgtttcatttagtattcgcaaccttccatgtccaaagcttggctctcgatacaatgagagcgggcttgaagggttcttaaacattaacgcaagaccttccctgtttcctccgtcaccaattgtcacgtacattggtccacacgaatcagcctacggctgcgagaatacgacagaagggtcatatgcatggacacggccagcaaaaaccaagtcaacgcgtgcctcataaagcaactcctccatggcttgtctcatggattcaccttcaccttggtgtgcctcattagtattataccaaggtgcatgcagcaacacaatcacccaaggtgtcttgaccctatcaatgttggcgaggtcagattgaagccacgtgtactgaagtgattgggagtcaaaatcagtgtaggaacctagcatgatgacgtgggtgccggcaacctcgaaggagtaatagaggtttgaggtggaaccactttgttggaagggcatgggccagcgagcgttgtaggcttggaagccttgtgggtagataatagggaaaatctcaatctcgtggttgccttcggtaaccattcctggcctttactagcatatggctccaccaaacgaccaaaagagtcccacaaaggttgttgggaat

SEQ ID NO: 51830 - DNA, 477 bp, Glycine max
  unsure (1)..(477): unsure at all n locations
  Clone ID: PAT_MRT3847_17816C.1
atcgaactgtccaaggtcctgtcactaaacaaagcctacacatgataaacgaacatatgccgcatacaaaggagaatatggtgaacgtacaaacagaggtggtacaaccggccgttaagagacacgttttgaaaagtcccccgccgatcaagggtgcaagtacgtgttaagacagaggtgctggtggtattgcaatagccagtatatgagaacgctagcaatcgccntgttgaactgggtacaacaacactccctgcggaaatggacgtacacgtaaggagtgctgcacggctagcaacactacacagccaaatcgagaaacaacgtgcaccacgctcagataaaccaagtaaggtacaagcagaagcgggcgccataacaaggggggcccagatgcggtacaaaacgcgagagccgctactgcaaccgaccgagtatagtaagcgtgcacacgcgttcgtcgtcgatagaggaggt

SEQ ID NO: 51831 - DNA, 810 bp, Glycine max
  unsure (1)..(810): unsure at all n locations
  Clone ID: PAT_MRT3847_17817C.1
ccanatgacgctggatatttgatacagagaaagttattctggaagctgtcatattgactgctgtggtggtgattggtctgactctatacacattttgggctgcaaggagaggccatgatttcaacttccttggccccttcttgtttggtgctgtgctagttctcatggtctttgctctgattcaggttctgtttccactgggtaaattgtccgtgatgatctatggttgcttggcagccattatattttgtggctacatcatctatgacacagacaacctgatcaagatacatctgggcttcgatccatcatcaacctgttcctgtctctgctcactatttttagagccgctgatagttagatcattgtgtcatattcaaatattccgttccttgcctgcacattatttgttttctgtgatgagggtgggttctgaaaaacaaattcttgtcaattaataaatctttggggcttgctttgtcgcaaggtgtcttgtgtatacaatggattattgtcaaaagttgttcataaatagtggattagcgatgaaattttgcacttaaaaaaaaaaacgactgtccctttcttttgtgtgttccttattttctggttatgatgattgtcggcaaattgtctatattggtgtaccaagttctgcctttcatgcactctgatgctttggccatttctggctcttcttcgtaataaagtgcatgttttagcgttaaaaaaaaaagaaaagaatgccagatataatatctcggatataacgcattggtttatttggatatataaaaaaatatcaaattt

SEQ ID NO: 51832 - DNA, 255 bp, Glycine max
  Clone ID: PAT_MRT3847_17818C.1
tctcgagcctgaaaatttgagtcactctgtaacgattcctgttgctactgataatgtggagatactccaaagaatagtaaagcagttgattggatgtttttacatagatgtgaatgagattcgacgtattggcttgcatgtttccatgcttgaaagtgcagaagcttctaaacaaggtacagtccaatacactttgaaatcatggctcacttctcgatatgtcagtattgaaaatctcgcatatcctatgggtca

SEQ ID NO: 51833 - DNA, 1688 bp, Glycine max
  Clone ID: PAT_MRT3847_17819C.1
aggggaagatccaaaagcgctaaattactttctttccattttccttcgttttctctctctttctcagtttctcagtttctcagtcatcaccatcgcagcagcaagatgtggaaccaaccattcggaaaaaccgatttggaaagcggttctcggcctctgtatccgatgatgctcgagagccctgaactgcggtggtcgttcatcagaaaagtgtactccataatcgccatccagttgctcgtaaccatcgtcgtcggcgccgtcgtcgtcaccgtccgcccaatcagtgtcttcttcgccaccaccggcgccggactggctctctacatcgtcctcatttttgttccctttataacgttgtgtccactttactactattcccagaagcatcccgtcaattacttgctcctaggggttttcactgtgtctcttggatttgtcgttggattgagttgcgcctttactagcgagaaagttattctggaagctgtcatattgactgctgtggtggtgattggtctgactctatacacattttgggctgcaaggagaggccatgatttcaacttccttggccccttcttgtttggtgctgtgctagttctcatggtctttgctctgattcaggttctgtttccactgggtaaattgtccgtgatgatctatggttgcttggcagccattatattttgtggctacatcatctatgacacagacaacctgatcaagagatactcgtacgatgaatacatctgggcttcgatctccttgtatctggacatcatcaacctcttcctgtctctgctcactatttttagagccgctgatagttagatcattgtgtcatattcaaatattccgttccttgcctgcacattatttgttttctgtgatgagggtgggttctgaaaaacaaattcttgtcaattaataaatctttggggcttgctttgtcgcaaggtgtcttgtgtatacaatggattattgtcaaaagttgttcataaatagtggattagcgatgaaattttgcacttaattataaaaacgactctccctttcttttgtgtgttatgcggtttaaattttgaatttctttgttggtgtatttttttttctttctttctttcatttttagtagaacctaaataatttatggtttatattgttttaattgtttaactcggaacttaacagtgtgcttggttatagaagagggaggaatttttatttttattttttttaatttaccttgtttgatttataaatctagtgggaggagagggggaaacgagaggttaattatctacctctaatagtttgaagaatttggaatttatgatttttgaaatgtaaacacaacattgttccacaattttattttatttttcatcacttttcttactgtatggatgtatgatagttcgtacttttcctcccctcggtttaatctctcactgcttggttaaaatttgggctttgatgtgtgtgattctaatttttggacaatggacaaatgagaattgcatttaggaattgggattactcttgatattaaacttggggtatgtccatcattgtgggttgtgaccaaataccaatgcgtgggttcttcgtgttggaaagatttttgggtccccactgggcggaagttaaggcaaaaccttaaaaactatttacctggggtcatt

SEQ ID NO: 51834 - DNA, 324 bp, Glycine max
  Clone ID: PAT_MRT3847_1781C.1
gtattatgtggaatatatagagtatacttaaattatacttgacatgataaggtacatacaaattatgtcataatataatactaggcgtacttatagcagtatatacagaatagaatgcaagtcatgatgacatgatacatgtattagcatggagctaaaatgacatgaaaagtcagatatactagactctgaatcaatgtgagctgtaacacagaaagggacgtaatgttaaaatagaaatgaaacggttgataatggtcaaagtacaaattaaaagagagaataaggtgaaaagtgaatgttttggaaaccattatcatactg

SEQ ID NO: 51835 - DNA, 982 bp, Glycine max
  unsure (1)..(982): unsure at all n locations
  Clone ID: PAT_MRT3847_17820C.1
aaaaaagtaaagtatcgagaaatattacattttttgattaaatttatatcaaaaaatgatttgtaaacaattaaaatgtcagtacataataggttgtcagaggattccataaacaaagaagtgtatacaaggatacttcttgtccaatttatcctgacacattactaattctcctggagtagatctacttgttgttaataaatcgataagagtattattccgatagataactcttctatatagttcattaatatcagagctcattagtttacccccatcgatttgaataatcggtctcaattcgggaggaagaactggtaaaagacataaaaccatccattctggttctatatttgttcggagaaaatgcttagctaattctatgcgtcgaaacaaaaaattctttcttcttccaacttttcgatcttcccattcgttttcattgtccggggatccctcttcccctaattctttccattctaccaacgaagaatcccacgcgtccgcccacgcgtccgcccacgcgtccgtacggctgcgagaagacgacagaagggtttctcgatttcgaaatatatcaaaaccttgggtagaaaaaaaaagtggtatgctgtgtttccaagattggatttcatattcgaatgaacctcgtaatcgtaagaaagtgggttttttaactacgggtctagcaaacgaaaaattgagataggatccaatccaataagatctccccctttcaaaatcggacgtgaaggtttcctttcatccggctcaagtagttataacaaataaaaaaaacaaagggttttcactttcaaaatctataaaaaaactctaatctaaaagaaaaaggtttactctttactcaagttctcaataaataccaatcaacatttcattgacatattcttttttttttattttcttaattatttatccaattctcaattaaggcanaaaagaaatgaaaagtaaagttctt

SEQ ID NO: 51836 - DNA, 689 bp, Glycine max
  Clone ID: PAT_MRT3847_17821C.1
cgtgaatcatcggacttgtcaaagtttaatctctcattccgtgctttacccaaatcttgggttagctcggcctcttaatggatctgtttctcgctgggctgaagaaagagaattacttattacgattacatggatgggtgaatataatattacttcgccatatcatgacttgcaggatatagatgatcaaaggaggacacttacgcagtgggctactactactgtaaagaagccggataatggtggatggcctaggctgcatattttttcaagaagggcaaatatttcaaacccaagctctactaatgtatataatcattcacaagacacgcctcataccccacccttgtacaacaccaatacactgaaccacataattgctccaagagatgaaccttcctaccatgcccaaaatggaaacacaactcagcatcaaacagctaattccctaatttcaaataatcatggcgcacattatgacaaaatgtcatctcatcaagctttcaagaggacccttcacacatctcttcaaccttcatcaacaagggctactaacttcttcatttgcaccaaacagcatattaagaaacttaatacatagcacgaacagtctgtcaacttcatgatgcatataagaaccgttcacatggagtatgacctaacacttccagtgacaggagctacattca

SEQ ID NO: 51837 - DNA, 173 bp, Glycine max
  Clone ID: PAT_MRT3847_17822C.1
cccacacgtccgcccacgcgttttttgtgaaactgtgttaattaactctttttggggctaattgtaacttatgaatgattgctagcttcaatattaatctttttacagaatcatagattacatgaaagtgtttacgaatgtcgacatttacagaaaagtgcaaagatcacatc

SEQ ID NO: 51838 - DNA, 421 bp, Glycine max
  Clone ID: PAT_MRT3847_17823C.1
gaaattgccagatacttcttcttcttggtatgacaagagtttgaaccttgagaaatgtgagaaattgtgtttgaaaaactgctcttgtacagcatatgcaaatgtagatgtggatgggagagggtgtttgctttggtttgataacattgtggatttgacaagacacacagaccaaggacaagatatttacatacggcttgcagcttcagagttagatcatagagggaatgaccagagctttgataacaagaagcttgtagggatagtagtaggcattgttgcattcatcatggtacttggatcggccacattcacatatatgaagagaaagaagctcgcaaagagagagatgctaaaaatatttcactggaaatacaaaagggagaaggaagatgtggagttatcaacaatatttgatttt

SEQ ID NO: 51839 - DNA, 182 bp, Glycine max
  unsure (1)..(182): unsure at all n locations
  Clone ID: PAT_MRT3847_17824C.1
gaatttnggttcgaccccgcgtccgccctacttacctaagatttaattttggcttatgctgttaacggacttctttaaagagaggattgggatacgtgcttaacgatgcccctttttgctcttcctgcatgaaatggcatggcaaaatctcttcttgattcacctgtggatccttgtgaagt

SEQ ID NO: 51840 - DNA, 546 bp, Glycine max
  Clone ID: PAT_MRT3847_17825C.1
acgggtgaaaacaacacgacagaatggggagagcggttgtactatcctccatacgaaaggatgaggtatccctcgagtccaacggatagcgccgagtgtggcgtactggatcgcacagaactggtgtcccattgcaaactcctcgaacgctcggcatgcatctttccatcctatcctctgtttggcaactcgttttcaagattcaccgacactcttttataatatctattactcctcaacgcactgtgctgatacttaatttcacttataccaaccccaggtgcatactgtcctcactttctgcgtaaaacaggatatgtaaacacttaaacacttgcaccgctcagactgtgatgtgctctatgagaatagttgcagccatactgtcagcaacctgtgattgctgtatacctagcatgaagacacaccattcatatcgtcctcgtatcgaatatgcgtataggatctctcaaataaggctgtcgtgccggacactgcaatgaagcttatgcacggtgcatgccaggagacttgataacctgacac

SEQ ID NO: 51841 - DNA, 825 bp, Glycine max
  Clone ID: PAT_MRT3847_17826C.1
caacagttagcatgtcaataactctataaaaccttgtttggcgcacaatattcggcccgaagcagccctcaacaacagaacaactacttcttcaaacaacaacagattcaagttcatagttttttttggtaaaacagaaatggcctaccactcttctcaaaattcccaacctgctctccctatgcacctatgtttcttcttgctcaccttgttcatgttccttagtttctcattttactcaagctacgagccaataatggagagtttcatggaccaagtgaagttggttctaatggtttctccccttctgcttctgctagttgtgcacttcctttgcaactatggtagtggaggggttttgtcttcactgattcctcttccagagagagagtcactgcacagagcaggtggaactccttggggtgttggcttggttcttgttcttcttctcttcatggtgtcttaccagtcttctttccaggaacgttggtttcctctgctcacaaggtgaaaagttttgggttcttagtttttttatccgtaaagtttaaagacaacaattgagttagattcttgattggagttcttagttatatggtaacatggcatggcatggaactttgtttgtaattagtgtaatttagtgagttctcagggattttcagatttcatttttttttttttttgtatttatttgattttgttgaaattaaagggatatatatatggtgtactgttcttgcaatatatgaaactgtgttttagggatatggtgttaaaaaaaaaaaaaaaaaaaagattttcaggattttttggcaaaaaaaa

SEQ ID NO: 51842 - DNA, 467 bp, Glycine max
  Clone ID: PAT_MRT3847_17827C.1
ctatggatcatctcatactcttttttttttcagggacagacatgcccatataaaaacatgtcgttcaaaaatccataaaaaagttggctaaatgcttcactataactcacaagccgggcccatgccaggagatccatatataacggattgatgttccattgtgccctaaacacaagaatatagcctacatactttgaccaataacctaacaacttgcaattttttatttaaagccacggtttaataaatcacattgttttgtaaaacagcaacacgttcaaagagcttttcttcgaaacaggggtgcgcaaactatacctataacacgctaagtattggccacgtggaaaggaattaccacaagtgctaaaaactgggggcagagggtataactaacataagtgggtatcatgagttattttctgacaatagtggaacacttcagcgatgttttggcttttgcattg

SEQ ID NO: 51843 - DNA, 191 bp, Glycine max
  Clone ID: PAT_MRT3847_17828C.1
acggactttttttctgtcgacgcgtaagtgattttccggtgggtcttgatccggtaagaggaagaccgataagttccaatatgggttcatgggatccaatggatgctcaacagacggacttaaaaatagccatctactctgggttgcaatgtatttggggctggagaacacgaggtggtactcaataattt

SEQ ID NO: 51844 - DNA, 312 bp, Glycine max
  unsure (1)..(312): unsure at all n locations
  Clone ID: PAT_MRT3847_17829C.1
cgaccacgcgttcccttgctaccaacactgancttattcgagcttcgcaaaaataaatcttnaaaacgtaatggagatagccgggtgggttagaactggatgaaagggtactgtgagaagaaagaagaaggctgtccacaagacaacaaccacagatgacaaaaggcttcagagcacccttgaaagaatatgggagaatgccatccctgctattgaagaggtcaatatctttaaggatgacatatttatccagtttctaaattccaaagtttaagcattcattgcttgtaatacttgggttgacaagtggtt

SEQ ID NO: 51845 - DNA, 583 bp, Glycine max
  Clone ID: PAT_MRT3847_1782C.1
ccacgcgtccggatttttattgtgatgcacacaggggtttggggcaatctgcaccaagcatggctgcgtttacaaaggccagagttgctgctgcgaagattttccgtataattgatcacaagccgaatattgatcgaaatagtgaatctggcatcgaactagacacagttactggacttgtggagctgaaaaatgttgacttttcttatccatctaggcccgaggttcagatcctcaatgacttctccttgaatgtacctgccggcaagaccatagctttggtgggtagcagtggctctggcaagagcaccgttgtatccctcattgagagattctatgacccaacttcaggacaagttctgttagatgggcatgacattaaaactttgaagcttagatggttgaggcagcagataggactagtgagccaagagcctgcattgtttgcgaccacaatacgagaaaatatactgttgggtaggcctgatgcagaccaagttgagattgaagaagctgccagggttgctaatgctcattccttcatcattaaacttcctgatggctatgaaacaccggtaggaga

SEQ ID NO: 51846 - DNA, 900 bp, Glycine max
  unsure (1)..(900): unsure at all n locations
  Clone ID: PAT_MRT3847_17830C.1
gttggtctccttggattgcttctgttgtttcaggtgattattagtaaaatacagtgtaattaagaaaggtgcaaagtagcatgatgatctggtattgtttttttaaaagaggctattagtaagattattttgtctgatgacttttcactgtgtttgctacaagttgcataatatgttccattccacttttcagaagctgattttttctattattatttgtctcttatttcctcagaccactagagtgagatttgtctttgatgatgaggctctggtttgttctcttcttacttctccaagaactttgtgctttatgtattgcattatttactttcttagcacttacgcttcaagtcttcattatttactttcctaaaaacctcagtagtttgtcttattacagctgaaaaatgagctgaatttgttaattcaaattaatctgaaaggcccacaacttatacacattcttaaagcacaaaatgtcatgccattatgtaaatgaatgtcagataatttatttttctttatactgcaaagcaagtggcccttctaatcataataaccacaaacagagaattcgccccattgatttctgataacaattatattttcaaacattatgctttgtagcaaatctctacctcttttgtttgatgcaaaaggactaaattgcatgaagaaacacactatgttctagagttttgcagcttgaccgagtgttactttatatatggttnatatttatatgaaattatcatccagttctggctaccatcctagtatatgtaacttcagcagcatattgtgtgcatgacttcatgacttcatgtatatttattcttctctccttttagttattcacattagttttatacaaaatttatggtttaggaggtaaag

SEQ ID NO: 51847 - DNA, 459 bp, Glycine max
  unsure (1)..(459): unsure at all n locations
  Clone ID: PAT_MRT3847_17831C.1
gttnagatggagggaaaaaaaagaatggaaaaaaaagaaggaaatgggggccaaaattgggaaatttcaaagtcatttttcaaatccatggccttatttaatccccaattttttttggaatgttttttgggattgcttgaaatttttccaaataatttccttcaattctttccacggtgaaattttaggtggaaagacctgccacttggccgggggggtttttggggtatggaaggccttttgggctgggcttgggtacaagggtggggctaaaggggttctttgaaactttggttatgcccctagcttaaaaaaaaatttttcttttttggtgagtttattaggcaaaaaattttccccccccatttcccttaaaaaacaaccttagggccgacccctggggggaacccgggggggaaacctgggccgaccccttggttgaccccctggttccacccg

SEQ ID NO: 51848 - DNA, 267 bp, Glycine max
  Clone ID: PAT_MRT3847_17832C.1
ggtctttgtgttgggttaccaaagcctccggctcccgagttgcgcgtgtagcaactcgggatccgctgtttcttcttctccggcggcagcggcgaaagagactaatccttcgccgctgcctcatgttgcttccaattctggatactcttctacggtgactctggagctgccagggaagttggaggccttagaggaaagcattgagaaggtgatttatagatgccggtttatggctattctgggagtatttgggtctttaactggatc

SEQ ID NO: 51849 - DNA, 610 bp, Glycine max
  unsure (1)..(610): unsure at all n locations
  Clone ID: PAT_MRT3847_17833C.1
agaaacggggggcgaaaccgaagggaaggccggaaactaacgcaaaaattgaaaaccgggaccggaaccggcacaattatccccttattgaaagggggaggaaaaaaagacccaggcagagccaaggtaaaacccggtcaaaaaaaaaaatgggcaacccctccacagcaaaaaaaaaatccaaacaaaaaaaaaaaaagctggggcgggggaaaaaaaaaaaaaacccaaactaatagtgtgggggtaacagccccccaccccattggaaaaggaaaaccaaactccccaaaaaaaaaaaaaaaaaacccaaccaaaagaaaaagggctattggggcccgggggggaaggtgtattttcaaaaaaaaaggaaaaggccaaaaggttttaccccaacaacccctgaaaaaaaaaaaaacggggccgacgcccaagggggataccccaaaaaaacaaaaattgtggggggaggcgggaaaaagaaacaaaaaacgggagcggtaaaaaggaaaaaaaaaacccaaaaattggaaaaccccccccacncccaaacctggaaaggggaaaaaagggggccaaaacccccaaaaaaaaaaggggggaaaggggg

SEQ ID NO: 51850 - DNA, 472 bp, Glycine max
  Clone ID: PAT_MRT3847_17834C.1
tctagctatgtcgatcgaactgtccaaggtcctgtcacaagcatgccggcaaatagccaccaggtagcgaaaattgtagaccaaagcggtgcccacccaaaaggcgttgagggggtaaagtacggcggtagcccgactagggtaggattcattgcggacgtgggccatagtagaagcagtgtgcgagtgtgcggtacgaccgccatagaggactaaggaggctgtaattagaagggacaagggtagttgtggcaccagtgaggagagagggagagaaagaaaaacggttgggcgcggagagcgggaagtgcagagacaaaggagcataggctgtgtaagtttagcccaaaaagatgggcgggtaggaggcagtgtaaagtgtagcaaggatatgtgtacgtgataggcgtggcaggggacaaaagtatggcgcgcagtaagttaacgtggtaagcagcttcgcaaagcatgg

SEQ ID NO: 51851 - DNA, 1215 bp, Glycine max
  Clone ID: PAT_MRT3847_17835C.1
ccacgcgtccgctaatttaagagtaaagattgtctatcagtgaggaagagcaataagagtcgttagcggccggcccaatttttatcaaccaacgcaacatgtcacggacgatggagtgggcggcgagggcggagcacctccgcggcattcccagaaaactcgtgattgcggcggtgggcggattcgccaaaacggtgtcgtctttcctcaacaccgccgatgttcacaacggcgacactctcctccgcctcgtccgctccagaccccaccgcgtccccctcattaccgttagcaatcacatgtccactttggatgatccggttatgtgggggttcaagggttttcctatcttcgacaccaacttagctcgctgggttctcgctgccgaagatatttgcttcaggaatgccctctattcctatatttttcgggttgggaaatgcatacctattacgagaggtggtggaatttatcaagagcacatgaatgaagctcttgagcgcttaaatgatggagaatggctgcatacttttccagaaggaaaagtgtatcaagaagatgcacctataaggcaattgaaatggggaactgctagtctaattgttcgagcacctataactccaattgtattgccaattgtccatcatggttttcatgaggtgatgccagagaattacatgtttggtaaacgacctcctataccattatggaataagaaaattcacatagttattggtgatccaattgaatttgatcttccagcaatgaggcaaaaggctatttcccagtctcgtaatgagtcattccctactattgggtggcccagcactcctgatggtttggatgaagcagcacaaagatatctctacaccacaatttcagagcaaatccgtgctgcaatggagagattaaggtgtttgggtaaaagttttatgaagtcataggtaggttcaaacctacctaagtcggagattagggtaatttagatcttcagttgatcaattgaatcattctttgttgttgtaattgatggttgagtgagagatcttaacctcggcttcttaaaatcaaatgtcattcattagaatagacactagttttgtagggtaagatggctcctccccctcccaaaatttacaccccaaaattattagatgggctagtatttcaaaatccaaagtttcattttaaaaataaaagtttcagtccttgatg

SEQ ID NO: 51852 - DNA, 439 bp, Glycine max
  Clone ID: PAT_MRT3847_17836C.1
ttttttttttttttttttttttttttttttttttttttttttttttttttttttttttttttttttttttttttttttatatttttttttttttttgtttttttttttggtttatttttttttttttttctcttttttttttgagtgttctctgcaaagggggaaaaaaactcatttgaaggccaaagaaaaggaaaaaaaatgaataaaagaagaaaaaaaaaaaaaaaaccccaaacaggaattaaggagggaaacgaaaaagaatttcaacaaaaaaagggaggggtcaccccgagacagaagatggtgagccagggggcggaaaaagagatagagaagcacatcaaaggacccccccaagaaaaaaaaaatgtcggggaacacctaagagagcggggcaaaaaatatcccgcgaaaagagggggggcatgtccgg

SEQ ID NO: 51853 - DNA, 353 bp, Glycine max
  Clone ID: PAT_MRT3847_17837C.1
accctcccgagtttttaaacggttatggcccacttaaattccctaccacttggttttttccttttagggaggagggtttgccttcaaaaggaattcccaccagtttctttttttaaggaccctatggtggcttaagtcctgtcccgggttttaaataaatgggaaattgaaggacccagtttccttattcagtggggtttgcttaagccattgttttgaaggggctgaatgtttttgtattggccattaataaagaaagtggggttggttttaaaaaaaaaactcccttttctaaaattccatttgattccaattacctttgtaaataattaaattgggggggcccttttaaa

SEQ ID NO: 51854 - DNA, 279 bp, Glycine max
  Clone ID: PAT_MRT3847_17838C.1
gcaaggtgattcaactatacccaattaacttaccatggaaatggtttccctagttgccttactttctctaatcatccctggtttttcttctaacattcaagctattattttcccaaagaagaaaccacaaaacccttccaccagtgccacctccttttccatatattggaaacctaaaacctttgaaaaccccctctaacggttctttaaccccgccttaaaaacacaacgggacacattttctctctgtgtttggtctcgcctctccgccgtcgtctc

SEQ ID NO: 51855 - DNA, 354 bp, Glycine max
  Clone ID: PAT_MRT3847_17839C.1
ggaataatagagaaaattaaggagaagcttcctgggacacatcaccacaacaacaaatagactcatgcttttactctcatctcatctcatcatcgtactgtaatatatgcgtagtagcatttattacagtacgatgatgagatgagatgagagtaaaagctactacgcatatatgttgctactaattactatatgtatcgttgagtcagctactgaattatatatgctccgcttagttaatctttattaaactctgtcaagtatacaatcaaatctttaagtagtggtgtaaggtcccctcctgtcatatgattgcactttacctaattcagaataatttataatttatttagt

SEQ ID NO: 51856 - DNA, 1237 bp, Glycine max
  unsure (1)..(1237): unsure at all n locations
  Clone ID: PAT_MRT3847_1783C.1
ttcatgcgtccgaacggaaactggtgacacaggttcccacgcgtccgtacggtgcgagaagacgacagaagaaactggtgacacagttttgatagggagcgagagagagagagaaacaaagcagcacccatttggatcctctcttctcttctttgatctccgttaccctttttgttttctcaacagagagagagagagagaatctttcgaagttcgtttgcgtgtgttgtgtggtcagtcaccgatggcagcaccacctgcgagggcacgtgccgattacgattacctcatcaagcttcttcttattggcgatagcggtgtgggaaagagttgtctgcttttgcgattttctgatggttccttcacaaccagttttatcaccaccattggcattgattttaagataagaaccattgaacttgatggcaaacgcattaagttacaaatctgggatacagctggtcaggagcgatttcgaactattaccacagcttattaccgtggagccatgggtatcttgctcgtttatgatgttactgatgaagcatctttcaacaatattagaaattggattcgcaacattgaacaacatgcttctgacaatggtaaacaagatacttgtgggtaacaagggctgatatggatgaaagtaaaagggctgtgcctacctccaaaggtcaagccctttgcttgatgagtatggtatcaagtttttcgaaaccaagtgcaaatgacaaacatgaatgttgggaggaggttttcttttcaatagcaagagatatcaagcaaaggcttgcagacacagattctaaggctgaacctcagactatcaagattaaccaacccgaccagacagccacagggggtctagcggctcaaaaatcggcttgctgtggttcatgaaataaataacaagtcagaatctgcagttagagggtgcagattcaacactcgccctcatatgggtgctatagttattttgatgacatttaaaagtgggagcatgtatttgtccttgtatttcccaactgcaaagattatgttttgaagatagtgttttaaatttttcgtttacttagctgtcggatttgttgtgattagttcgtttgctccactctctcctctttcatttgtacaccgactcttgaaagaaaatctttcgattggattcagattgattattagaaaagcttttatctgttgcaaataatattccaaacgatcgtacgtntactaa

SEQ ID NO: 51857 - DNA, 225 bp, Glycine max
  Clone ID: PAT_MRT3847_17840C.1
agaagtccaggaagaagtaacttaaagagacagctctttcaatgcagctgagaaggaagaacttcttaaggagatccagaatctaagaagcaggctgaattatgtagtgatgcaccagttaaaaagtccaccgacaaactaagatcatccttatcattaatgtcaagatccattcaactccgaaaaagtggtgtattttctcttgataatggtggagatgagcta

SEQ ID NO: 51858 - DNA, 433 bp, Glycine max
  unsure (1)..(433): unsure at all n locations
  Clone ID: PAT_MRT3847_17841C.1
tacggctgcgagaagacgacagaagggtcaggcaccggggaaggaggtctaatttacggagtaaagcagtaagtataagggcttagtgctccgattgcgccttaggactaggactgataggtaaatgcccctgactcttccaatgaaggtgggtaggcttttcttttgtttaggattggcaagaggatggctgcctcggtctcaaagctgttagataatgcgctcttatcaatacagggacgcgagaggaattcctcgaaggtagtccctaaataaagggatagggcattatcggtgtggggatatctttgaatatgactcttagtataagaaggaagaggttggggctttctttctctcctgtttaggaagatagcaggcatcaagacgaagagataaattcattcccnaaaaaaaaaaaaaaaacaaacac

SEQ ID NO: 51859 - DNA, 383 bp, Glycine max
  Clone ID: PAT_MRT3847_17842C.1
aactaaataaactcgttcatgtaaaatccttacgcaaactaaattaactaaataaatcgtacatggcaagcctgcacgccaactaaaggctgacttaaattatgagaagtgggacacactatgcaaaatccaaatagatgaagatctaaggtttgaccatttctgggcacaaaacggggggtaggggagatttaacgattagccttggcaactctagtaatttgatcctatcgcttgatagcatgactagcggatgaaccttgggacgcatgcagaagttgatatgacactattacatgacgtgttttgatgtttctgtgaccagatcttcgaggacctggagtcagaagatgaagagtcaagatgaccacgaagaagggggg

SEQ ID NO: 51860 - DNA, 356 bp, Glycine max
  unsure (1)..(356): unsure at all n locations
  Clone ID: PAT_MRT3847_17843C.1
gggtaaggctttttttttttttttttttttcttttttttctttccagggaaagattaaaaaaaaaaatgggaaggactaaagcaacaccttttttgagggtggaaccaggcgcacataaaaccatacccacatcaacgnccggggtgccctccctaaaggggtgtaaaaaaagaaatcccgtgcttgaaaaaaaaaagccccccataagggccgcgccggatcccccaacccctatagacagaccgatgctggtggaaaaaacacccgggtggggagaaggaactggaataaaatccttcaacacgacggggggctaccaaggcttttttatccccggtaaagggcccctacaaac

SEQ ID NO: 51861 - DNA, 1415 bp, Glycine max
  unsure (1)..(1415): unsure at all n locations
  Clone ID: PAT_MRT3847_17844C.1
ccagcgtccgcggacgcgtgggctcgatttcttcctttccctctttgcaaacacaattctccgattcagttcataatttcgatcgcaaagcaaatgatcccacaacaagaacccgatttcaatctcaatcacctcaaattatattacggaaagctgtttccgtttgctgatttagttagatgggtgtcgtatggcaacgatggaaagcaccctggttgtgatcaatcctacattgggcgaagagagttttccttcactctggagaatgatatatatctgcgtttccaatctttccacaatgcacttgagctcgaaaactccatcaaagaaaagacccctgttaagatagatattggacctgtctacactgttgatcctgcaaaaaggaatgcctatgcacagagtggcgataataatgtctttgccccagttgagagggagttgatttttgatatagatatgtcagattatgatgatgttagatactgctgttcgggtgccgatgtttgtttggtttgctggccgttgatgactatagcgatcaaagtgattgatactgccttaagagatgactttggtttcaagcacattctctgggtatacagtggtcgcagaggtgttcattgttgggtctgtgatggaaaggcgagaaggttgacaaatgagcaaagaggagctattgctgactattttcgtgtctacaagggcaatgaaaatagtcacaagaaggtttctttgatgggtgctgctcttcatcctttcttggcgacatcatacactaatgttctcaaggactattttgagaaaaatctgcttacaggtcaaaatttacttgctatcgaggagagatatgagaagatccttggcatgattcctgatgaatccattgcttctgaacttaggggaagatggcaagatagtaggcggtcttctagtgcaaaagaagacatcaatgttgttcgatgggaacagtgcaaacagttgctgcaatctggaaaacataaggcacaagggctgcgtcggtgcattgaagagattgtgttctgctttacctatcccaggctagatatggaggtttctaaacacatgaatcatttgcttaaagcaccattctgtgtacatcctaaaacaggccgagtttgtgtccccattgatccaaaacggtgtgaggagtttgatcctactacagtacccaccctttcacaggtaaattcattctgcaatgatagttttctgatatgcattccagggagagaaaaactttccaaaacggtgcttagttcaatgggtatgtttgtatttactactttcggatctggaacttgcataaagacacatgcctccttctncacacattgtcatgtgtgaaaaggaaacacataaagatgctgctttctgagaatttctgaacatgt

SEQ ID NO: 51862 - DNA, 838 bp, Glycine max
  Clone ID: PAT_MRT3847_17845C.1
ccccgttatcgaggctcgagtacggtttctttctctttcaaatttgtatccattttgcgaatcgaaatccatccatcaatctagaaccctgccttccctctctctttctctgtgtctagggttttaggagttcgaagcatcatcatggcttcggtggaccccgagatcgcgaagacgcaggaagagcggaagcgaatggagcagcaactggcgtcgctcacctccgtcacgtttgataccgatctctacggcggaagcgacaagggctcctacctcacttccatccctgccaacgaagacgacgagaatctcgacgccatggacaacgaggtcgcgcgcaagctggcttcttacaccgcccctaagtcgcttctcaaggacatgccctccgcccccgactccgacaacgacatcggcttccgcaagccgcagcgcatcatcgaccgcgaggatgactaccccggacccttcctcaaccagatcatctcgccggagcgccacgacccctttgccgacggcgagaagacccccgacccttccgtgaggacctacgccgatatcatgcgcgaggaggctctcaagagggagaaggaggagactctgaaagccatcgctaagaagaagaaggaggaggaggaggccgccaaggacgcgccgcctcaacagcagcagaagaggaggaaccgctgggaccagtctcaggatgacggtggtgccggcggaagtttgggtatcccttttccttcccactaactaggtttacttattcacctgtcgctctctttcgcatttcgtcgagcaccttcgctgcacttaatatgtccacttcacctcgtgc

SEQ ID NO: 51863 - DNA, 323 bp, Glycine max
  unsure (1)..(323): unsure at all n locations
  Clone ID: PAT_MRT3847_17846C.1
ntcgtagtaagtgggaattcngatcgattanantcnaaattgccatttgatcangnggncatcantntacgtganggagantagacgngncgttagngnngaanganatacnncccacatggtaanagccnggtntcangnattantncagcttcggnaccgccacnggcgtgntanaanaatangnnanatcgcanttacgnagtgcatttntctnccattcttncantatcnncggcaacacacgtggtttttttgtgcaacaggnngacaagttcctgcacgaaattacagaggnngnggagnacnccagnngcagggaa

SEQ ID NO: 51864 - DNA, 164 bp, Glycine max
  Clone ID: PAT_MRT3847_17847C.1
gggccaccccacgcattccgccggctgcgaagtcgacaaaggggagagacgtgttgagctgctaccctttccattttgaatcctatgttttcaatcttattcttttttttcatttttatgtttgatatttcccttctccatcatctctcgttccctccgttgtt

SEQ ID NO: 51865 - DNA, 252 bp, Glycine max
  unsure (1)..(252): unsure at all n locations
  Clone ID: PAT_MRT3847_17848C.1
cttatactaatctatttactaggnnactaacacatcacagaaagcgagacccaactattacttaacatcactttagattacctcctgcaacttgaatctttacaccaactaaagactttcatccttttataacacaagcattatactcatgaactcgcttagtactatccatcatgtacaaattaatcgctatttccacaccccatatcttgacattctaatccttaaccttataatatcagactacacctc

SEQ ID NO: 51866 - DNA, 519 bp, Glycine max
  Clone ID: PAT_MRT3847_17849C.1
catgagtttcagcatctcagattctcttgtcatgtaccgaatgtgaccggagcgtccgttatcgaggtggtatctactcatggtcataattatttttgaaaatatgttttttgcgctggcattcctttcagcaaagttcatgaagtaatttttcttttcttcaatatggacttctttatcttagctgaagctcagaagaaactggagcatgcttttgagacttcattaatttatctcaatgattggatatatactgctgttgatgcctggtatttggtgactttaagaaactctgaaggtcctgtatagtgttaggttctgttatgaattgttgaaaatcaatctataaatgagagtgtgtcctaatttgacatcacctctccccttatgtataagagatgctttattcctgatgctaaactataaattttcaaatcatttagaaaaggtttaagaaatggctgaatggaggcaagtaatctatcctcaaaagcatgtagttagatgatttctgatgat

SEQ ID NO: 51867 - DNA, 212 bp, Glycine max
  Clone ID: PAT_MRT3847_1784C.1
cgaacacatggacgtgctcataaatagaggcattggtgctgtggtatatgcataatgggctcattatgttgagccacatgtgcctgatgaaagccctgaggatcactttgccgtcttccacgaggaggatgctactaaggatgatatgtctgcaaaaggtaacaaccatatacagagcgatgttggcgatcctacactaactactgatggga

SEQ ID NO: 51868 - DNA, 438 bp, Glycine max
  Clone ID: PAT_MRT3847_17850C.1
ggctcgagataaaagccagtactggcctctcatgaaccccctgccacctagtgtactacattgcatgctgctcaaagactgatcttcatcctaatgatactgaatacaatcgtcatctgcaagtattgactactcatgatgcagataattccagttatacacatgatagatctgctcctgctgatggactgtctgtcttttgcacgtcctttaaagatctgaatcatacatgctcggcgctgggcttaaagttgacaactcgatacatagaaggcaaggatttatatcaatgagaccgagaatatggtcgatgcctaacatggagacctggactagtgagtactagataggaaatgatacagacagtctcgtgttctatgacatgtacatgaagactgaccgtcatgtatatgataacattagagtcaacactgatat

SEQ ID NO: 51869 - DNA, 1189 bp, Glycine max
  Clone ID: PAT_MRT3847_17851C.1
gatgtattagtattttcctaaaaaaaagattccaccaccaaattatatatgatattttaagcgttgtttggggaagggtgattagaccccgactcaattacaccacgcttctaaattctgagaatgaattcgtaagatcgaagcaatagcctttttctctgccgccactggtttcgatcccacacccacaaacgcaaaccctccatcctttgaatgctcttgcgttttcctttcactacctcattcctaactcacacacacacaacgggtgatatcaatgtcgactcctgctaggaagaggctcatgagagatttcaagaggctgcaacaagacccgcctgcaggaatcagcggggcacctcaggataacaacataatgctgtggaacgctgtcatatttggtcctgatgatactccatgggatggaggcacgtttaagttgactctccaatttactgaggattatccaaacaagccaccaactgtacgatttgtctctcgaatgtttcatccaaacatttatgcggatggaagtatttgtttggatatattacaaaaccagtggagtcctatatatgatgtagctgctatactcacttctatccagtcattgctttgtgatcccaacccaaattctcctgcaaactcagaagcagctcgaatgtttagtgagaacaagcgtgagtacaatcgaagagtgagagaaattgtggagcaaagttggacagctgactaagcttatcttcgcatgcttgtgggcctttgaagtcatgaattagattgcactgctggaataagaatcattgtgccaacttactgaattttatgccgcattccttactcttctgaatgttaggatcatctcatctttaattcattgtagtttatgcattgtccatgtcagttcatgtattatagaatcctgtcaatttgcaccaagttgttgtcaacacaatgtataagttgtagttttctgaattggttacgatcacaaggatttgttaaactagcttcaatttctatggtttcgttgtcacattgcatctaggatcttgctttcaacctttttgttgtgacttgacgtactgcctatgaatgagatgatttgatcacagcgctcgctgccagatgacggaaaacctgcactccagatcgcgcggtcacatgattacctctcccagagagtcac

SEQ ID NO: 51870 - DNA, 524 bp, Glycine max
  Clone ID: PAT_MRT3847_17852C.1
cccacgcgtccgggagaggtataattgactgaacataattcataaatataatagcttatgtgctccaaagcacactacttatactgacctcagttcaaaggttttattttaggcagttgccttgtttttaatcgcagataatctggtgaagtgcatgtagtaccatatgcattgtaattctatcataatttttaatcagaggctgagatgtgtcaatcctttaggtcattctttgctcaaattgtcatctcatgcatcaaaatcatgtgttctttttttttttttattgaatttttattttgggcataaaaggatagagttagtgttccctttcctgggataggaatgggctaaacaaaattctgataatatctccaagaatggaaactttggaatgaagttggtttcatacagtagtgtttctgatgatctctggatttcagctttgaagaaaaattttcccctgcatattgaaaactcatttggtaccttatcttttcactgtttcatctccaaatgatatt

SEQ ID NO: 51871 - DNA, 456 bp, Glycine max
  Clone ID: PAT_MRT3847_17853C.1
gggaagggtgattagacctccattcaattacaccacgcttctaaattctgagaatgaatatcgtaagatcgaagcaataaccttttttcctctgccgccactggtttcgatcccacacccacaaccctccatccttcgaatgctcttgcgttttccttaaactgcctcattccgaagccatacacacataacggtttttctaggtgctagcaatgtcgactcctgctaggaagaggctcatgagagatttcaagaggctgcaacaagaccctcctgcaggaatcagtggcgcccctcaggataacaacatcatgctgtggaatgctgtcatatttggtcctgatgatactccatgggatggcacgtttaagtctgattcttcaatttactatagattatccaaacaagccaccaactgtagttttttatttttttacactctctcgaatgtttcac

SEQ ID NO: 51872 - DNA, 186 bp, Glycine max
  Clone ID: PAT_MRT3847_17854C.1
ggttttgtgtttttatttttttttttttttttgaaaacaccccaaaaaaagagactccatgctatatacattcatcatcataaaccactacattaactatgatggattgagtggtgggtggctgactagcctaaaccaagtatggctgactagggtccatgccatccaattcatccactgaaacca

SEQ ID NO: 51873 - DNA, 402 bp, Glycine max
  Clone ID: PAT_MRT3847_17855C.1
ggctcgagaatagattaaccgtatatgtttttatctctagatattgcgaaccttgccctttggctataaaatcagcaaagacatgggttttagagacattggcgcttaactgcccccagggtttcagttctacaactgagacgagggagggatgcttttttgcctttacagaaagatcactattgatgaagttgtagagtggcacctttatggatattgacatacacacgtgcgagcaatggagactccctgtggtggcttaacttaatgcaaacgagaggagcttcttctgctgacgcgatcgtaaatatgctactggattggggaccaatacagctacgacatgtggttattgataagcaacagtgtaggatcgtccagtgcttgctccttacactcttg

SEQ ID NO: 51874 - DNA, 519 bp, Glycine max
  Clone ID: PAT_MRT3847_17856C.1
agcccaagttcaacccattttctggaactggaagacgcttggatggaaacccattaaattatcagcctcctccagtttcttcttcagggtccaaggaccagaaatctgatgttgtcaattcgctgtcttctacagcttctagttcacaaagtaatgctcgtcaatctcagggcaagcttgtgtttgggtcaaatgcaaaccgtactaatgagacaggaaaggcgaaagagtcaaaaccagagccacctaaagagaaagaagagccgaaatttcaacctttttcagggaagaagtattctttacggggttaatttataccaatcaagtaaattaaaatgtccttttacttttaaagtaagttactttgttgatctatgcatggatcgatgtctattgcaaaaacttgtattttttttattgtattatatgcagtagatagaccagtagacgccacagcaaatacctttgattacttgtgaatgaagctcttgacgaggtttgcaatcgtgtctggatggt

SEQ ID NO: 51875 - DNA, 1645 bp, Glycine max
  Clone ID: PAT_MRT3847_17857C.1
aggagtaatggtgattgataattcgacaatagtgtgatcacacggtaacatgaggtaacacagggaacaatgaatatatcctgtgtgatataaagacatatatccacacgcacacacaaaacaagaaacagaagtttcaaacttgaattgatactatctaaatgacacagtaactcacagtcactaatgtgcaatgaccgattccatgtaaagtttgaatactaatactaataggtatggcttatcgtactaaaagaagctgaaaccaagctacgattactgcctacaaaacttggaaatcgtatcaagcatgtatctactctctgaagagtagttcaccttatcagccttgaccacagtaatcttcaccttctgttcatcgccatataattcctctttgattttcagcctaaacatgaactggttgaagagtcggctcttgattatttctccaaacttctcatcatcctgctcttcatgtttcaaaaagtacagatcctttgctgagtaatccataatctcttcccctgcttcttggaaagcagttacccaagctaatcctgtgccatcaagaatttgaacttggagaaggtatcggtaatcacactcctcaaattcttggttgcatctatcacattgccaccttgtgtttcctagcctagtcactttcttattgcactgtcgatctccaatcatcagagggcaagctgtgtaacaaaatgtatctgtcttgatgaataatatagcagcccttactgttatccagtctggcttgtctgaccgccctagaccttcatccttgatttgagacacagttttgcggacctcattcttcaatgctccgggaataatgtccttagaaatcgataaggaggcagaatcttttcctaccagttcaaaccattctcttaagctatgagcctcaggaaaatcaggatttatgaaaagctgcgtggtagaaatagaacctatcgactttccactaaaatcattcaccttcccagttttgactgctaaaattgggaaaaatccagcatccaccatgtcttgaagctgttgtccttccctgttgcagaattcgccccacagtgtaagttcaacactactgccagaactgtccttcagactcaaaattcttctctgggtttccattccattcttcctcaagatgggaactgaaggattcacagatgtcactaccccaataacatcaaggatggagttattgtcaacattctcaatgtcactaataggcctgaaggagaactgctgtctaggtatagaaccatcctcgtctgggcagagctcaaccattgaagatgattccaacaaaatttcccattcattcttcaaatggttgaaattcttctgagcaggtttcaagctacctttggatatcatgtaaactttaccaacctcaattacattatagaagcggtcaacaacagcattaaagcatgttactcgtttttcacctccatcagattcaaggagatctaatgataagtcttttccatcaccacgagcgttattacagcggcgcagatccccgttagcagttacccttgccttgatagcccaccgaccctgatacgaatttaaaacagctataggaatgatgcgggatggtaaaacatttttccga

SEQ ID NO: 51876 - DNA, 1792 bp, Glycine max
  Clone ID: PAT_MRT3847_17858C.1
actgatcattgattaggttttcctctgcgctttccgaagctccttaactatctatcctcgttcaactatcgatcctaccaaatccttctattgcttcaaaatttacttgtatcttgttctactgcctcttgttttcgctttaactgcctgctgcaagactccccagttcgcttcttctctgttctctctcatctcctcagatcgatcaagcatcagggggctttgagggttgattctctggtgtggtagcaatcagcacaatagaaaatgttttttgacggatatggatatcatgggacatcatttgagcagatatatcgatgctacccagcttcctttattgaaaagccccaaattgaaagtggtgacaaaattatcatgcctccatcagcccttgaccgtctagcatctcttctcatctcatcggatcgatcaagcatcagggagctttgagggttgattctctggtgtagtagcaatcagcacaatagaaaatgttttttgacggatatggatatcatgggacatcatttgagcagatatatcgatgctacccagcttcctttattgaaaagccccaaatcgaaagtggtgacaaaattatcatgcctccatcagcccttgaccgtctagcatctctgcatattgattacccaatgttgtttgaactccgtaatgatgctgccgagcgggtttctcattgtggggttctggagttcattgctgaggaaggcatgatatacatgccatactggatgatggagaacatgcttttacaagagggggacattgtcaaagtgaaaaatgtgacacttccaaaggggacatatgttaagttacagccccacacaaaagactttttggatatttccaatccaaaagctatcttagaaacaacattgaggaatttttcctgcttgactactggagatagcattatggtggcttacaacaacaagaaatattacatagatattatagaaactaagcctgacactgccataagcataattgagactgactgtgaggtggactttgctcctcccttggattacaaggaacctgaaaaacccactgcacccctttctgctgggaaggcagcagtggctgctgaggtgatccctgctgaagatgagcccaagttcaacccattttctggaactgggagacgcttggatggaaaacctttgaattatcagcctcctccagtttcctcttcagggtctaaggaccagaaacctgatgttgtcaatttgcagtcttctacagcttctagttcacaaagtaatgctcgtcaatctcagggcaagcttgtgtttgggtcaaatgctaaccgtactaaagagacaggaaaggcgaaagagtcaaaaccagagccacctaaagagaaagaagagccgaaatttcaacctttttcagggaagaagtattctttacggggttaaattaaaatggccttttacttttaaagcaagttactttgttgatctatgcatggatcgatgtctattgcaaaaacttttatttatttattgtattataagcagtagatagaccagtagatgccacagaaaatacctttgattacttgtgaacgaagctcttgacgagggttgcaaaaaaaaaaaaaaaaaaaaaaaaaaaaaaaaaaaaaaaaaaggggatcacactaaagaggagggctccacttcttatgtcaaagtgggcggccgtgtattatggagctcctcaaccccaaaattaatttcgtaccggaccttgagggggtcccagcttcccttatactgagtgt

SEQ ID NO: 51877 - DNA, 233 bp, Glycine max
  Clone ID: PAT_MRT3847_17859C.1
ggtagtataactggccggacccacgcgtccgagctcttctcttaaccccacccttttcttgtctcaaagccagctaccgcgccttgctgccatggaagcaaaactcgagcctctccttctccagcccgaagccccttaagttctccagaacaatcatagcatcagccgtcgactagaccacatatgcaccagcaaaagtatatgctgcacccttcgggttcaccttcacctta

SEQ ID NO: 51878 - DNA, 264 bp, Glycine max
  Clone ID: PAT_MRT3847_1785C.1
gctccacaggtctacgcttttcaaattgaagccttgctgaagctcttaagatatcaagaggcctataccatctacaataaaatgccaaaattttcaattgattggtgtaccaagatatttggcccagcttgtagcgcttacctattgatgataggctcaatgatttacttggcatctggcaggtttgaggaagctgtgacagcagctcagcaagcagttaaagttgatccaggcaatagagagctagatgcaatggtaaagaag

SEQ ID NO: 51879 - DNA, 233 bp, Glycine max
  Clone ID: PAT_MRT3847_17860C.1
cccccactttcttttttttcatccagaaatcttggtgcccaaatgagggaaaaagggttgccttggacacttttcaccttggtctctgggttatgttaatttgaaagaagcttctttgcattaagaatgggttcaagtgattgggttaagacaattatttgcttaagaaaatctaaagaaggcgcctttaagaaaggtaagacttagatttattccagaaaaaagtcccatgg

SEQ ID NO: 51880 - DNA, 573 bp, Glycine max
  Clone ID: PAT_MRT3847_17861C.1
cacgcgtccgcacacccgcgtcccctctttttgcacccttttctctatctgcaccaagacccgttttggatcgcaccccaacttctctctcccctaatatttgatgcccaccatctcctctctacgcatttctctgttgattcgcctcccacacttcgacagtgtgttgggattcacccttttccattagggttttaataatctgaactcttctcttgtaacaaccaagcagcacttttattctttgattcattttcatttgggtgtcttgcaaaatctgttttttttttttaaaaaaaacttttggggattcgttttcttcttgctgggcttctctgaaattgtgccttttccaatctctgtttgttatttttgggtaatatccagaattggtttagtggaattttacagtttttgcttatttttattttagattttggtttgtttactgtgcaaggggaacacattttcccttcaaaagtttgagggagaatacttagataatagcttctgctgcaagctttttttgtgtttgaatattggttgttggggttatcttatctagaaggagct

SEQ ID NO: 51881 - DNA, 334 bp, Glycine max
  Clone ID: PAT_MRT3847_17862C.1
gaaaaactttctataattagagtctcactctcagactcgttgtatgtatggctacgctctcgctcactctcaactgttggagtaacgtggaacttgctcacagaagatttccgtcaaccttaacttccctcggccgaaggaattgtatagtcaaacgttcttttgccaggaggtcattgacaaatccaggaaaaatgttatacaaggaacttgacatttcttacctgataagtttgtgttcagaatgaaaacttggacacttctctaactcgagctgccgcgatttctaaccctttacctcccatgagtgctgtgcttcacgcttccagaaaac

SEQ ID NO: 51882 - DNA, 618 bp, Glycine max
  unsure (1)..(618): unsure at all n locations
  Clone ID: PAT_MRT3847_17863C.1
tgagtatgcgtctagctatcttagctatctcgatcgaactgtccaaggtcctgtcaccaagaaggcgcacctcacccgaaccgtctcggcacggcatcgtcgcgtcgctctgcggttgtgcgggtgtcggggcgcggacattcaatttgactgtttagttaattaggtattaatccccaaactgacttggcaacaatttcgtcagacaacagatatacagcaccctgaataggaacaaaccaaacaaacttgaacagcaacttactctataaaccaactggccacgggcctgtacaacccaacaaagaacctgtggagtagcagcgagctaggtagagcactttgcgagatcgctgattacagaatggtgtggaggaggcaccgttgatgggaggctgaagcgcgatgcaatgcaacgagcgtcgcagcgaacgtgctaagaacggaaggcgtgcgagtgggaggcgagttttggagccncggtgcagaaggatagttgggaagacgcggcgccaggcctagacatgcggtaacgaaagagcctagcctgctcaaagggaataaaaaaatgaggggggtagggtggttgggtgggaagttgtaggggtgtatggtgga

SEQ ID NO: 51883 - DNA, 500 bp, Glycine max
  Clone ID: PAT_MRT3847_17864C.1
cggaaatcctcaccgtccaacgctactttacaactgacctcgaagactctgccagttttgttaatccaactcccgcaaatgatacaaataatttcaatacaacaactcctggtgctttcttccaagtagttgaatttcccgatttcaaagttttccattatcgtttgggatttaatggattatcaaacttatatattcatcttaatgtttctttaaatactctttatacttcttgcaattttgataaattagttgctcctcacccttctgcatctccttctccaatcgttcgtccttcttcctcaactaatccttctttccatccttctgcttcgagcaatccttctcgagccccaacttccactgctactttagtcccaaatcctaatgattcttctgatatttctagtggaaaaacagattctcgctcctctgattcttccggcgaacaatcatctgcctcctccctttccatcccatttttgttggctcttgctttg

SEQ ID NO: 51884 - DNA, 154 bp, Glycine max
  Clone ID: PAT_MRT3847_17865C.1
ggtcaacgctaccccacaactgaatatctttgcttttggtatcaacgccgagaacaaccagaggaacttccttgcaggttcgaaagacaatgcgataagccagatacctagtcaagtgcaggagcttgcgttccctgggtctgcaaaagatata

SEQ ID NO: 51885 - DNA, 487 bp, Glycine max
  Clone ID: PAT_MRT3847_17866C.1
gctttaaaaaaaaaatattttaaaaatttaaaaaaaaaaaaaaaaaaaaaaaaaaaaaggacaaaaaattttaccaaataaaaaaaaaaatacgggggcggccctttttaaaggatccaactttatttccccctgcttccaatttattagtttttttttaataacacctaattttagttatctggcggtgtttttaaaattaattgattggaaaaaccttgccttttcccaatttaatccctttgcaaaaaatccccttttgtccactttgcgtaatagtaaaaaagcctgaacggttagcctttcccaacatttgcccacccttattgttcattggaactcccctttacgcgcagctttacccctgtagttttttgtgttttcgcccacgttgatttttatttttgccatccctttttcgcccgttcctttagtttttttccttttttttttaaccaagttctccgtttttccctttaaagtttta

SEQ ID NO: 51886 - DNA, 241 bp, Glycine max
  Clone ID: PAT_MRT3847_17867C.1
cagaaagagagtgaataaatccagcattgttctgttctctgcaacattctccactctcaaccatggcttcaaagcttttactcatcagtgtcttcgtatttgatttgagtgctcattggactatgccgaggctgatagagcagacaagaatcacagctcagtgttgtcacggaccatgtcaagcgttacaattactgtgtctataactctggtatagcaactggctatggtagtggagcat

SEQ ID NO: 51887 - DNA, 319 bp, Glycine max
  Clone ID: PAT_MRT3847_17868C.1
gttcttgagtgacattcatagtggcggcttatgaaacacccgcggacgcaggtgctggagtaagcacgagaaaaatcttgcggagacagcagaggcactgagacaggagattagaaatggaggcattccggcagatgggctggctaagagagcacaggaactcgaaaaacaagatgcccacgacagcacaatgggtgaaatctgtgcccctggcaggtcgacatccacccaggttaactaactggcgaaaattatgatccgcagacacagagttgtaggcgaacttacagctcatactgctagggaggagacagagggt

SEQ ID NO: 51888 - DNA, 2183 bp, Glycine max
  Clone ID: PAT_MRT3847_17869C.1
atataaacaggggcttattcatcaacggtgctctctaatgtaaggtctgcgtacacaatagcctatggaccaaacataattaagtcctgattgaaatcctatttcttagccaaactacatagaaagaaagaaatagttgctttgacaaggaaggaccattgattaccaatttactggctttagcttatttgtaggatacaactaaggatacatatcttcgcaaatatgactgaatcttataataactatgtaagtttttcaaaaatgattgcacgtggaactgtctagaacaaattagacagggtttaaggtacaatttgctagggagaggaaaggaaaaacaatgtgtaacattcgtgctttacctatatctccaaaagctcttaacggttcaaaattcagccaactttaacgaccattctctcttctttcaagctccaccgagcagtggagccgcctgtggtatttacatccaacctaagaccgtcgtgcctatgagcagtaacgtgtcatgtcaacattagaagctgttaaacaggtacttgtaaaacctcttccttatcttcttcctcgaatgcagttgcagtttcctcttgtcgttcaaccggaccttgaggagttccaaagagagtggcgaaaatctgcctatggcattgatcacataaatagaaataggagaagtggccctcatttggaagcttatggataacagcctctggcaaaaccgaatctttttattccatcactgtgggtaggaccaccctatccatcccgtcccccaaggtgtgctcattcaagctctccccccgactcgatatgcggcgcgttcacctcaaacgacgtcgcagaggaggatgcctcttgtttgacactatctccaccgtagagcactcccgaatcctcaatcagactcgccagctcctccgtccacgtgtccctccctctcacttccgccattttgacgaactgcccactctagaacgctctgccaatattgctcaaattctggttcttcagtcacaagtttatccttctttcctggtgagacagatagcagcttatcaatctcatcatgctgttcaggcaagaagcttttccgatagaaaaaagtgagaagttttggaaatctacgagccaaagaatacatcattttcctccttggcagccacttctcccaagttcttttcatctcctccttagtcatgtgtgggtcatatggattaatcataggagccaacattgctgcacctgcaattttctcaggaatatatctgagagaagcccaagcatggatgcatccactagagtggcacagtatccagaacttatcagtaacattgacggcattgactagatgcagcacatccatagctgatgagttgagatttctgttgggatgaggatcactctccccaaaaccaggaagatcatatgtgaccaaacgaatgccgtactcttcaagcaatgatgctttgactccaggtaaacctgctagtctggatgaaagaaaagagtgcggagcaacaagtgaaaatctagctgtgtcggccaaaacaccttgctcatgataagccatgtatctaccatctggaagtagcacacgactagcactaggaggatgttgacgcaccttcaccacaggggccactgcttcacgactgggatctacacttatagctgcaagcgcgagaatgaaaacgaagaacacaacggaccaagcgtggacgggatcgcgatcctcggggagaaagtcgttgagaaacctcagccgcttcgaaaccttggaacaaggtccaccgaacttcctaaccacatacgaatcctcgttcatcaagttctgtcgcagaatgtccctgaagcctctccccaactccatgagtatctcgcaccacgccatcacgaaccccaaggcctgctccttgaagctctcccccgactcgctatgcggcgcgtacacctcaaacgacgtcgttgttgttgttgttgttgtcgtcgtcggatctccaccgtagagcactcccgaatcctctatcagactgggcagctcctccgtccacgtgtccctccctctcacatccgccatttttgctaatttctcttttctgacgctggtgatgataaagagtctgcaaccaaggtccacacacccttctgtcgtcttctcgcggacgctgcaactgttc

SEQ ID NO: 51889 - DNA, 322 bp, Glycine max
  Clone ID: PAT_MRT3847_1786C.1
ggtattcaccactctatcccctacaacccctactcaactatgctcacgaaagagtgggattttcaatccctaacaggcacttcttgtgaaaccagtgaacaggcagaagatggggaaaagcaatggaatcataattgcatgcctagccaccagcattactgctgatagaggccctgacatgggcaaaatacacctcataaatctgattcttcttggtgccatattacgcccctctgctagaatgcttattccctacacgtactatgttgtcactccagtatcatgctaatcagctggaggtactgattgcaatgatgctgta

SEQ ID NO: 51890 - DNA, 2028 bp, Glycine max
  Clone ID: PAT_MRT3847_17870C.1
caaaaatgattgcacgtggaactgtctagaacaaattagacagggtttaaggtacaatttgctagggagaggaaaggaaaaacaatgtgtaacattcgtgctttacctatatctccaaaagctcttaacggttcaaaattcagccaactttaacgaccattctctcttctttcaagctccaccgagcagtggagccgcctgtggtatttacatccaacctaagaccgtcgtgcctatgagcagtaacgtgtcatgtcaacattagaagctgttaaacaggtacttgtaaaacctcttccttatcttcttcctcgaatgcagttgcagtttcctcttgtcgttcaaccggaccttgaggagttccaaagagagtggtgaaaatctgcctatggcattgatcacataaatagaaataggagaagtggccctcatttggaagcttatggataacagcctctggcaaaacccgctctatatattccatcattgatggtgggaccaccctatcatccagaccctgccatatgtgtttaaggccaagaaatcctgctaattcacagcccgcctgactgtacatggatttcaaccaaagaagtatgcctcttgtttgacacttcttttgcacatgaagttccttaatgtcaaaaccccaatttgatacctgcagaacagcttcttctataaatgggcgtatgtttccctgacgaactgactcctccacatccctctgccaaaattcctcaaattctggttcttcagtcacaagtttatccttctttcctggcgagacagatagcagcttatcaatctcatcatgctgttcaggcaagaagcttttccgatagaaaaaaagagagaagttttggaaatctacgagccaaagaatacatcattttcctccttggcagccacttctcccaagttcttttcatctcctccttagtcatgtgtgggtcatatggattaatcataggagccaacattgctgcacctgcaattttctcaggaatatatctgagagaagcccaagcatggatgcatccactagagtggcacagtatccagaacttatcagtaacattgacggcattgactagatgcagcacatccatagctgatgagttgagatttctgttgggatgaggatcactctccccaaaaccaggaagatcatatgtgaccaaacgaatgccgtactcttcaagcaatgatgctttgactccaggtaaacctgctagtctggatgaaagaaaagagtgcggagcaacaagtgaaaatctagctgtgtcggccaaaacaccttgctcatgataagccatgtatctaccatctggaagtagcacacgactagcactaggaggatgttgacgcaccttcaccacaggggccactgcttcacgattgggatctacacttatagctgcgagcgcgagaatgaaaacgaagaacacaacagaccaagcgtggaagggatcgcgatcctcggggagaaagtcgttgagaaacctcaacctcttcgaaaccttggaacaaggtccaccgaacttcctcaccacatacgaatcctcgttgatcaagttctgtcgcagaatgtccctgaaccctctcccaagctccatgagtatctcgcaccacgccatcacgaaccccaaggcctgctccttcaagctctcccccgactcgctctgcggcgcgtgcacctcaaacgacgtcggaggagaatctccaccgtagcgcactcccgaatcctctatcagactcgccagctcctccgtccacgtgtccctccctctcacttccgccatttttgctaatttctcaaactagtaagtgacggtggtgatgataaagattaaagaaccacgcgccacacacccctcttcctcatttttctgacgctcctacttttcatccaacccagtattcaaaaaaaaggagaatattagtcaagaaaaaggccaaaaagatgaatactagaatttctcacttttctgacgctgcaacttttcttcaaccgagggtcattac

SEQ ID NO: 51891 - DNA, 353 bp, Glycine max
  Clone ID: PAT_MRT3847_17871C.1
ttttacttctggtttatcgcacaaggcgttgcggtccgaaaagatttaagaaagagttgcgttgaaaagttcacaggaagcaatatttactgctggcttaactgatgtgattactccaacaactaagatgtctttgggtggtccatttctgtttgcaaaggtgcatgatagactcagagtttacattaccaattgaaatatgtcaattgttgtttagctgacaaccattaacaatatgtgtgcatatgggctcaatcctggggttgcaggatatggtgatttgggcaccatttcccaggacatttagtattaaactgtttggaatcaaatggcaactaagaggacaccactga

SEQ ID NO: 51892 - DNA, 1070 bp, Glycine max
  Clone ID: PAT_MRT3847_17872C.1
tctttttgaaacgactaatccctagatacatctacccatgccatcctatttttttttattccaaaatggaatcaattttataagtttaaaaaagacctaaagttagggatttctcaataggtaatgttgctccaatacctaaccaaagggcaactacagtaccaatcaaaaagatggtggttgctactggacggcgaaatgggttttggaatttattaacattctccaaaaagggtactgttaataatcctgtaggtaccgaaaccattaaaagaacgcccaataacttattgggcactgtacgaagtatttgaaatacgggaaagaaataccattcgggtaatatttccaaaggagttgcaaatggatccgcgggttccccaatcatggatggttctagaaccgctaagcctacgttacaggcaatagtacctagaattactactggaaaaatatataaaagatcgttgggccatgcaggttctccataataattatgacccattcccttagccaatttagctcttaatacaggatcattcaagtcaggtttttttgttactcccataatccattttttcttcggagagttcccttcaactattcgtgcgtgtatggaaaaaaattcaatttttgttaagttgaagggaaatatccaaatacatgtcttattcttttaaataatccatatttgtagcaatgaaataaattcctccccaaaataaaaaatgattgggattacaaatatttatgatccatattcactttaaaggaccagaaatgccttgcttacgtatcattaaaaagtgcattaacataaataccgcagtaagaagaggtaatacaaaagtttgcaaactataaaaacgagttaagggagattgtcccacactggaacttccgcgtaataactctaccaaagacgatcctattacaggaatagcgtcgggtacgcctgttacaattttgactgcccaataaccaatttgatcccaaggtaaggaataaccggtttcaccaaaagatgcagtcaatacagccaaaacttcacccggaacccaagttaattt

SEQ ID NO: 51893 - DNA, 138 bp, Glycine max
  Clone ID: PAT_MRT3847_17873C.1
ttttggggtttgttatgaacaacagaatttacacatggtatagataattataaaaggtggaaatatttacactaaggataatgatactaaactggttggttaagtgtacaaatggttaagcgaccataaaaaaaaaga

SEQ ID NO: 51894 - DNA, 660 bp, Glycine max
  Clone ID: PAT_MRT3847_17874C.1
cccacccgtccgtgcaataagacgacagatgggggacaaagaaaactaaaccctagtgggagtcttgtcgtcgtctcttcctcttcgcaacaatggttgccgccaagaaaaccaagaagacccatgagagcatcaacaacaggcttgctcttgtcatgaagagcggcaaatacacccttggttataagaccgttctcaaatctcttaggagctccaaagggaaattgattatcattgctaacaactgcccccctttgagaaagtcagagattgaatactatgccatgttggcaaaggttggagttcatcattacaatgggaacaatgtggatttgggcactgcctgcggcaaatattacagagtgtgctgccttagcattattgatcctggtgattcggatatcattaagacactgcctggtgaacagtaaagtagtgttgaagttacttgcttgttattttctggttttagttgattcggactttgaaagaatatcttgttgagttgtagactttggtgtaaggtgcaaggtttttgtgtgttctagctagctgagcatcaagtaattttgacttttcaaagttttcatgttttattgtgccaatttctagagatgatataattatattatgatcgcgcgtgctggtaaaaaaaaaaaa

SEQ ID NO: 51895 - DNA, 761 bp, Glycine max
  Clone ID: PAT_MRT3847_17875C.1
tacggctgcgagaagacgacagaagggtacggctgcgagaagacgacagaagggtacggctgcgagaagacgacagaaggggaaaccctagtggcagtgaccaaactccatttctcactcgccgtcgtctcttccgtctagggtttctcctcttcacaaaaatggttgccgcaaaaaaaaactaagaagacccatgagagcatcaacaacaggctcgctctcgtcatgaagagtggcaaattcaccctcggttacaagaccgttctcaaatctcttaggagctccaaagggaaattgattatcattgctaacaactgcccccctttgaggaagtcagagattgaatactatgctatgttggcaaaggttggggttcatcattacaatgggaacaatgtggatttgggcactgcatgtggcaaatattacagagtgtgctgccttagcattattgatcctggtgattcggatatcatcaagacactgcctggcgaacagtaaagtattcttgaagttccttgcttgttattttctggttttagttgttgattcaaactttgaaagaatatcttgttgagttgtagacattggtgtaaggtgcaaggtttttgggtattccagctgagcatctagtaattttgacttcaaatttttcatgatgtttcatggtgccaatttctagagatgatatgattatattttggtcgcgcttgctgttaatgcctgtgttatattttgaaagaatgtcggtgttcgcttgt

SEQ ID NO: 51896 - DNA, 5277 bp, Glycine max
  Clone ID: PAT_MRT3847_17876C.1
aagatttcaagagaaataaacaagtcaagggtttgatcaaaataatatattactatggttcgagagaaaataagagtatctactcggacactacaatggaaatgtgttgaatcaagaatagacagtaaacgtctttattatggacgctttattctgtctccacttatgaaaggtcaagccgatacaataggcattgcaatgcgaagagttttactcggagaaatagagggaacatgtatcacacgtgtaaaattagaaaaaataccacatgaatattctaccataataggtattgaagaatcagtacatgaaattttaatgaatttgaaagaaattgtattgagaagtaatctgtatggaactcgggacgcgtctatttgtttcaaaggtcctggatatgtaaccgctcaagacatcattttaccaccctctgtggaaatcgttgataatacacaacatatagccaacgtaacagaacccgttaatttgtgtattgaattaaaaattgagaggaatcgtgggtatcgtataaaaacactaaaaaactttcaagatggaagttatcctatagatgccacatttatgcctgttcgaaatgtaaatcatagtattcattcttatgtgaatgggaatgaaaaacaagagatactctttctcgaaatatggacaaatggaagtttaactcctaaggaagcgctttatgaagcctcccggaatttgattgatttatttattccctttttacacgcagaagaagataactttaatttagaaaacaatcaacacaaagttactttgcccctttttacttttcatgatatattggctaaggaaaaactaaggaaaaagaaaaaaaaaataacattgaaatccatttttattgaccaattagaattgcctcccaggatctataattgtctcaaaagatccaatattcatacattattagaacttttgaataacagtcaagaagaccttctgaaaattgaacattttcgcgtagaagatgtcaaatatatattggactttttagaaatagaaaagcattttgcataaatttgaaatccattggcataggattttttcagatttcttttttttttttttctaaacttacgatagggatgaaaatatgtaatttagatctttaaaaaaaaatccatatgttcggaatagacctaaaatggaatagatgtatctagggattagtcgtttcaaaaagaattctccctagatacacaatacacatggcattctatttttttttatttcaaaatggaatcaattttataagtttaaaaaagacctaaagttagggatttctcaataggtaatgttgctccaatacctaaccaaagggcaactacagtaccaatcaaaaagatggtggttgctactggacggcgaaatgggttttggaatttattaacattctccaaaaagggtactgttaataatcctgtaggtaccgaaaccattaaaagaacgcccaataacttattgggcactgtacgaagtatttgaaatacgggaaagaaataccattcgggtaatatttccaaaggagttgcaaatggatccgcgggttccccaatcatggatggttctagaaccgctaagcctacgttacaggcaatagtacctagaattactactggaaaaatatataaaagatcgttgggccatgcaggttctccataataattatgacccattcccttagccaatttagctcttaatacaggatcattcaagtcaggtttttttgttattgggataggtgaattcttatagatccatcctccgaaagaaccggatatgataatttttcatcatccggctcgagcactaatcaaagatttcgaatgtatctatagaaaaaatgtatgtgttattcacacatatatgaggattctatgtaagaaaataaactagattctctttttccgaagttacaaactattctttattgaaaaaaaaaaaaaaaaaattaagttcttattaagtaaactttgataaacgctcaatacccgagtaggcttttaaaattgataatgctttctgggtgatctcaaactttgcaattgttattctgtccaacaaaatcttggaactttttacgtacaaagaatttacttgttactaatataatccaacccgcgtttttctttagatctacttttttcactccgatagtatcagaaatcgaatcaatgcataggaaatgaatgcgttgtcatactattaagtttactgaaatacatatgatataattcagactatactacattacttattttactggatcttacggagcctgttcatgtagaatataatcgagtctgatcatagaaaagattcttttcaagtaaaaccagcctaccctctctgtaagagccttacttggtggttggaaaaaagacacatttaattataaattcaaatgtggcagataagataaagtcagatatctgcgtggcccaataaatagttcaagtcacacactcccataatccattttttcttcggagagttcccttcaactattcgtgcgtgtatggaaaaaaattcaatttttgttaagttgaagggaaatatccaaatacatgtcttattcttttaaataatccatatttgtagcaatgaaataaattcctccccaaaataaaaaatgattgtgattacaaatatctatgatccatattcactataaaggaccagaaatgccttgcttacgtatcattaaaaagtgcattaacataaatacagcagtaagaagaggtaatacaaaagtatgcaaactataaaaacgagttaaggtagattgtcccacactggaacttccgcgtaataactctaccaaagacgatcctattacaggaatagcgtcgggtacgcctgttacaattttgactgcccaataaccaatttgatcccaaggtaaggaataaccggttacaccaaaagatgcagtcaatacagccaaaactacacccgtaacccaagttaattcgcgaggttttttaaaaccgcctgtgagatacacacgaaatacgtgtaggatcatcattaagaccatcatacttgccgaccatcgatgaacggatcggattaaccaaccaaagttagcttcagtcattatatattgaacagaagcaaaagcttcagtaacggtcggacgataataaaaagtcatagcaaatcccgttgctacttggactaaaaaacaagtaagtgtaattcctcctaaacaataaaatatattcacatgaggcggaacatatttactggttatatcatcggcaatcgcctgaatttcaagacgttcttcgaaccaatcatagactttattgagataggtaaaccaacggaccccccctgagaaccgtatatgagaatttcatctcgtacggctcaaacaaaaatacccaaatactgcttgtaacgaaaacagatatgtgtaatagaaagtttgaaatttctttatttaatcctatgattctaattttctttgacgataataaaaaatagagatccgaaagctattctttttggttataatgctaaaatatcaagtcggctccttcgtctttatcttgatcttttaaggcctcttgaatattctactatttacttcatttttttattgtgtataatatgattttactgttgtcttctttattattattgaatttttattattgataggaattctcttgttaggaccctatgaatcaattaaaaaaacatcagattcatactataaccacgatgattcaaaaaaaccttaaatcgaagtccaaaaattccctgagtaagaactgttggatcatcacttattcaatgaatagatataatgaaaaaaattaaaggaaacgtttgtcctttgatcaaaataaagataagctccggaaacttaaaagaatgaaaattattcaatttatttttaaaactctttgaaaagttttttaagtccggttgcgaggtctaaatatttagtatgaatcatagttctaatatttttagaatccattttctatattccgtgctccagatactagaataaatatctgacgggataaaaccatctctatcaagatgacagatccattttatgttctgtactttcaataggatccattaaaacaagccgcactactcatattccggaaatacagaaacaaagaaattccacgatcaaactaccaaatccaaaggaaatagactaacaaacaataagaaaccaaaatgcttaactttcctttctattgaaaaactaattacccgattcttgtgaatctaattcatagaaattccgtcgagtaaaatggacgaattataaatctccaaaataatagatagaaatatcgcaaatagagccattgcaacacccatcaaaggagtagttccccaccccggagctactttaccatattctgaatttaatggtttcaataaatcccctacaacagttcgtcttggaccagatctagaattatcctcaacggtttgcgtagccataaatactattttttattcatttagatctgttgactttgtataccatttcgctgtaaatataaggatcttatcctatagatctattgtgatcttgaaactttagaattctaataatggaaacagcaaccctaattgccatctctatatctggtttacttgtaagttttactgggtatgccttatatattgcctttgggcaaccctcgcaacaaccaagaagacccatgagagcatcaacaacaggctcgctcttgtcatgaagagtggaaaattcaccctcggttacaagacggttctcaaatcacttaggagctccaaagggaaattgattatcattgctaacaactgcccccctttgaggaaatcagagattgaatactatgctatgttggccaaggttggagttcatcattacaatgggaacaatgtggatttgggcactgcatgtggaaaatattacagagtgtgctgccttagcattattgatcctggtgattctgatatcatcaagacactacctggcgaacagtaaagtattatttgaagttccttgcttgatattttctgtttttagttgattcaagacattgttgaaagaatatctgatttaagttgtacactttggtgtaaggtgcatggattttgggtattctagctgagcatcaaatgttttttaccttgcaaattttttcatgatgtttcattatgccaatttctatagagatgatataattatagtttaaaaaaaaaaaaaaa

SEQ ID NO: 51897 - DNA, 166 bp, Glycine max
  Clone ID: PAT_MRT3847_17877C.1
acgcccacgcgtccgcttcttctatgggttggcttagtctgttcataacttccgtggctttctggtccatcttagttatattctcaccctatacactggggtcaaaatcaaccacactttccacctacctcaaactctctcacctcctctacttcttcaccatctt

SEQ ID NO: 51898 - DNA, 421 bp, Glycine max
  Clone ID: PAT_MRT3847_17879C.1
ataaataataagtgcacttatccgtgtcactcacaagcatcgggctactcctccttgtgcttgcacgagagttgtcgatggctcaactcaacattgactgttttgtctctcttttgtttctattcgtatacggagttgattaagtttactgttttccctactctataagaaagttccttcagcggtctaagcttctctgccctccagacactccgaaaagcctgtagctgatggagtaggactagtgtttagtgttttgattgtggttggttgttggccaaaaaagacatgggacttttgggaacagcgtttctcattcaaaaaatcttggaatgcttcttgcgcataggagcagcttgttaatcaaatcggccgtttaattcgaaggtctctcttttataagctttttaaaaaaaaagag

SEQ ID NO: 51899 - DNA, 1511 bp, Glycine max
  Clone ID: PAT_MRT3847_1787C.1
cccacgcgtccgattccacataataatattacgcctcccctcatccgtatagacactaggttcaacttgtgagggggatcaaaacattcctagattgcaaacaacaaggttggttcaacttgtgtgaagggattggaacatggaaaatcttggtggttctagtcgtaggaaagcaattgaggagcttcttagagggcgtgattctgcccaacaacttaagagtgtcatcaatgggacttatgatgatggatcagccaccccatttgctcaacaacttgtgaaagaggtgctcatgtccttcacaaactccctcttgttcttgcacaacaaccccacttctgaatcacatcatgtcttcaatgttcaagtatgggactctcccaagtctgaggactctcaagagagcaattgcaaaagctccaccattaaggaaccaagagggtgctacaagagaagaagaactgaacaaacatgggagaaggaatctgaagctccaattgatgacggccatcactggagaaagtatggccaaaaggagatcctgaatgccaaattccctaggaactactataggtgcactcacaaatttgaccaaggttgccaagcaacaaaacaggtgcaaagagttcaagaggaaccaatcctattcaaaaccacctactatgggcaccatacttgcaagaactcggcaaaccctgatatcatacttgaccccatgtccccttcatcctcttccaagttccttagctttgacaactccttttcaaccccatccaagcaagagtgcccctttctctcatcttccaataatttcccatcatcatcatcagtgaaaagggagtgcaaggaggaggtccctccctcaatttcctccaatgattacctcatctcttctgacctcacttttgatagctcaccaaggcatcatgtcactctatcatcaacacttgactctgagtacaagagtgtggacatttcggatgtcttgtatgattctgcccagcttgattttgtctttgaacccttccttgaaattagatgagcatgtccttgttttggtttgtgatttttttttttaaatttaacctttacttcagcgaaggcagtgcaaaacaaattgtgtaatatttagttgtacttttcttagataaatgttatatccgtgcttttattgtaaattttgtcattttcaatgaatgagaaatgatcataatgtttcaatgaaaaaaaaaaaaaaaaaattttaatattttaaaaaaaaaaaaaaaaaaaaaaaaaaaaaaaaaaaaaaaaaaaatttctgggggccgcaagttttttccttttagggggggtaaatttaacttgggcccgggccgcggtttaaaaacgtcgaaatgggaaaaacccgtgggtaccccaattaattgcctttgggaaaaatcccccttttcccagttgggttatttgcaaaaaggcccgcacgaatcgcccttcccaatctgctaggtaggacacgactgggcgcggcg

SEQ ID NO: 51900 - DNA, 408 bp, Glycine max
  Clone ID: PAT_MRT3847_17880C.1
ttcttatttttttttttttttttttttttttttttggtttttttttgtttttttttttttttttcccccccaagaccaaaggggtccccccccaacccaaggtgggggcggggggacccccccccccgggattcctggggggcaaatttcgggtcccaggcccttctatgggcccttggcccccaccataatatatggggaccattccgggcccgggggggggggaaaaaaaaaagggatttgggggaccccaagcccccaacggggaaggaaatcccggggttggggcccgcgcccccaatgggggggggaaattttttaccggcgcccttaaaggccctccaccaaaagacgggtttgggggggggccccagggcaaatgggcagaaacttttttattggaagggg

SEQ ID NO: 51901 - DNA, 290 bp, Glycine max
  Clone ID: PAT_MRT3847_17881C.1
caatctaatgaataaagagtttattctatcagaaccagcaacaacacaaagataaagaaatacatgataggtactattcctttacacagtttttcactattattacaactaaccatttgatgaggttttatttactgcgataactaaaacccctaaagaacattctaaaaacagctttcttagctgggaggcaaaacatggcccccaaacgttgttctaatcactaggacattagtcacaatgggggtcattgcacgagaggccataattaccatcctgaaagaacattt

SEQ ID NO: 51902 - DNA, 381 bp, Glycine max
  Clone ID: PAT_MRT3847_17882C.1
ggctcgagcacccgcacggaccctgcaaacacatagcatccaaggcctgctattgctcaaggcgagcactgacacctcacaagcacgccacgtagagatatggacgctggatgaccaacgccatatgatctgcattcaccgtgacgaaactatccaagctcatgccctctagccttagcgctggtcaccaagcactgtgcctgacgcacctccgttcatatgaacgggacgtgcccttggctgacacctgatggcaagacccatgtcactgacgagcctactacgacatgtgagccatggtgacaatccttgtccacactgagctcaattcccacagcatgacgacgactgcacacgagatgagactgcagtacgaacatg

SEQ ID NO: 51903 - DNA, 734 bp, Glycine max
  Clone ID: PAT_MRT3847_17883C.1
ggtcaaaaagtcttgcaaggcattgatgtcaatatgaacaagatgccagatgttgccatgactcttgccgttgtcgcactatttgctaatggtcaaactaccatcagagatgtggcaagttggagagttaaagagactgagaggatgatagcaatctgcacagaactcagaaagctaggagcaacagttgaagaaggtcctgattactgtgtgattactccacctgagaaattgaatgtcacagctatagacacatatgatgaccacagaatggccatggcattctctcttgctgcttgtggggatgttccagtaaccatcaaggatcctggttgcaccaggaagacatttcccgactactttgaagtccttgagaggttcacaaagcactaagcattttgtacattgagtaggaagagagagagagataaatactcccaaaacagtgagtatatgcatgacttgcttttgtttcttaacattcccttgtaagaacttgagataatttgtattgttggaaagagctattgattctgttgtatcaaagtaatttaatttccagtacagacttggctctattcctcatatgtggtggtgtacattgcatctttgcatttgatcccatttctattgggatgggaccatacattttttgtttattatttaagtcaaacatatcagataatatgtggtgaccagaaaagtgtctagcaatcaaatgggtctgtgattgc

SEQ ID NO: 51904 - DNA, 2239 bp, Glycine max
  Clone ID: PAT_MRT3847_17884C.1
gttcatccaaaaacccctttatgtgactcactcaatccaacaacctctcacaccaccaacccccccataactcataaggccaaaaccatttctcacaaaacccttcattacacacattattatcattattacacacacaaaaaaaacctctcatttcaaagagagagagagagatttcacagaccaaattgcagaggacgacaaagttcacaacttcaaggaaaatcgaaatggcccaagtgagcagagtgcacaatcttgctcaaagcactcaaatgtgtttaaggtttctgcatcggtcgatttttggccattcttccaatcccaacaaacccaaatcggcgaattcggtttcattgaggccacgcctttggggtccctcaaaatctcgcatcttggtgcacaaaactggaagccttatgggaaattttaatgcggggaagggaaattccggcatgtttaaggtttctgcatccgtcgccgccgcagagaagccttcgacgtcgccggagatcgtgttggaacctatcaaagacttctcgggtaccatcacattgccagggtccaagtctctgtccaatcgaattttgcttcttgctgctctctctgagggaacaactgttgtagacaacttgttgtatagtgaggatattcattacatgcttggtgcattaaggacccttggactgcgtgtggaagatgacaaaacaaccaaacaagcaattgttgaaggctgtgggggattgtttcccactagtaaggaatctaaagatgaaatcaatttattccttggaaatgctggtactgcaatgcgtcctttgacagcagctgtggttgctgcaggtggaaatgcaagctacgtacttgatggggtgccccgaatgagagagaggccaattggggatttggttgctggtcttaagcagcttggtgcagatgttgattgctttcttggcacaaactgtccacctgttcgtgtaaatgggaagggaggacttcctggcggaaaggtgaaactgtctggatcagttagcagtcaatacttgactgctttgcttatggcagctcctttagctcttggtgatgtggaaattgagattgttgataaactgatttctgttccatatgttgaaatgactctgaagttgatggagcgttttggagtttctgtggaacacagtggtaattgggataggttcttggtccatggaggtcaaaagtacaagtctcctggcaatgcttttgttgaaggtgatgcttcaagtgccagttatttactagctggtgcagcaattactggtgggactatcactgttaatggctgtggcacaagcagtttacagggagatgtaaaatttgctgaagttcttgaaaagatgggagctaaggttacatggtcagagaacagtgtcactgtttctggaccaccacgagatttttctggtcgaaaagtcttgcgaggcattgatgtcaatatgaacaagatgccagatgttgccatgacacttgctgttgttgcactatttgctaatggtcccactgctataagagatgtggcaagttggagagttaaagagactgagaggatgatagcaatctgcacagaactcagaaagctaggagcaacagttgaagaaggtcctgattactgtgtgattactccacctgagaaattgaatgtcacagctatagacacatatgatgaccacagaatggccatggcattctctcttgctgcttgtggggatgttccagtaaccatcaaggatcctggttgcaccaggaagacatttcctgactactttgaagtccttgagaggttaacaaagcactaagcattttgtacattgagtagggaagagagagagatatatataaatactcacaaagcagtgagtatatggcttgcttttgtttctaaacattcctttataaggacttgagataatttgtattgtttaaaagagccattggttctgttgtatcaaagtaatttaattttcagtaacttcacattcccttgtaagaacttgagataatttgtattgttggaaagagctattgattctgttgtatcaaagtaatttaatttccagtacagacttggctctattcctcatatgtggtggtgtacattgcatctttgcatttgatcccatttctattgggataggaccatacctttttttgtttattattcaagtcaaacttagcagataatatgtggtgaccagttctc

SEQ ID NO: 51905 - DNA, 1177 bp, Glycine max
  Clone ID: PAT_MRT3847_17885C.1
ttttacagtaagttactaactttgaattaatctaataatcaatttgagcattgccttaaaatatggataacatatactagtacatgtgatcgaatatttagcctcttatcctaaagaactcggctgaaagttcgaggatttatttccattaaaatggagtagaaacaagcatgagaggctacctcgcaaatctttgaatcttttaatcttgtgaagtcagagggtgatgtttcagatattttgcaagggtagaatccagcttcgctccaatataagtaatccacacctgatcagaaccagtgaaacctcgtatcgtgtcaccaccaataattgcaatccctttatctccaagtggttgtaaaattactgcctgtgtatttgaaggtacaaatggcagctcagatttcccaggataaagagatagattagccaagtaactctgagcaccagatttcataaccccctggtatactgatccttgcatcaatttattggcatccacacttacagcgtcaccatccccaggagaagattctgctgcaaaaccaattgggagtacacaactgctctcataaacaacaccaagtgaacgacaacaagtggcatctgatagagattcccacacccaaagcaactcattacgtgcaacttcagggagtgtagcgcacaaactcttgcattcaactcctcgaggatttaccacagtaatagatttaggttattctgaaagccaaacgagccctgccaaaatattggtaacggccaatcccaaagtcaagaggtcagctcgggactgcgaatggggacgtgcctgccggcgtcgacgacgggggcgatgccggagagggagcggtttaggaggacggcgaagagggaggcagagccgacgtagattgggagggtgcgaacgaggtcgtcgttttgggagacccagtcggcgaggaaggggcgttttggtgtggggcctctgtaactgtaagcggaaaaggaagaaggagaatgagaagaaagagtgaagcgaggttggaataataaggtatttgaattggcagtgttgatgggaatgggaatgcgagtgtggagtcggagactgagagcagttcccgcttccatcattaaactttcttatcaatgcgattttcagatagccctctcctcgagccgattcggctcgagc

SEQ ID NO: 51906 - DNA, 521 bp, Glycine max
  Clone ID: PAT_MRT3847_17886C.1
gcaaaattgggacaatttcagcccgaagtacaggttgctttgaaaaaatttattttaatataatattaaatcttcattctgaccgggtccaaatcatttgtcaaaaatcacaaattggcttctgcaacataaaaatctacaatctcaaaagttgaaacttgcccacaaaatggagcatttcctaactgatcaattgggtttggcttggccctttctacattcttcataaccggatttacattattttgtacactaggattttcatgttctttgcctctcgaagctaccttggattctggtaattggggcttccactttataccaactgcctttgcctgatcagggaacaaaccttttgataaggatgaaccacatatttctctgtaagtatcataattggcaccacatgtatttccaccttccaaaagttttgacagtggatgcaaaaccgagattgcaccaccacttctctccaaggaatccttcactaaaagaaaatcagaaactaactcagttttgct

SEQ ID NO: 51907 - DNA, 622 bp, Glycine max
  unsure (1)..(622): unsure at all n locations
  Clone ID: PAT_MRT3847_17887C.1
ttcncgattctctttcccttgaatattgttttcgcagttttaaaacgataatttgatcactactgacgtaatagctagctagctaatcatggaaatctttcaagccacagcagaaaagatggagattaatcccaagagatttacaacattattctttgttgtacttttcatatcatttcctgttgctttcatagtttcttcaatctatcgaaactcaagtttcgctattttttatgaggggttaacagaatcatcggctcaaaacgttacaaacaatggttttccgttgggaggaagagtccacaatactacatcggatgatgagattgagactcacttaagaacaagacacaatgataccgtgtcggtggtgttgccgggcaatattcaaaacggtagcactgtagaagaaagagctagaactatgaatagtactgcatcaggaatagaaggcaaagtagaaagaggaacagatcggaacgtaactgctgagttgctgaatggtggagttaaggacctgcaagagagatcccaaaataatttcgctactgaaggaagatctgagaatatcacagcagcatatgctggctcgaaaaacgcttcactggcaagttcaacaaat

SEQ ID NO: 51908 - DNA, 1180 bp, Glycine max
  Clone ID: PAT_MRT3847_17888C.1
tgagactcacttaagaacaagacacaatgataccgtgtcggtggtgttgccgggcaatattcaaaacggtagcactgtagaagaaagagctagaactatgaatagtactgcatcaggaatagaaggcaaagtagaaagaggaacagatcggaacgtaactgctgagttgctgaatggtggggcaaactttacaactcatggatttgaattgggaggaacaagccaaaatatatataacacgttatacgcatgcgtttttcttactgatttccattcaaaacttccattattgccgtgtcaatttgtttcttaattaattgaactaggtggagttaaggacctgcaagagagatcccaaaataatttcgctactgaaggaagatctgagaatatcacagcagcatatgctggctcgaaaaacgcttcactggcaagttcaacaaatgtgtcaaccacagaacctgttaatcttgatgacaatgacaaactgcttgggggattgttaacttctggatttgatgaagcatcatgcaaaagtaggatgcagtcccatttgtaccgcaaagcttctcctcataaaccttctccatatttgatatctaaactacgtaaatacgaagaaattcatagaaggtgcggaccaaatactagagattacgacaaaagcatgaaaaagattgtaagctccaagaacaatggtgctgctaccaaatgtaagtacattatctggaatactgccaaatggtttggggaatcaaatgattagcatagctgcaacatttctttatgccatcctcactgatcgagtgctgcttgtaaaatttaataaagacaagcatggcctattttgcgagccatttctcaattcaacttggatattgccgcagaagtccccctttagttcttggaatgaacacaataccgaaacatatcagaccatgctagacaaggatagggctagcaattcaaagaagggtttaccatctgttctgtttattaatctacaattcagcttcgaaaaccctgagaaatattttcactgtgatcatagtcaagatcttctccggaagatccctatgttgattctgcggtctgatcaatactatgtcccatctatgttcatgaacccatttttcaacttggagattgccaacatgttcccagagagagacattatttt

SEQ ID NO: 51909 - DNA, 603 bp, Glycine max
  Clone ID: PAT_MRT3847_17889C.1
gttttcgcagttttaaaacgataatttgatcactactgacgtaatagctagctagctaatcatggaaatctttcaagccacagcagaaaagatggagattaatcccaaaagatttacaacattattctttgttaatcatcggctcaaaacgttacaaacaatggttttccgttgggaggaagagtccacaatactacatcggatgatgagattgagactcacttaagaacaagacacaatgataccgtgtccggtggtacgtaacagtttttctttttcgtttatataactgttgtattcttttgttctggactaaaactcactctacttccgtaataatggacttggcaaagttaaggtgttgccgggcaatattcaaaacggtagcactgtagaagaaagagctagaactatgaatagtactgcatcaggaatagaaggcaaagtagaaagaggaacagatcggaacgtaactgctgagttgctgaatggtggggcaaactttacaactcatggatttgaattgggaggaacaagccaaaatatatataacacgttatacgcatgcgtttttcttactgatttccattcaaaacttccata

SEQ ID NO: 51910 - DNA, 1179 bp, Glycine max
  Clone ID: PAT_MRT3847_1788C.1
atagttcagttgagtgggtgtggtgagtaaaaaagaacatgaaaccttgtgaccacaaggttcaacttgtgagggggatcaaaacattcctagattggaatatggcaaaacttggttgttctagtcgtaggaaagcaattgaggagctccttagagggcgtgattgtgccaaacaacttaggagtgtcatcaatgggagttgtgaagatggatcatcaacaaccccatcatttgctgaacaacttgtgaaggaggtgctcatgtccttcaccaactccctctcgttcttgaagaacaaccccacttctgaatcccatgatgtttccaatgttcaagtttgtgaatctcccaagtctgaggactcccaagagagcaattgcaagagctccatcattaaggaacgtagagggtgctacaagagaagaagaactgaacaaacatgggagaaggaatctgaagctccaattgatgacggccatcagtggagaaagtatggccaaaaggagatcctgagtgccaaattcccaaggaactactatagatgcactcacaaatttgaccaaggttgccaagcaacaaaacaggtgcaaagagttcaagaggaaccaatcctatacaagaccacctactatggcctccacacttgcaagaacttggcaaaccctgagatcatacttgaccctatgtccccttcatcctcatccaagttccttagctttgacaactccttcccaaccccatcaaagcaagagtgcccctttctctcatcttctaatttgccatcatcagtgaaagggggagtgcagggaggaggtcccctccctcaacttcctccaatcattatctcatctcttctgacctcacttttgatagctcaccaaggcatcatgtcactctatcatcaacacttgactcagagtacaagagtgtggacatttcggatgtcttgtatgattctgctcagcttgatgatgcctttgaacccttccttgaatttagatgagcatgtccttgtttggtttgtgattttttttatataatttttactttagtgaaggcagtacaaaacaaaattgtctaatatttagtagtacttttcttagataaatgtaatatccgtgcttttattgtaaattttgtcattttcaatgaatgagaaatgatcataatgtttcaatg

SEQ ID NO: 51911 - DNA, 941 bp, Glycine max
  Clone ID: PAT_MRT3847_17890C.1
cccactggtcacgtgttggtccaaacatccttcttctttttattttccgcactttaaaaaccactattccacaacacacaccacacaaatctccttcctcgtagtccggtccgacacggaaaccacgctcgagcaaccctccactccgccgcagcccgacccctccgccgccgtatccttcagcatatggccccccactcagcgcacccgcgacgccgtcgtcaaccgcttgatcgagaccctttccgccccctccgtcctctccaagcgctacggtactctctgctccgacgaatcctcctccgccgcccgccagatcgaggacgaggccttctccgctgcctcctcttccgacggcattgagaccctccagggctactccaaggagatcagcaagcgcatgctcgacaccgttaaggccagagctgcgccgattccctccgccgaagagggcgtcgccgcctccgtctccgactaatttgtttgcgtgttgagttttataaattgagcttctcagattttgtgcgcgattgaaactatatttatctcaggtgatgttgtgagtgtatccgtgataatatttaattccatgggcagatgaacttactgattagccgctatttgaaatgttctgatttatttgccgtttgtttgaatcaaaccatgtgccaagattccaaccaatggtgcttcttttgttctgcaagcacgttagagtttattgtgttaatcatttgtgttatttaattgcaactatttctcccttcgattctggctgattaacatcccatttaactttgttttgttgtttctgtaagttgtgatctgcaacttcttacctatgtagcaatcttgaactgacatatgcatgtctgactacaagttgtcttcttattttcttataccttgtaagtctacaatcatatacgcctggttggatc

SEQ ID NO: 51912 - DNA, 2410 bp, Glycine max
  Clone ID: PAT_MRT3847_17891C.1
gttcattccaagagattatggaggactaggcagagaatataaaagttgaaacggaaaatggagagtaaaagcggcccagggatgaaatgtattatgatataatgaaagatacacaaatgaaaccgatatttgcacccatggctttcgcagcagctcctcttattccaggttgtattatacggaaatcccaaagtttttgtttttgaggagtactgctcgttgcacggtccacgcctctcgcagaccaccaccccctgggcctggagttgacaccagaatccattgggaaaacgaagatgaaggttggattggagctaccaataccaaacaccaacagacccacaaacccaataacaacatgttacaggctgatgactttcctgatttcctctcagcttctttaggttctcactactaattcttgggtgtatcacgagatgcggatgtagaaagaaattgaaagttgcttatcggaaattgtcaaaggagtatcatcccgacacaacttccctgcctctcaaaactgcctcagaaaaattcatgaaattaacagaggtttacaacgttctaagcaatgaggagagtcgaaagttttatgatttgacccttgttcaagaagcttaaggccgcaacgtagagaagatgaatctgaaattacaagcagttagtggggaagtaatagaagattatcagcctggtcaagaagtgaagcaaaagtttaatgataatggggcataacctaaaagcatggacggaatatgtatctgttaagtttatcagacgtgttggtgactacctctctctcaacatttggctacgttgctcaaggattgggaaatttaaagccatggcttctctacaggctagtcggtaaccatagcggcgattttccacgctgtgaacgggatttctcaacagagccttgctttcatatgcctcccaagcattactgcaacggagagcccatgaatgatatcgtttcttctttccccaatttgagggagtgcaaggatttaaggtttggtgtgaagctggcggccgttaacggttccatgtagttccaattgtatcattttggtcaatctttcacctgtgtaaagcccttaaagctcatggttattcattcaacaaattcctgcagcacccagacaaatagtgcccaattacaattaacaagatttatattatgttggaccgattcatcttggcttttcccgcggcagtcccccgtgaggtctcggttggagcacaataccggaactttgccgaccatgctaggcacggatagggctagcaattcacagaagggtttaccatctgttctgtttattcatctacaattcagcttcgaaaaccctgagaaatattgtaccctttgcttaatttccctttcccttgaatattgttttcgcagttttaaaacgataatttgatcactactgacgtaatagctagctagctaatcatggaaatctttcaagccacagcagaaaagatggagattaatcccaagagatttacaacattattctttgttgtacttttcatatcatttcctgttgctttcatagtttcttcaatctatcgaaactcaagtttcgctattttttatgaggggttaacagaatcatcggctcaaaacgttacaaacaatggttttccgttgggaggaagagtccacaatactacatcggatgatgagattgagactcacttaagaacaagacacaatgataccgtgtcggtggtacgtaacagtttttctttttcgtttatataactgattcttttgctaactactctagtaataatggacttgcgttgccgggcaatattcaaaacggtagcactgtagaagaaagagctagaactatgaatagtactgcatcaggaatagaaggcagtagaaagaggaacagatcggaacgtaactgctgagttgctgaatgggcatcatgattgaaatgaaatgaacatgggatatatatcacgcgttttatccaatttcactgtgatcatagtcaagatcttctccggaagatccctatgttgattctgcggtctgatcaatactatgtccatctatgttcatgaacccatttttcaactcaagaactgggaacctgttcccagagagagacatggttgtccgccttggtgaaggaatagaagcttagtgatcaggcagtttcggccatcaccattgatctctttatcattgtttttgccctatgttgtatcatatatgttattttctttaaagaaccctattactattagtattggctagttaaccaattataacaccctatatgttatacgacagaatcaattaatataaaacattacaagatttctccacctgtttcacccttccaacgatgcatgggaactaatcagcagttactat

SEQ ID NO: 51913 - DNA, 585 bp, Glycine max
  unsure (1)..(585): unsure at all n locations
  Clone ID: PAT_MRT3847_17892C.1
cacgcgtccgcatnacaggttttccaaagggagaggcttaatggccactatggtgtcacttcatttgtcatcagcaacacattatctgcaatgcccttcctgattttgatcacctttctctctggaaccatttgttacttcatggttcgcctacaccctggcttctggcactacctcttctttgtgttgtgcctttatgccagtgtcacagtggttgaaagcttaatgatggcaattgctagcattgtccccaacttcctcatgggcatcattattggagcaggaattcaggtatgcatgtctctccccagaatctagcacatgtacattaaattacacccatccaaaacattaacatctcttcttttaaactgagaaaacttagatgcagtttcgtaagtgcttttagtaccgttctccaattagaattggagtttcatctcggctgtgatatttaatggaatattntatacagaaattactgagatgaaactntaattctgattgcagacatcactaacaacatctgtagagctgcatctaagttntgtcccttatcaatgtcagagtactaattacacacca

SEQ ID NO: 51914 - DNA, 634 bp, Glycine max
  Clone ID: PAT_MRT3847_17893C.1
ggctcgagaatttatttatttgcgttaggaagaaaactctaatttgttatcattgatattgttttgtgggaagaagcaagataattactaaaacatagacagtgttagttggcccggctcatatgaattacaagtataaaaaaaacagatacaagcccggaatttcacccaagaacaaaaagccgtacaagcccgttaaacacccaaaattatgccataacactaatttcttgttgattacaatctggtttctatcagcttcagatcagcagtttgattttccttctgtaaaaattagagttattgatagatccaaggacctgcctttcatatgcatgggccatacatatggaggtgcagggaaattaaaattaactacctatgttattatctctgcaatatgatattttttttaatcagcaaaacagatcaatattatatatcatacttaaaaaggacgtgagagaggggaggattgcaaacattaagcaactaaacgtagatgtacaacatgtaccctttaagaaagaaccaaggaggtcttcattaatatatatcatatataggagtatcgatggtaagaaccgcaactcatttggggtctaaaattagtattgtttaacacaaaacttgg

SEQ ID NO: 51915 - DNA, 868 bp, Glycine max
  Clone ID: PAT_MRT3847_17894C.1
ctaccctgccaattatatgcctttagttgcatactttactgtttacttttgatctgctaaggtattacgttacattacgtgtagtttgccaactgggtcatgtttgtacaaaaggtgctggagacttgtgatgaccaacagcgagagctattctttcacgaattaaagttcatttgaatgcattgaaaaagtacacctatgggaagcatattgttgctcgtgtagagaaacttgttgctgctggagagaggagaattgctgctcagtctcctcatcctgcttaggtgggcatagaaagttgtttgtacagctaactgaggctagtgtgagctttctcctctcttttcctgcatccggaggttatgtttattcctatctcaatctgtcgtgatgggtagtggccgattggaaataaaaacactatcggttttaatgaagaactgtacattttgtagtccaaagtttatacatagaagaagaatttaagtgaggcgaggctcagatgtgtaatactcacctgatgcccccctgcagcagaggagataaagcgacaatacgagcctttttaaggatgtaaagttttataaaacgaacggtgaggtagtttataagttgacgcgactgtacaaaatgttggcatgtggagagctgtttatgtttaggtgagagcagggtttttctttcatgtatgtttattgactttattatgccccaattttacaagtttactttccccttcaatgctcttatgttttcctgaaattaatccctcttttttggagttttttactgagattctgtcaattgactttaaggtatggatgtcttctctttgttttgatttaaggtcatttgcttatgattaaat

SEQ ID NO: 51916 - DNA, 465 bp, Glycine max
  Clone ID: PAT_MRT3847_17895C.1
gaaaccaacatcactatgtaactattactaacctgagataaatatagtttcaatcgcgcacaaaatctgagaagctcaatttataaaactcaacacgcaaacactacatgatgagaatgaaattgatggattaatattattaccacaattggatgcaacaaaaacctacacgcacacaagagaaagtaactctacatcatcgcagaacacacaattagtcggagacggaggcggcgacgccctcttcggcggagggaatcggcgcagctctggccttaacggtgtcgagcatgcgcttgctgatctccttggagtagacctggagggtctcaatgccgtcggaagaggaggcagcggagaaggcctcgtcctcgatctggcgggcggcggaggaggattcgtcggaggagagagtgccgtagcgcttggagaggacggagggggcggaaagggtctcgacaagcg

SEQ ID NO: 51917 - DNA, 1117 bp, Glycine max
  Clone ID: PAT_MRT3847_17896C.1
aattcggctcgaggatgaccataaactccacttatctgataccatataacattagtatttttgttttatgttttgtttgttgttacttcgtcgtgtagtgacctcactatagttataaagggttggcaaatgatgtgaaaatttcttatcctatacactgaataaatattgtgaagatcaaaaactccgcttattatctgatgccttccctgtcttaattttctcacttttagttttggttgtaactcttgagtgatttttgtgtgttgcggggtttgaaaaaactttatatgattttgtacaattgtttaactcctcaatgatgaagaaatgcagacgggcggactgaactgatgccgtgttgattgtctgccacttccattttcggaatttctctgagattattttccatactttaaacactatcgttcaagaaaaaccacgctcgagcaaccctcctcccccctaacaatgtccgacacggaaaccacgcccgaacaaccctccactccgccgcaaacggaggctccgccgcagcccgacccctccgccgccgtctccttcagcatatggccccccactcagcgcacccgcgacgccgtcgtcaaacgcttgatcgagaccctctccgccccctccgtcctctccaagcgctacggcactctctcctccgacgaagcctccgccgccgcccgacagatcgaggacgaggccttctgcgccgccaccgcagcctccgcttcggccgccgccgacggcattgagaccctccaggtctactccaaggagatcagcaagcggatgctcgacaccgtcaaggccagagctccgccgagtcccgccgccgtagagggcgtcgccgccgccgtctccgactaattttgtgttatgcgatgatgtagagttactttctattgtgtgcgtgtaggtttttgttgcatccaattgtggtaataatactaatccatcagttttattctcattatgtagtgtttgcgtgttgagtgttataaattgagcttctcattacattacgtagtgatgttggtttctctctttatgtgcaaattgagttttcttaatattttagaatttagataaaaaaaaaaaaaaaaaa

SEQ ID NO: 51918 - DNA, 1199 bp, Glycine max
  Clone ID: PAT_MRT3847_17897C.1
acctacccagaatgaatagcacatccaccacttacttctattacaataacacaatattctcatcggtaacatccatcaccagaaccatggtccaagagaagaagctcgtggacgaagtgtcgggttggctgagactctacgaagacggttcagtagaccggacttggaccggttcgccagaagttaaattcttggttgaaccggttcctccccatgaagaatttatcgatggagttgccactcgcgatatcatggctggtgacaatttccgtgtccggctttacctgccggaaaatatctccaatgaggagaagctacccattttcctccacttccatggtgggggattttgcataagcgaaccggactggttcatgtactaccaattttacactcgattcgctcgggtggctcgagtaatcgttgtctctcccttccttcgtcgtgccccggaaaaccgtctccctgcagcgattgatgacggcttctttgcactcctctggctagattccgtagccagaagaaatgcagaggagccgtggctcaaaaaacatggcaattttggccgtgtttttcttataggagatagctcaggtggaaatattgtgcatgaagttgctgtccgtgccggggaggctaagttggacctgctccatctcgccggaggaatcccgatacatccggggttcatgcggtcgaaacggagtaggtcagagttggagaaaccacaatctccattcttgacgttggacatggtggacaagttcatgagcttggcattgccattgggttctaacaaggaccaccccattgcatgccccatgggaggcggcgctccgccgcttagcgggctgaaactgccgccgattctgctgtgcctggcggagatggacttgatctttgacacagagatggagtacaacgaagccatgaagaaggccaacaaagatgtggagttgtttgttaacaaaggagcgactcatagtttctatctcaacaaaattgcggtggatatggacccaaatactggtgctcaaacggaggctcttattgcaaggatcaaagagttcattgagcagcactaaattattttgtgtttcttttatttttcttttttgaaaaattgaaaaataaaacttgaagtgtgcacttgacaaagtgagttactttaatgaatgaaataactaataagtaaaaaa

SEQ ID NO: 51919 - DNA, 475 bp, Glycine max
  Clone ID: PAT_MRT3847_17898C.1
gtgcggcgctcgaggcggcaggccgggacccaccccagaaaaactgagcaagccagacatcatggaaaatggtgttgtgaccgtgaatagaaaaaaccatgaatccaaagctaattccaccattaccattaagggtttcatgagccttctgatgaaaagtgtagatgagaatggtgatggtagcaagagagttatttctctgggtatgggggatccaactctcaccacttattttcccatctcaaatgtagctgaagaagctgtttccgaagcccttcagtcacacaagtttcgtggctatgctcccactgcaggtcttccacaggccaggatgtaatgctttctttcctttctctctcacactctctttgtgtgtgttttgaatttcagattcgtgtgctgcatgttatacacattgtttcctttcagaaaataaaattaactctgtccatctttttcttgttttcacttctgc

SEQ ID NO: 51920 - DNA, 195 bp, Glycine max
  Clone ID: PAT_MRT3847_17899C.1
ctctcacatcatttcccaattccggggtttccttaatcatatcctaattccgccatgtcccatttgaacggagcctactatggcccctccatcccgcggccgaaaacttcctacaaccgcccagggcgcggcggaggctgctgctgcggttgcttcttcagcttcatcttcaggttcatcttaacggggttattc

SEQ ID NO: 51921 - DNA, 346 bp, Glycine max
  Clone ID: PAT_MRT3847_1789C.1
atgttagtgtattaaaattccatataaaaaccgtgcgttatttcaagatcagagatttacactacccattaacaggtcaaatctatatgacatttttggcacaaccacatttacaagcattgacacaatacagagtactgaaaagggactggaaggcataaaaataccatgggattgatcatatgatcatgaccatgtggtggagtctaaaatgaccttgtgtatgtcacattggtggaatgctagagtttgagcaagcttagtggcctttattccttactaatgacaaacaggtaatggccacttccaggcaagagcgtaaactttgtgacctaccttgccaata

SEQ ID NO: 51922 - DNA, 172 bp, Glycine max
  unsure (1)..(172): unsure at all n locations
  Clone ID: PAT_MRT3847_178C.1
ggctaccctgactgtacctccagttcctccttcccccagagatgatgccatgccgctcttacgtgntcttaagggatttcggtgccataccaccgctgtcctcactatacccgcctcatcgagctcctacacagccctccctacatcccagcaagaatacacccccctgtat

SEQ ID NO: 51923 - DNA, 587 bp, Glycine max
  Clone ID: PAT_MRT3847_17900C.1
gtttaatgatacggtacctacaagagttgaaaaaatgagttggaaattgtaagtggcaaccaattgagatgctgataaacatattgtgatttagaataactaaaatgttgcattctttctatactaatagaacgtgcaacagtgcaacactgcaacactgctatattctctgaaaaatgatacagaaagaaaacagaataattaaataaaataagaaaagaaaggttgtcctcctgtctccaattgtgaaacaatgtttaagatagtaaactccagttaaacgggccaatctctattagttgtaataattagattgttagtttgacaaggcataaataattagaaggacaaagaggagtctttggttttagagtggaaattaggagggaaagtccaaggacttatttgtttactgttttcaaaaataatttttgtttacaaaaatttgtttgtctcctgagcacattttggaagtgtttgttccctaagacatttttgttttcttaaagtttgtctcctgagcagagaagtttaaggaaaaaaaaaggatgagaagctgagaaagcagctcccacttgttatgtaaa

SEQ ID NO: 51924 - DNA, 253 bp, Glycine max
  Clone ID: PAT_MRT3847_17901C.1
gagttagctcaaccctactcttcgtccagtctccagctcaatctccatccaatttagctagggatactgaagagtgcatggatgatgatgtcgcttaccctaccaagatcactactaccagactcctatctatgcttggctatcgcatcaccgtcatggacattcacttcatccatgcgacattcgattcaatcggggtttatgtagcgccagaactattaggacactttgaccagttcactccgacatctgc

SEQ ID NO: 51925 - DNA, 291 bp, Glycine max
  Clone ID: PAT_MRT3847_17902C.1
accggttgcaaaaggcacaccagagggggctcttttacaacgaaacgctgtgaatcttgttctatctgtgacgggcatgatggtctaacgagcagggttatagatggctctgggtgggctctcactgatggttgaggacagccagccaggaatgtacctctgttgcgtgaaaggtcaacgtctactgcgaccctagtcgagctggaactcgagaccttaggctaccacctacattggtagtactcagattgtgttgacatgcatgatcaaggattgcgacctagctatagt

SEQ ID NO: 51926 - DNA, 299 bp, Glycine max
  Clone ID: PAT_MRT3847_17903C.1
tttttacaaaacatatcattgttcttattcacttatcagagtattgattataacctgaataacaagcactatggttatcgtagtacagaaatcataaaatatgttgggacttataaaagaacacaattcttggttattattaaccctatattgacgccctttataattgatgatataagattatctctgccttatacatgctctaagctctttatcctgtaatgtggtctgcagcatgctcatctattggaagcatttagtggtgcatctacattatactgctattgtgagttatatta

SEQ ID NO: 51927 - DNA, 217 bp, Glycine max
  Clone ID: PAT_MRT3847_17904C.1
gttgctattttgcgccgtgaccacctcaaacctaccctaatccatggttgattacctgctccagattgagagtagcgctcatgataatggcggaacagatgatgtgttgtcagacccatgctgagatggaggcgcatgagcagacccaacggctaatgaaagacgctgtctgactgtgaggctgtctcgcagcgagctcgacagagggattggaaca

SEQ ID NO: 51928 - DNA, 336 bp, Glycine max
  Clone ID: PAT_MRT3847_17905C.1
gaaacttgctgctatagaactgggcgctgtgtatacagggactatctttaacataccagctgttactataaaccaactaaaggtcattgagcaaagctaaaagcagaatcagatgaaaataccctccataaggaacacacatcatttgcatatatcaaggataatgatctctttctcaaaatgtacaccacaaatcttggcctatgagtacatgaagaatggagcgcataagaagaccatataacgtgacataacgacataccaaaacattattgtatgtggcatatcaaatcaacaatggcctggacactgctagacgcatcacatacctacatt

SEQ ID NO: 51929 - DNA, 479 bp, Glycine max
  Clone ID: PAT_MRT3847_17906C.1
gctgcgagaagacgacagaaggggtctcatgatgctgaagcaattgctcttctcttttctattaatcggacgtctaggatgcagctccaaaacatcatctttgagactcactgcctgcaaacagttatcagatattcttctctcaaagcgtaccattgaaaccgagtttggagatattgtcaaacgatgtagacagaatctgagttcttctcctaactattctgttagttgtgttggtcgagaagcgaatcatgtcactcgttattcagtaaggatgtcaagatgttatgctaatcaacacattttttgttgcatttcatcttgtattcagcccattattttgaataaaatggtatgagtttgttgacttaaaaaaaaattatgtcacagtgcacactgtaattaatgacgacaataacaactaacaaggatcctattaacggaattctcttttgggggtgtaataacgcactatataa

SEQ ID NO: 51930 - DNA, 401 bp, Glycine max
  Clone ID: PAT_MRT3847_17907C.1
ctcagaaccattatatcctgacatgactaaacatggtgtttctgttggagatgttgtagcagaagagaaggctagccataaaactcctactgtggttgagatgtcttccaagactgatgatgctgttacatcatctttaaagcagaactatgttggaaatgctttagttaaagaaaaggatggagattgcttggtagctgataacgcagacgatactttagtagtaagaagtgcagcaagtcctcgcacagaaggtcattgttgttttgcaccagaacttgtggattaccaagtttctcaagatcttgaccgtaacatgcgttctagctctacaaaatgcaaagtttaaatgaggtgagatgttttgataattttaggaagccctcaaattttcatttttt

SEQ ID NO: 51931 - DNA, 518 bp, Glycine max
  Clone ID: PAT_MRT3847_17908C.1
gatacaataatgacttcattccttcatccttccctcagaaaaatttgttttggttcaaaacatcaattgtgagtaactaactcttaagatctcctcattcacgtgcatatcagtggaagagcatgaacttattttgttcatcacacatcaatattattatcatcctctcgatctggtccttcttacccgtgctatgcctatgcaactcaaaagctacgtatatagtccacatggacaagtctcacatgcccaaagttttcacctcctaccataactggtattcatccacccttatcgactctgctgccactctttccattttgtactcttatttttttgccccccaccccccccccgttttgttatcacaagaacaattggagactctaaaacaaaacacaagatacatctccgcatacagagacagacgacccacgctgtacaccacccagtcttaccccttcctctctctcaaccaatccaatggcctatggcctgcttccccctacatccaaaac

SEQ ID NO: 51932 - DNA, 656 bp, Glycine max
  Clone ID: PAT_MRT3847_17909C.1
ctattgtttcttaccccttcaagcaatacagaaaaaaagagtcaagcggcgagcaatggcgacatcgctggtgcgatcgggttttcttcgaagcgccctaagaggaagcgctcgtggctcccaggttccgaagcgaaactttgcttcctctggtcatcacgatgatgcatatgagacggccaaatgggagaagattacatatctaggcattgttagttgcactggtttagccgtttataatctatcaaagggccacccacacttcaaagaacctcctgcttacccatatttgcatatccgcaataaggaattcccctggggtcccgatggactatttgaaacgaagcaccatgacgagcattagtggtttaatgaaggtatttgtggcactggtgggcattcgttttgtcaatgttcaacgaatagtgataatgatgattattgtgatttttgaaatgtgatctagaacttgcacttggcaacgttagtttgtcatgtttctatctcatgttcgtttgtatggttgaaacaaaataaatttgtcaaacaatatgatgcttctttttatgccgattcttgttcagtaagatttttaaagaaaatgatcttaagaccccaaaaaaaaaaaaaaaaaaaactcgagactagttctcctc

SEQ ID NO: 51933 - DNA, 328 bp, Glycine max
  Clone ID: PAT_MRT3847_1790C.1
ttatcttttagacttccgcatattggcgttcaactccgaaccgggcaccctttttctgccttaccatgcttacgctgattaccttagcgttatacaaaacgggactgccattcttaccttggtgaacaacgacgactgagactcttacaacctttaatctgtcgatgccctaatagtccctgcatgaaccacatactatgtggttacccctagctacgacgagtttttcttaatgataacactcgtcatatcttttaacaaacccggtagatttgagagtttctttctatctatcactcaaactcaacatttctacatgcaagggttc

SEQ ID NO: 51934 - DNA, 486 bp, Glycine max
  Clone ID: PAT_MRT3847_17910C.1
tgacaactacaagcactttttttttccttacacacaacgatcatgagatattatggattcgctctgttgagacagagctgaggcgataattatttgattacaaatgttcctatttaagcatcttcattctcctatacttgacctgcacagcccccacctttgatttatcaacatattgcttacaacggcattccccagtactcctgcctttgcccctgagccattaatacttttccctcaaaacggaattccatgttcaaagacggccaggcattgaaggcatttctctgattctggatcactatgccttcatgccagcaaaccttacccatcttttaattgtccagcccctgtttccaaccgattcgccggaatattcatcctgcactaataacccataccaagaccatgctgcatagggattattgaagtgtgagcactacaagccacaactctttggtttagcgcccagggaaagccatctcc

SEQ ID NO: 51935 - DNA, 616 bp, Glycine max
  Clone ID: PAT_MRT3847_17911C.1
attgttccttaccccttcaaagccaaaacagaacaaaaaagagtcaagcggcgagcaatggcgacatcgctggtgcgatcgggttttcttcgtagcgccctacgaggaagagctcgtagctctcaggttcccaagcgaaactttgcttcctctggtcatcacgatgatgcatatgagacggccaaatgggagaagattacatatttaggcattgttggttgcaccggtttagccgtttataatctatcaaagggccacccgcacttcaaagaacctcctgcatacccatatttgcatatccgcaataaggaattcccctgggcaggtcccgatggactatttgaaacgaagcaccacgacgagcattaatggtttaatgaaggtatttgtgacaccggtgggctttggatttgtcaatgttcaagaaatagtgatgattattgtggtttttgaaatgtgatctagaacttgcacttgacaacgttagtttgtcatgtttttatgtcatgttcgttcgtatggttgaggaacaaaataaaattgtcaaacaatatgatgcttcttcctagccgattcttgttcaataagatttttaaagaaaatgatcttaagaccc

SEQ ID NO: 51936 - DNA, 155 bp, Glycine max
  unsure (1)..(155): unsure at all n locations
  Clone ID: PAT_MRT3847_17912C.1
aagctccagaccttcnaatnctctactntctcacttctttctatcacatttnacttgncnagtnnttaagagcccatgtnttgncatnggnttggatactcttnttgntgnagatggcagcgncatgagcatgccngtagggaatggttnatcta

SEQ ID NO: 51937 - DNA, 344 bp, Glycine max
  Clone ID: PAT_MRT3847_17913C.1
gcggctcgagatttccatctattaatcaatgccgttgattactgcctcatcagaggcgtgtaccacagagatctgtagcccgagaatcttcttctggactcaaatgctattctagacgggacagattttggatagggcacgtatgcacgtcaggaggatgaacttttcctcactgctggaggaactccaaactttgttggttcggaggcgcgttaggagagaagtaatgttgggtctacatctgatatgtggtcctgtggagagattttcttggagctgatggctgggagcttgcccttcgatgagccatgatatgtgacactcaaccgaaacaatggcagggg

SEQ ID NO: 51938 - DNA, 277 bp, Glycine max
  Clone ID: PAT_MRT3847_17914C.1
ggctcgaggtgcaactttgaccgctttacgtggacgacaggaccaagcatcactgcgggagcggtatttttaacaaagaccctggtatccaacacaagagcaccaactggacctaccccccggaacgctcaacgagaaagaccaatccctggagctcctggcaatggccgaataaaaccagggccaagaccacgggaggcaatagatgtagagctccggtcccagagaaacaaacagaacccagtgctaatggcacgggcacactctccgcatgtac

SEQ ID NO: 51939 - DNA, 648 bp, Glycine max
  unsure (1)..(648): unsure at all n locations
  Clone ID: PAT_MRT3847_17915C.1
ccacgcgtccgggtaacagctgtcactaactgcaaacagttagctacttctcttactacctctaacagaatgtgaatttttggaatacttctacttctatagcgaatcactctctttctcttgttactagtcattttcactccgtttacttgttgatgaagttgaaacattgttgcttgcccgtgaagtgcgcattgattgatcttgtaaacaggctttaggttctatcaatcttaatcaaggtttaggatctgttaatctcaactctggaagttcttctgtcgatttcatccatagtctatgaacactaactctcaagctcaagttaatttgaccactttgacctcttctgaggacaattctgcaaatgattacagtggaaatcgatttttcagtggtcgtgggtggtttggaatcttggccgaagcaactgtgacgtncgtggttcagcctgtgtagtgtagaaaataagntttggttaatgaacaatgtcaaatttttacaaatttgccaatggttgtttcttactgctatcatagactagaggagaaattaatgttcctactcttccttcaccagcttcacttgcttctactcaatctacttcagcttccaatgctcagacttctctgcaagttcagtatgctc

SEQ ID NO: 51940 - DNA, 280 bp, Glycine max
  unsure (1)..(280): unsure at all n locations
  Clone ID: PAT_MRT3847_17916C.1
gtntggaatcaantngcaacagngagaacaccatngnntnttgattctagcnngcagagcttttntcaatnttctattagaccttctcggtggangtattttagtggncaaaactggagattggntcanacgataccaaantcctccaatnagtaacttgtnganantngctgcttggnagacangctgtntaatggtcangatnntgatgtcgggaatncagcagtcagnaggagtgattgggcntcattggtncaagtgtcgttaacagacagcaccc

SEQ ID NO: 51941 - DNA, 341 bp, Glycine max
  Clone ID: PAT_MRT3847_17917C.1
cagaactcaatattaatcttatatattcctcatttatttcagcatcagaattttatgaaagtggattgacaaacaagtgattcattaaataaacaacaatgtttggagacaacatttaccaacgagcttcaaaatgtggaaccttcaaaaatgtatcgattctatatgcaatgcatttatagagtaccaccacccattctttaaaaaaatacccaaaactacacacaccaaaaagggttaaaatgccccctttacacaaaacactttacccttgaaaaggaacacagcttttttaattcaatgaaaaatcttaaagtgaattttttaagggcttttttaaa

SEQ ID NO: 51942 - DNA, 406 bp, Glycine max
  Clone ID: PAT_MRT3847_17918C.1
cctttctcaacgctcagttgcgtgagcgcttttcgaggcacgaatgccgatcacgtacaattggcgaaagatggcgtttcgtccacagtcacacggctcgatgcactacgtcgaccatcccgaatctaactttgctgtccacctcatttctcgggaagcgaagaagctggctctgtcggtgaatcagtcgcgaagctttgggaaaggggagaccccgggcggccccacagtcgccgcgtaaggctatcgcacctttctgcctggagattacatatacaatttcgagatgccgattgacagtcgtctacctcgagaccatcgatgtctagctgggatccggcaagtatgagctggaagccgtcatcgagcgctctggggcgttccggtccaacttggttggcaccag

SEQ ID NO: 51943 - DNA, 1181 bp, Glycine max
  Clone ID: PAT_MRT3847_17919C.1
tacggctgcgagaagacgacagaagggggaccttggcgcatgcttcaggttaattgggatgaacctgaagtcttgcagaatgcaaagcgagtcagtccttggcaggttgaacttgtttcccttccatttgcacttcatacagtatactcccctaacaaaaggcttagatctgaccagggttctgggctgttaagtaatagggagggagaccccttctttcctatgacagggttccctaactcgacaatggaacacatgacagggttccctaactcgacagtgggacacatggataaatcattgttgagttatgatacttttcctgctggcatgcagggagccaggcatgatctattttctccatcaagtttttccaactttttaaatgataagtcctatctgtatatgggtagtggttcatttgggaacaatccagtgcaaagtttgggaactgtgacaacagagctaaacatgagcagttctcaatcggatgacttgtcaccacatagccagagtagttttcattcctttgccagagagtttgctgggacccggaactgtgacaccaaagttgcttctggttcaattctgctatttggtaagatcatacagcctgctgaaagtgatttgcatgatggtgattgcatggaacgtgatggcagcaggggcagcaataaacttaagacagttgaggcatgctatttttcaaagtagttatgcagcagaatgcagttaaatacttgtacaggaaatcaaggctggcaggtaaaacaggaagctgtctagggcttgtagtggtaaagtgatgtttccgggtcatcatatgttggtcttactacaaacttgaatgatgaactaacatcatgatatttgatcagttgtatgatattaatatctgacatattattgtgtatattttcaaatacattcttaaaaggcaattgtacttgccttttaaaaaaaatgcccatgcttgcgcaggtaacaacctccgtactcgtatatctttatttgatgaggtaattgtagcctgaaagaatgcttgcaatactctttaactctgtctagcatggttgctgcgtagcacatacttcatggtatgttgaggcagtatcatacctcactcatataatatttagcttgcatttatgtacgacgtcaatgaataacacgtctctgcc

SEQ ID NO: 51944 - DNA, 282 bp, Glycine max
  unsure (1)..(282): unsure at all n locations
  Clone ID: PAT_MRT3847_1791C.1
tcgcangcacgcgtacgtaagctcggaattcggctcgagngannnacaagtagnngnnaantannnagtnnganatngnttcctcaatgatntccntcnccagctgtnancaccgtcaancgtgccgnngccggnatggnnncnccattcancggnctcaaatcnatggctggcntcnccangatgnnnnccaccaatgannttacctccattgntngcaanggtngnagagtacaatgcatgcnggtgtggncaccanttggcaagaaggnttcggtactc

SEQ ID NO: 51945 - DNA, 1829 bp, Glycine max
  Clone ID: PAT_MRT3847_17920C.1
cacttcatctcattattttcatcggatatatagtacttcaggtcaccaaagaaaaaaatccaagataaaaaattgacctatgcaaggggtgtagaacatatatattctaaccaaccaagcgacaacatatttacaatagtgaaataacttccaaatgacattcaaaggtgtgttgcgttaattcatttactataatacaaaggaagatcggcaaagagaatataggaggactgaaggagaagaaaagtaacccctcagtcctccatttgtatttggcaatattgtataaggggcaactatgccagcagaagaaagaattattcagctatccctaaaaggtaaagcgaagataatctccattattcttcatagttcttgggttgtatcgataattgtactcttccttcacattgaagcgaacactgataaaacttcttccaagtcaactttggctagaccaaacatttaataattgtactcgcgctcatcaagtcatgctttagcaccaaaaaatgattgctggaacttggcttttgttgtactctgcttaactgtagttgtgctcccaaagccaaacttactaggctttttattttctactggcttcaatatttgaaaagagcacacaagtgtctcatcaacagtcatcatagcaccagcattgtcaaactctccacagtaattaggtgccgagaagatagttacaagttgtctgttagcaaagaattcatatccgtcttctacaacctgatgcgccctgcaaatcaaatcaagatcatgcttctgaaggaattctgtcaccctgtcagcaccaaaagtataggaaactccgcgttcattttctccccaaccccgaatgtcactactaggatcagaccaaaggagatcacatagtagaccagtttcaggtacttcaataggacgtggcaaaccctttatctgatttaaattgtgtaactcaggagagagtccaccatgcatacaaagtatcttttcatcaattagagctgccactggcaagcagttgaaacactctgtgaacactttccaaagcctcacattgtaccttcgtttacactcatcataaaatccgtaaatgcggtttatagaagcacattcatggtttcccctcagaaggaaaaagttgttgggatattttattttataagccagaaggagacatattgtctccaaactttgcttcccacgatcaacatagtcccctagaaataagtaattagaacgaggaggcaatccaccatactcaaaaagtcgcagaaggtcggaatattgaccatggacatctccacagatcttaattggtgcctcgagttccaagaggttgggctgcctcaagaagatatccctggagacaagacaaagctgcttgatctcagcctcagaaagttgcacctgcttccctggtctgcctctgacttcaagcagcctattaatgatactatcaagaaccccacgttccattctcagtctcacgtttcaaaagtcaagataacacaaacaaacaacaaagtgaaaggaaaagaggtagtaggtagccaagataataaaggaagtctgatgttgtctatatatcggcaatgatcatgttgaaaacaaaatagagaataaagagagaagtagctttaagtcaaattcaaataagaagagaagacccttttgtttagagttgtgtgtctagtagaagaggttaagaaaggaaaggagtggagagcgttgaaaagaggaaagtgaagaagaacatattcgaacgcgtagagagaagaataaagtggggggtgtgtgaagtaagtgcttgaagcggacgcgtg

SEQ ID NO: 51946 - DNA, 964 bp, Glycine max
  Clone ID: PAT_MRT3847_17921C.1
tcgggactttggctttcgtttcattccgttcccgttccgttcaaacagtttgtctttctcacatacactttcttcctttgtttgtcaccgcagtttcaatctcagatccaacattgttcagtccaaattcaacgcattccatggcaaatcctgcatccgcaagattctccgttcttattcttctcgtttctttgctagtcaacatcgccgccaccgccgccaccgccgccgaatcgccagctccgactccgactccggattttcctccgtcgtcttctcctccttttccttctcctgcttcgaatccttccacggccaattttccgccatctccaactccggcgccttctcatcactcgccgccggctccttcgcctagtagcaatccttctccgtctccggctccggctccagtggatgatgcacatgacggagttagcctcgccggcgtggacggcagcgacggaaaatcgtcctcctccggcggaatgagttccggcaagaaagcgggaatagcgttgggagttatcatcggtgccggagtggttgtgttgggagcgctggtgtacacaaggcgccgccagaacattcaacggtctcagtacggatacgcagccaggagagaacttctgtaggttataaacattcagtaatattctcggtagtttttttttttgtttctaatttcaattgcattataaagaattcgtgatctctgaatttcaatttcaaaattcattttacaaattactacaaatttgttttgttcctcctagtcctagctagtagcaaaatataggttgttcaaaaattatccattcgtgtattgaattttggctattctttggtctattgcccagggaatcctctatcaatctgcttgtttttttgtttttctttcaatttttttattttaaagattaatttattatattctaaatgctttaaaaaaaaaaaaaaaaaa

SEQ ID NO: 51947 - DNA, 852 bp, Glycine max
  Clone ID: PAT_MRT3847_17922C.1
aaagctggttggagttattgttctttgcttctcaagaccggacgcgtgggattttgtaattgtaaggatcaataagttgtttgtttttacttgatggactacaaaaatgctccacaactcataagatacttgtacccaaaagataacctttgtacattctgtgagaaaatcgatgacgaagtgcccaactaaactttattcccaggacttaattggttttatgcccatctttgaactttgttctcgagactgaaaacatattttttcttctgctgcaggtagtattaagcatctttggtccaccttcaagatgttcaatcattgagcaagaggaagatcgttcatcaacctcttcatagctgtaaacttacactcattggacgatgggtttcagaagcatctgtaaagtacagaaatttaaaggcgaaacagaagataggaaatacagcaattttgacatatccgccccctaagttgtgtatcatgacccttgtacctatttaataatcaatctcttgtaaggttagggtggaagtttgtgaaaaacaaattaaaaggttaatagcattaggcctatagatcaattaaccttttaaattagtaaaaacagatctttaaacacacaaattaaataaatacaaacagtaattctggaatcatcagccccaaacttatatagcaggttagagttattgttcttcgcttctcactttcttaaatgtttgttgtgcattaacttcataatggaagactgctctggtcaaccttgtatagctattggtgcagtatttatgtttgccaaaaaccaaattaaaaggttaatttaatctataggcctagtgttatttcctt

SEQ ID NO: 51948 - DNA, 837 bp, Glycine max
  unsure (1)..(837): unsure at all n locations
  Clone ID: PAT_MRT3847_17923C.1
cccggngtcgacccacgcgtcgagcactcttatcctctcaatttgaaatgcctattaccaacaacacttctcacactatgaccaacaacaggttttccggaatgatagaaacagtagcaatgtgtaagcaactttgttttggcggttctgcacttggactattcacgaaaattatcaagaaagttctatttgctctatttacttgcattctggcactaggagggtcaatagtaggaacaattgcaggaggcatcaaagggcagaccacagaagctggttttcttgatggtgctggaaaaggagcaattacaggagccattgcagcattggaattgatcaattttgatgcttttgatgagccaatttccaaggttgccctgttgagcagtttattaaatgggaaaatctttatggaatggatatgtccggctgttgcaagactctatcagttgcatgtaactgttaacacactggaaacaatttaccaagaagtatcggacatttatgatatcaggggagtcagagggataccacataatgtaattctgaagcttccttttcagccattcaactccagaaaaatgttgaaatcatacaacatgtcttgctgctcaatttgcttccaggattttgaggatggagaattggtcaggatacttccaaaatgtgaccacctttttcatctacaatgcatagacaagtggctagtccaacaaggatcatgcccaatgtgtagaacttatgttcctgaatcctgaccacattagtaattttgttgtaaagtaggttgagcatgttaataacaaaagaaaaagtaagttgttgagcttctgtcgc

SEQ ID NO: 51949 - DNA, 634 bp, Glycine max
  Clone ID: PAT_MRT3847_17924C.1
aacaattcggctcgagcgtttccgttccgttcaaacagttccttttttctcacacacttcctttgttcgtcaccgcagtttcaatctcagatccaacattgttcaatccaaattcaacgcattccatggcgaatcctgcatccgcaagattctccgctcttcttcttctcgtttctttgctagtcaacatcgccgccgaatcgccggctccggctccgactccgaagccggatttgcctccgtcgtcttctcctacttctgctcctgcttcgaacccttccccggccaattcgccgccatctccaactccggcgccttctcatcactcgccgccggctccttcgcccggtaccaatccttctccgtctccggctcctgctccggcggatgacgcacatgacggagttaaccacgccggaatgggcggcgtcgacgaaaaatcgtcctcctccggtggaatgagttccggcaagaaagcgggaatagcgttgggagttatcatcggtgccggagtggttgtgttgggagcgcttgtgtacaagaggcgccgccagaacattcacggtctcagttcggatacgcagcgaggagagaacttctgtaggtcataaacattcagaatggtctagctttt

SEQ ID NO: 51950 - DNA, 374 bp, Glycine max
  Clone ID: PAT_MRT3847_17925C.1
cggatactgggttctggaaacaacaattaggtatttactggagactgatgaatattggggatactgaaacacgctgtgtgctgtatatgactgcctattgcggagcatttgactgttgcgctgaataaggtcactgttcggatattgactgtccctactgcaagcatgactaacacgttatttggacttaatgcccgacgattgatcgtaaaacatcatgattgtcgtgatccatttctaagtttccctaacacttatgaactttgtgatgctatctacatcttttccccctacaaaccatacgggcagggttgtctattgccagacatacctgtatagattgatcgacatattcggccgtcgcgatatataat

SEQ ID NO: 51951 - DNA, 154 bp, Glycine max
  Clone ID: PAT_MRT3847_17926C.1
cccacgcgtccggttagccaaaaaattccatggttaaaaccttccggggactgatacgctagatggttggaatctgaattgtcttgcttgaaatggctgcttgctaaggcatgtaactctttttcagtatggctgagtctggggcattctttaa

SEQ ID NO: 51952 - DNA, 329 bp, Glycine max
  Clone ID: PAT_MRT3847_17927C.1
atctcgaattcgctcgagtattattgtatctcatagattgctaatatcccactattaactcttttttattaacaccatcacttaaacattcagtgaaaatttacaataacagaccgcaggtacaaatacctccctacatactttcattttatctataataccacacccccaacgattccatacttttatagaatatatatttatttataattccattccttcttcttaaccccttgattttctagtgacaaaccccctctaaatatacaatattaaactcatataccctgctccataatatcacacctacctacaatcaatataaaatt

SEQ ID NO: 51953 - DNA, 135 bp, Glycine max
  Clone ID: PAT_MRT3847_17928C.1
tcccgatgtgagaacacaacggagggggagagatccaatggtttataacaggagtcatatcggcgtaggaagcctttctaaagctttgaaatgctctaaaccgaacctatgggagggcattcttagcaagctatt

SEQ ID NO: 51954 - DNA, 448 bp, Glycine max
  Clone ID: PAT_MRT3847_17929C.1
gaaatttggaattccttggcctgaatgcaacgacggtctgtcctttgacgatttcgttcgagcctctgatgccggggcgacactcatagagttttactccaccaagtacaagagttctgctcccttacaagggttgacattggtaagaaacacccatgacctggccaaaaggttgttaattggagttttgaaatgttgtctaatagagctgaggggaaatgaagtacattatgctgacaattaatacaataggaatacaaattcagtgttgccaactatgagatcattgaactgaagatatgaattctcagtcagtcggtgcctctatttggatgtttgctggcagctttttattggggttgatttattggatttgctgagttggttgcagcgaataaaaagtgggcaggtttgatcatcgatgaatctgaaatagttgactacgtgg

SEQ ID NO: 51955 - DNA, 251 bp, Glycine max
  Clone ID: PAT_MRT3847_1792C.1
caagcaagttgctgctcaagaagctgcgaggcctagcttatgtccggaaacaaatgcaccaagacgcaatgatgctgagccttcataactccacaagcgggtagggtggttccggatgcttacaggaaaaaaaaatactctgtatgctgggagagattttcttaccaagggttggtcagggatattagctcataccttacaaacgttttgaatgaacctatcacacaagctgccaaagaagcgtacacatg

SEQ ID NO: 51956 - DNA, 413 bp, Glycine max
  Clone ID: PAT_MRT3847_17930C.1
ggaggacacggtgggtaaagtattgaagagaaacctacatcacttgaaccgcaactgatggagctgaagaagcagaagctactaatcatttgttgtgactgtgagtagcaaagtttagtttggagatgttagaggagaaggatgtttgtgtatatgtgaaagtgtagactctgacaatgaccccgccggagctccgtcacggccacttcgtgttcctgcaaccagccttcgccggaaattaaccgtcacagcgacttgagggttggatgaggtggctgttttggttcaaggtttggttcgaggaacttgactataccttgccaagcacaagaaaatggttgatcatggaggtgtgccagtagaagttggtggtgaggcgggctatgcagtacgtaatgctcgaaaaaccgagt

SEQ ID NO: 51957 - DNA, 487 bp, Glycine max
  unsure (1)..(487): unsure at all n locations
  Clone ID: PAT_MRT3847_17931C.1
ggttgnnnnnnntcttccccgtttggnttgaatttcctaacttggtgtcggnttgctgtctgggntggtttcttattcngttttggcctctcnccngtttctcnntgtccctcggcttnnntggnnttnttctgttctggtccggccgcttccttttcttttttntntcncttttncngtgtttgtgtgcgttttcctgcttctgtcgcntgatntttttnntctttttttgttctgctcctttggtgttttgctgncctntnggggtcttcctccctctnnntttttcttttgctctnagcttgnnttcncncnnnntgttctnntttccncggggnncttccccccgtnggntttctgcnntttctgnncctggttggggaatntccttgtcttctgctttgttggttttgcccgcgctttctgcggggcctgtgtgtggtttttttccttcttctttgggttgcttcttctgggtctgggtctt

SEQ ID NO: 51958 - DNA, 499 bp, Glycine max
  Clone ID: PAT_MRT3847_17932C.1
gggccacatggttaaagtcccctttctctttaaataaaggattctatcgcattgccccttccccttaaaagagcaaaaagaagaatattttaatttcttcaaaccttaagtatattctaatacacaacatagactcatacaaactcatacatgcacgattttggaatttcaagttttatacagcagattattgaagtaatggggatggtgttgtgattagtctgtgccagtagattgtgaagtattccaaggcagtgccacaattaccatcgagcacttgacaggggaagtcaaacctttggaagccaaagttggagatagaattcctggtggttcaaggaacttagatgggaggataattgtggaggtatgttgaactgtacatcaatgtttcggaatttcagcaatttttgtatattttactaaatttaaaagctttgcatttatatttacattggacccttctgtcgtcttctcgcagccgtactcgagccgaatt

SEQ ID NO: 51959 - DNA, 184 bp, Glycine max
  Clone ID: PAT_MRT3847_17933C.1
aagatgctaaggttcaaaaaaatagggttgatcctaataggagatcttctaggaaaaaacagcatgtttcatacacagaaactgataaagatgttgattttgggaattcttccaacatgccaaggcaccatgaatccagtaacaagaatccatcctctattactgacggtgtggttagtcagaa

SEQ ID NO: 51960 - DNA, 510 bp, Glycine max
  Clone ID: PAT_MRT3847_17934C.1
tagtgtacaagtcctttattaaagagaatcattgatgatgaggctgagcctgatgatagcattctccctctaagagatatgtttggaacttgtctgagtgtagttgctgctctgactaaggattgcattgagggatttcatttgcaggaggttaaaagtttcaaccaacgcaggctaatacatacaaagcttgcattttctcttgaacaaattatatccatttctaaactagctcttgcaagtaaatatgccgaagattgtgaagcaaggaactccatctgtgttggtgcagtgagatattgcattcaatgtatccatactgtacttagtgattcaaatgtgcaggttcaagtaataggattgcaatttcttaaagccaggattcaaagaggtgtaaatacagaagataactcttttataatgtttcttgttggggagctaattggtgatattttcactttgatccacaaaatgttgaagaatactataacaagagaatcggtaaccatt

SEQ ID NO: 51961 - DNA, 568 bp, Glycine max
  Clone ID: PAT_MRT3847_17935C.1
tgaagatgaagagccaaatattattatcctttaagtaaggcttttttttaagccaagtctcaaatagcataaacatcggcaaggcaacctgcagtagtagttcttttttaatatggagaccttctcggcttcgattcatgaactcagtcactacatagtattgatacttgggggcaacgatgtttggtttgtcacaatgatttgtctctaatatttgatacattcttggtcagcatttataaaaaataaaataaaacttgttttaagtactgaaaacagaatcttaaatgcttgcttttggaatatcttatttctccaaaagaaataatcttactttcaatagctctcttaggaagctgccaaaaataaatgatcatttcctcgaagtaaactgaaccaaacaaacactgaatatgtataccgagaatgtggagacctatgacttcagttatcctagattcctataccagtgaaaaaaaattcctacacactaatttgcctgcaggacacacatcactatatctacccaatgcagagacaacttcagggacaggactttataggctat

SEQ ID NO: 51962 - DNA, 193 bp, Glycine max
  Clone ID: PAT_MRT3847_17936C.1
aaagtgcgcccttcagatttttcatgtggatcctagccagacatccaggatcaggattgctagcaccactgccctatcttcactcaacttatgcattacaaatcacaaacttgtagttgcggaagctggaggaaatgatgttacaccattcgcggttgatgatattgacatctactctggagagagctactca

SEQ ID NO: 51963 - DNA, 343 bp, Glycine max
  unsure (1)..(343): unsure at all n locations
  Clone ID: PAT_MRT3847_17937C.1
gctgactctttattctttgaactttggtggttctcacacatgtttacctacctcccttggcgtntaaccatttggggcttgcttcttcttcttcatnccacttatatcattnntccaacaattgtttcaaaatcaataacttctaattctcagagccaccgttttatatttccatgtttgagtgacaccaactgtggctctctttgccgaaccaaacgtttcacttgaggacactttcttatcttacataccagatgcttcttcaccaaacatttttaattttaaaaaattaattaacagtgcttttatagaaaattatagatctatcatctttctactcctg

SEQ ID NO: 51964 - DNA, 383 bp, Glycine max
  Clone ID: PAT_MRT3847_17938C.1
gccacgcgtccgcccactcgaccaaattaattgggtactgcttcttccatatataccgggtgttttatataggcatcacggccctcttcagcactctaggccaaccctcatataccagcgaatgtacaatttggccgaaactacttgcccacatggtcatttgatcacatcaaatacttcaatggatgttctgacattcaccttcatcacgacaaatacactggtactttcttccagtccaaatggtcatacttgcatagtcacttcatcatgtacataaatatttttcctgaagactcacatggcacagttactgttatctatctatcttcctaaaatgctcaacacgactagatatactttgaattcatggtgaacaataa

SEQ ID NO: 51965 - DNA, 290 bp, Glycine max
  Clone ID: PAT_MRT3847_17939C.1
gtttttgatattcgattcagaagataatatggatttactgttgcgcgttgatctgttatgccaacattgtgtggtccacaggctactgaacaaaattgtttttgatgataagcttgtgttggataacacacaagagttctttgatggtaagttcgcagtggaatctaggttaccaatttttgtgaattgcctttatcctgtaagtcaattaccttcagaagctgtccgcgtcaatgttacatgtcgtaatgaacgtggagggtacccacctctgcttggattagttctgc

SEQ ID NO: 51966 - DNA, 454 bp, Glycine max
  Clone ID: PAT_MRT3847_1793C.1
ttttttttttatttatttgtttttttttttttttgacttatttttttttttttttttttttttttttttttttttttttttttgcagggaacaggggcccttttttttttaaacccccgaaaaaaaaaacccttatgggggatttttttaaatgttttgttgacccccacttaaaacaatataaggggaacttagggccctttttagaccccgtttttttacttttacattatgggggccaacctttttttttggggggggaaggacctcctgcttttataccaggggtttgaaaactttaaagggctttttttcccctttggggccccaaaggaaagcccccctttgtgttccaatgctcccaaaatggggaaggcccggcctttaaattttttttcccgcggcggttttgaaaaaacacccttttggagggaaaggattttggcaccccttg

SEQ ID NO: 51967 - DNA, 315 bp, Glycine max
  Clone ID: PAT_MRT3847_17940C.1
acaccgcggcggccgccctttggttgttctttttttttttttttttttttttttttatcttttctttttttttttggtttttttgggtttttttcttttaatttgaacattacttggattattaacttgatctggtaatcctgacataaggtgaaccgaagcgagcgggatctcaaaccaaaggcggggcccaatgagcagcaaaaacagggggatccagcatggacagagaatgaaatccccccactatagaagtcctaattacaagccaaaccagaaaagcttaaggacacatatagttaatagaggatcaag

SEQ ID NO: 51968 - DNA, 360 bp, Glycine max
  Clone ID: PAT_MRT3847_17941C.1
agttctagatctttatcacatacagaggaccattttagatctgtgaaaaaaaaaaaattaggggtgaaaataaaaacaaatatgacatctaattaaccttaatcctaactgatacacccaatcttgcgaatcgcatataacatatgtgatcgctccatcatgaattgatcctgacatcctggcacaacctcatctctgatcaattcgtgatcctacataacttatctagtctgcctaaaatggtctcctcacaccttaagctaatgacgaaaacaataaattgattttttacttacaaaccatcttcatgcatacattgataaaggaatacactatattccttatctttaattcctacac

SEQ ID NO: 51969 - DNA, 2383 bp, Glycine max
  Clone ID: PAT_MRT3847_17942C.1
aattggggcaaacacaaaccctaacatgcttctcacaccaaattaggttagctatgaagattgaagaggaattagtatagtgatgagtgttttcgacaagtgacaggtgattaaggaagtaggtgtctctgaactatgtttctaaaatgttttggccactcaagttcatcacagagacagtatccaacaataatagaagagctgtgccatcaattttctcttgccgatcttgggaaatcaaccaacaactttgatcaaaacagagttattgggcgtggagcatttagtacggtatacaaaggttgtctccaacataaagatggttctgattatacagtcgcattaaaacggtttcatgaaggatacagtgcagtgtataagaaagaaataggaacgatctccctggttcgtcgccatagttgtgtttatattattcgattatgcatcaatgagtaagcgaagaaccatgtgtgaatgtgaagggcaaatggagcactagattgcaatctagtaacacggaaacagccagaaaaacaaaagggattgtaccttattttcctagagtactaatcacctagccctcgagctggagtccagccctgaatcaagcaattcataataaaagccaataatacaaagttgaatgaagacaaggagccaaaactcgcaggattcggccttagcatacagggaccgcaatttaattcgaagaagccgaaacaaattaatgcagatcatattatggatactcttggttacatgcctttggagtatgtcatgaatggttctgtcactgataaatgggatgttttctcatttggtttggttctgctacgagttgtgtgtggaatggattatttcataatggcagcagagaggaaacgtatggagaagcctgttgaagagaatattgatttgaatatcaaaggaaagattgcaccggagtgttggcaagtctttatagatatcatggtcagatgcttggagtatgaaccagatgagcgaccagcaatgggtgaagtggaggtggaacttgagcatgctctgtcgctgcaggaacaagcagatatcacaaacactgatggtgattataccttattgtccaaaaccattattcccattgcccgtggtagtgaaatgaaagagtaatcctaaacagaagacagtgatacatactgaagaaatgtaggtgattaggacaactgaaattaaggtgatatattttataagaaaaaggattatacattgacacagcatatcatctcttgctgccaaattttgactatgagactgactgccaagacctcaccaatacttggaacaaacccaaaaaccagaactctacatattatgctacaattctgcaggactgccgccaaatgttggccaattctcagcatattttaattgttcattcaaagaaagaagcaaattgtgtagcacataggctctctagattagcttttactacttctgaaagatactggatggaggatgtttcatcccagctcagttttgatgtgcagcatgatttagggacaatttttgttcctgatacctcttaatgaatcatctcaaaaaaaaggtttggggggagggggatgtaaggataataaatcttagatcctattttgggctgaaattaacatgggaagggtaagatgcactagtggcaccaattgatatggattactatttatgcttaccatttgcaagaaatagaacaatacatctgtatatacgttttcattggttttattttaaagtaagcgcaacagtcattttctttttccctaatcttttattaattgagaacagcaggaatgtcggccaattctggagggtttgtcagattattttttatattagatttggtaacctccctttaattggtcctttatgagccttatttgctctattactatttttcagtgtttgcttcttaattttggaagcagatgagcgaccaacaatgggtgaagtaaaggtagaacttgagcatgctctgtccttacaagcactagcagatagagtaaacaccaactgtcgttataccttaatgtccaaaacctttattattcccgggcgcaaagagtcacaagattctgaataaagtattgaaatccataggtgatttgattaggtaagctgaaattaaggttagtgttttgagtcaaaaagagtcacagtaagccttttcgatggatcaagttgaattgagatacttgtggcttttgttgtgatccctctttgtttctgccattttgattttaccagaagccgattgcaattatcttgtaccttcaataaatttgaaacttgaaaggtacccaggaaattgaatgccaacaaaccagtaatgatatagaacccaatagtattg

SEQ ID NO: 51970 - DNA, 768 bp, Glycine max
  Clone ID: PAT_MRT3847_17943C.1
ctgacgcgtgggcggacgcgtgggcgccaccccagttgatttgccaacttcataatgtcacaatgcatgcagatgttgaaacggatgaagtatatgctcaaatgacattgcagccattcgtccggcaagagcagaaggatacatttctttctatggaattgggcattccaagtaagcagccgtcaaattatttttgcaagacattaacggccagtgacaccagcacgcatgggggattctctgttcctcgtcgtgcagctgagaaagttttccctccactggatttctcgcagcaaccgccggcacaggaactaattgctagggatctccatgatgttgaatggaaatttcgacatatttttcgaggacagccaaaacgacaccttcttactacaggctggagtatatttgttagtgccaagagacttgtggctggagattctgtgcttttcatatggaatgagaagaatcaacttcttttgggaatacgtcgtgccaatcgaccgcaaactgtaatgccgtcatctgttctatccagtgatagcatgcatatttggacttcttgcagccgctgcccatgctgcagcaaccaatagctgtgttacccgtattttataatccaagggctagtccatctgaagttcggcataccactttcaaaatatataaagctggtgaccatacacgtattttctgttggggatgcgtttcaggaagctttttgagactggagaagccaagtgtccgcaggtataatgggtacaataa

SEQ ID NO: 51971 - DNA, 427 bp, Glycine max
  Clone ID: PAT_MRT3847_17944C.1
ggccgcccttcctttgtgccttacattgggaaaagagctacaacactagctgagtcctatgtacaggaaatgtactgagcagaagcttggggacagatgatgatgtttaaccctgtctaccccctgacactatgtaacttgggggcttggctaatgcgacatggctactaatgaaacctgggggatgctgcacttgggcgtgactaacctatactctacgacttttgcctattaatattaccttcacctagtgcatatacttgaatctgtctgccatggaaaagatacaagccaatcaaggcaccacccttcaactgatgctaaaaaataggcgtacttgacacgcataccatacaaattattttagttacaacagcaaaatcggttgtgagaggacgtaatgccaacaggcccttaattaccaaga

SEQ ID NO: 51972 - DNA, 487 bp, Glycine max
  unsure (1)..(487): unsure at all n locations
  Clone ID: PAT_MRT3847_17945C.1
aggcccaagaatatcaagacggtagcaccgcgcccgtacctgtctcagatacccatcgtgngtgttcgagtcatacgcagtgtccgttgtgtttactgtttgctaggtatgtaccgatagcacgactatatatgataagtaagtatgatgccttcgtcatgcgttatagcatccgtagctctctatcagtaatggcccataggagtagctaacaatatcactattgcaaggtttggcgagtcacaatcaatatcataacggggcaattgggccctcattgggaacgtaagacacatcgacaaacctgccatttcataaaatggccttgcatctcgtatttataacacgcaggcaacccaccaatggcgatcaaacagaagttctcaaactagagcaatgagagggcaaggtaatgggatactgcatgggtgaaagtgatggcaatgtgggtattgaagatgttcaagtgatgtggtctattctggat

SEQ ID NO: 51973 - DNA, 319 bp, Glycine max
  unsure (1)..(319): unsure at all n locations
  Clone ID: PAT_MRT3847_17946C.1
ccggtccggattcccggtcgacccacgcgtccgttttctcaggaaattttgtttgcgtctgttcttctcaatgaagcaaaggtttgaaagaggggaacatgctacatgggtattgaaatgagggacttggttatagtttaagggtgcagcatgagttacagagaaagaaacaaagggaaaggagaagagaaggaatatgangaaccagtacttacgtaggaggagttggnnattcaaaatnncagtgagtcacaacaatggttcaatagaaaagaggagctgctaaccaattgatgagaatctttctgatttgacccca

SEQ ID NO: 51974 - DNA, 499 bp, Glycine max
  Clone ID: PAT_MRT3847_17947C.1
cccacgcgtccggtcgaagggagatgtttttggaattaaaataagctggaactgcaattcccccatttgcattccttgcaatcaaagatcattaaataaaaatgacaaccttgtctgcttcaaggttgttggtatggaaccttcagatgagccggttttccgtgtcaataacaccttaactgctcttgtgctggtagggagttctccatccgcactccctccagatttgttgattggtggacaagcagaaggacctgtgcctttgcaaggggacactgtgaacatcttggcttcaatacttacaccaactttttgtccgtcagtgctttcttccaagtttagagtttcagttctattgtatggcttggcagggtgtgggaaaaggactgttgttagatatgttgctcgtcaactgggcgtgcatgtggtggaatataactgtcatgatctaatggggtctgataggcaatctgttgctttagcacaagctttcaagaca

SEQ ID NO: 51975 - DNA, 658 bp, Glycine max
  Clone ID: PAT_MRT3847_17948C.1
tcatgtcggagatcgaacacatgaagaagctttacaacggcattatctacttcgttcagaaccatgtcaagcccgtggctccaagcaacaacaacactttcccttcttttctactctgcagtaataacattaatagcaatagcaacaacaacacatcatcacaaccacaagcctctcctatgagcaatgtttcaacgttgcaaaggcaagtgaagcaatttctggggtgttactccaacaacacaaagcaagcgcgtgctgtgaactcttctcccactaacagttccataaccattgttgaagaagaggctagcagtaacagctgcaagaccaagctttttggtgtgtctctccaatccaagaaaagggtgcaccctgatgagtacggatctaactatattcttcaaagctccgaaacgaataataaggcgcgtttggttttggaaaatgatgaactattaggcttgaatcttatgcccccttcaacttgttaattagttagttactagttagtcgtcgcaaaattcttaactttagaaccttgctattttctaattttaattgcttcatatatgtataaattaatattttttttcttctttaatcccttgatttttaaagttttaaagaaaaaaaaaaaaaaaaaaaaaaaatataa

SEQ ID NO: 51976 - DNA, 362 bp, Glycine max
  Clone ID: PAT_MRT3847_17949C.1
tttttgcgttttgccaaacacaccacagtaccaaactgagttggctaagttgccgtaccatggcatccggaggcaaaaaatataccaacaggagccaccacttccttccgtggctaccaacatgaggaggacgaagttgttcctggacatacacaagcctttgtgcatgagaaaacgcttcaaacaacctcgttttgagcccgatgaagagatctggggaacacgcctcataatgctagcacaaagcggtgacaacaacaacacccaattgcctgtttttgagacagttgcacaaagaaacgttaccgccggtgaaactatgacacaggagcaccgctcgccacaatggttttggattttac

SEQ ID NO: 51977 - DNA, 208 bp, Glycine max
  unsure (1)..(208): unsure at all n locations
  Clone ID: PAT_MRT3847_1794C.1
agttgtttgccttgctatcaattctggtattagcactccaagtatgtctgctaatcttacttattttaacacttacagaaaggaaaagttaccaactaatttaatacaagctcaacaagactactttaatgctcatacatataaaaagattaacatagaagaatcttaccatactaagtaattcaaacttaccaaacantcaaaaaat

SEQ ID NO: 51978 - DNA, 1912 bp, Glycine max
  Clone ID: PAT_MRT3847_17950C.1
aaaagcacaatacttattttaactagacagagtcctctaaacaataacaataatcaaccatttatccttctttgtggatttgcaaactgcaacaggcccgccgcccgtccaccccgttttctccctctatcctcctcccccatcccgccgttcccagccaagctgcaacaggtcccctccacctccagtaacgaatccctacccacacccacacccagtctaccactctccaccacccccacctaagaagccctacaagtacccatctcctcctcctccagtgaagaaaccctaccctcacccacacccagtgtaccactccccaccaccaacacctaagaagccctacaaatacccatcacctccgccaccagttcacacctaccctccccatgttcccaccccagtctaccactctcctccaccaccaccatacaagaagccttataagtacaagtctcctcctcccccagtccactctccacctccaccacactactactacaaatcaccccctccaccctaccactactagaatatagccctttcatatcacacccccacatggatgtatacagaaagtgtgaaaatgaaagccatggagggggaaggtgcagttgcagtttgcaaatccacaaagaagtataaatgtttgattattgttattgtttagaggactctgtctagttaaaatagttattgtgcttttgttttatcagacagttgtaaggcactgtgttctacatgtgtttgcagttgtctgcatgcattgttattttcaaagtccgctttatcaagctgacaagtcaaataaattattccctctctcctagtagtgggggaatagatttgttcctgtatctgataggctgagtcattcaaataaattataccatcacaatgctattgggaatagatttgttcctgtatctaatcgagcttttttatataatcgtctaaatataataacaatttacgtccaaaaaaatataggttctaagagagacaaaaggtacattcactgaactggtttagaaaataactctatgtattaaaatttgcttgtcgctctttatctgaataacattctatttcatagattccatttatcctcttgaaatgggacgagttttgcggccctatattaccgcatttgtgacaacactcggcccaacatttctattcatgtttggtccgttatccaacttacaaatgaatttagtcctaagttctggcccgggagtgggagcctcctccctgggaacgaacccgggccgaaggtgtgccggtacgaacttgtccgtcttgggcggctgaggagagagcaagggcaagtccttgtcggggctggaaacaacggggagcgacaagagcggtgaaccggttccggttcggcccaggggtcggagcgagatcgcgtccgatcctggttcggaccgggggtggttgtgctggatcggggtcggcggtggtggttgttgctgttgcggttgcggggtggagggcgtgatgggtttgggagtgggtcgggttaggacgaggatgcggccatggggtttgttgggggcggagacggcggaataggaagcggaagaagaagagagagaaggattcttgttgtgtgggttggtggtgttggttttttcgtagatgtggttgaagttaatagaggcgtacttgttgttttttgccatccaccacctttccagaaagcacaccaacagatcgaaaaatggcttccgccagaggaaaatgaaatcaacaatcaatcggacgcgtgggtcggattccggacagccaagtcaaataaattattccccctctcctagaagtgggggaataaatttgttcctgtatctgatcgaggtttttataatcgtcataaaataaaaacaatttacgttcatttgtt

SEQ ID NO: 51979 - DNA, 1016 bp, Glycine max
  unsure (1)..(1016): unsure at all n locations
  Clone ID: PAT_MRT3847_17951C.1
cggcgggccgggaaatccacactcacccacacccagtgtaccactcccctccacctccacctaagaagccctacaaatacccatcaccaccacctccagtcaagaaaccttacccacacccacacccagtctaccactctccaccacccccaccaaagaagccctacaaatacccatctcccccacctccagtgaagaagccctaccctcacccacacccagtctaccactctccaccaccaccccctaagaagccctacaagtacccatctcctcctcctccagtgaagaaaccctaccctcaccctcacccagtgtaccactctcctccacccccaccaaagaagccctacaaatatccatcacctccaccaccagttcacacctaccctccccatgttcccaccccagtctaccactctcctccaccaccaccatacaagaagccttataagtacaagtctcctcctcccccagtccactctccacctccaccacactactactacaaatcaccccctccaccctaccactactagaatatagccctttcatatcacacccccacatggatgtatacagaaagtgtgaaaatgaaagccatggagggggaaggtgcagttgcagtttgcaaatccacaaagaagtataaatgtttgattattgttattgtttagaggactctgtctagttaaaatagttattgtgcttttgttttatcagacagttgtaaggcactgtgttctacatgtgtttgcagttgtctgcatgcattgttattttcaaagtccgctttatcaagctgacaagtcaaataaattattccctctctcctagtagtgggggaatagatttgttcctgtatctgatcgaggtttttataatcgtcataatataataacaatttacgttcatttgttaacaaaaaaaaaaaaaaaaaaaaaaaaaaaaaananannnnnnnnnnaaaaaaaaaaaaanannaaaaaaaanaaaaaaaaaanggggggggcccc

SEQ ID NO: 51980 - DNA, 890 bp, Glycine max
  Clone ID: PAT_MRT3847_17952C.1
agctggagctccaccgcggtggcggccgctctagaactagtggatcccccgggctgcaggcccatcaccaccacctccagtcaagaaaccttacccacacccacacccagtctaccactctccaccacccccaccaaagaagccctacaaatacccatctcccccacctccagtgaagaagccctaccctcacccacacccagtctaccactctccaccaccaccccctaagaagccctacaagtacccatctcctcctcctccagtgaagaaaccctaccctcaccctcacccagtgtaccactctcctccacccccaccaaagaagccctacaaatatccatcacctccaccaccagttcacacctaccctccccatgttcccaccccagtttaccactctcctccaccaccaccatacgagaagccttacaagtacaagtctcctcctcccccagtccactctccacctccaccacactactactacaaatcaccccctccaccttaccactactaggtagcactttctcttcacacccccacatggatgcatacagaaagtgtgaaaatgaaagtcatggagtgggaagatgcatctgcagcttgcagatccacaaagaagtataaatgtttgattattatttagagggctctatctagttaaaattaaatagttattgtgcttttgttttattagacagttgtaaggcactgtgttctacatgtgtttgcagttgtctgcatgcattgtaattttcaaagtccgctttatcaagctgagtcagtcaaataaattattccctctcattgctagtgggaatagatttgttcctgtatctaatcgagcttttttatataatcgtctaaatataataacaatttacgtc

SEQ ID NO: 51981 - DNA, 1857 bp, Glycine max
  unsure (1)..(1857): unsure at all n locations
  Clone ID: PAT_MRT3847_17953C.1
attcccggggtcgacccacgcgtccgcaacggaaggggagcaggcatatctggaaggactgtacctaggaaggctatgtccaataaattgggaaaacagacggtagagttagctacagaaaattcacaaggaatggattctggaagcagaggtgaaaaggttgatggaaaagaatcaacgaagactcagggcttctcgcattctggacagagtaatctcaaaaggaatttgtgttctgaggaagatgttgatgctccattgcaaagtggaattatacgtgtgtttgagcaacctggaattgaagttcctagtgatgaagatgactttatagaagtaaggtcaaagaggcaaatgttaaatgatcgtcgagaacagagagagaaagaaatcaaggccaagtctcgggttgcaaaggcgcaacggagaccccgttccggttcgcaaagtgttgtggcagtggccaattctaccaaaggatccataactgcagttgaagtggcaaacagtatccatgccgattttgttgctgctgatgtgcggggaatgactaagatggatgcctcatctggatttaattcaagtttactgtcccaagcattacctccgataggcacacctcctttgaaaattgatgcccagcccgatttaagatcacagatgagcaggtcacataagacaagtctcccagcagtttctggtggtgaaaaggaccctgggtctggtgtgatatttgaaagcaagaacaaggttctagataatgttcangcatctctgggctctntgggtgaccacgcgtccggtcaacaggtaatggcacttacacagacacaacttgatgaggctatgaagcctcaacagtttgattacaggcttctgttggcaatatgactggtgctgttgatgaacccagtttgccaacatcatccattttgacaaaggagaaaaccttttcgtctgcatccagcccaattaattccttgcttgctggagagaaaattcagtttggggcagtaacatctccgactgttcttccatctagcagccgtgttgtgtctcatggcattggtcgacctcgatcatctagatcagacatgcaaatgtcccacaatcttactgcatctgataacgattgcagtcttttctttgataaagagaaacatggtaatgaatctcatggtcacttagaagatcatgatgcagaagctgaagctgaagcagctgcttcagctgttgctgttgctgccattagtagtgacgagattgttggaaatggattgggtgcttgttctgtccctgcttcagatggtaaaagttttgtagctgcagatattgatagggtagtagcaggagtaggttgtgagcagcaatcagctaatcaatctagatctgaggagcctcttagcgtatctcttccagcagatttatctgttgagactccgccaatttccttgtggcctcccttaccaagtacccaaaattcttcgggtcaaatgatttcgcattttccttctgtccctcctcattttccttcaggccctccttctcattttcctttctatgaaatgaatcctatgatgggtggtcctgtctttgcttttggacctcatgatgagtctgcatctacaacacagtcacagcctcaaaaaagtactacatcagcatcaaggccaattgggagctggcaacagtgccattctggtgtggaatctttttatggacctccaacagggttcactgggccttttattgctcctcctggaggcattccaggagtccaggggccaccacacatggttgtttataaccattttgctcctgttgggcaatttggtcaagttggcttgagtttcatgggaa

SEQ ID NO: 51982 - DNA, 355 bp, Glycine max
  Clone ID: PAT_MRT3847_17954C.1
gagacgcgttctgagactagatctcattgcagaaaacatagcatacaccacgacatctacgatgacaggttgtatatttggctgcacacctgtgaccaaaccggcgcaaaggacattactcaggagaagacttgtcaaaagtgctggcgaaaatgtaagggataacgacaatgatgacaacggtgagaggaactggatgatgaacttgactgttgctgcggctgtttctgctgctgggattgcagctgggaatgaacctgcacctgaaacttaaccaggcacctaaaaagctgccacaaagtgtgtcaccaattgtgcaactaagactacaggtaagagatgatgtactggatga

SEQ ID NO: 51983 - DNA, 433 bp, Glycine max
  unsure (1)..(433): unsure at all n locations
  Clone ID: PAT_MRT3847_17955C.1
ngttttgtttttaagttgtgaccataaactcgccttgtcctcaggcgaaatgtattgcttttgttgtttggagttcaggtacagtctaggatgctttgcctttaaagggatcccatcagttgtccatccatcttcccaaaatctagcttttgaaccagaccctacattccatcttatgccctgttggaaccagctttcctcccctgaattatgacgcacctttttcaggtcgtaccatcatttggagactgcttgaggtgtattgttgccatccaagctccgccaacctccatatttggagtccaacactctagcccagagttctccctgatggtgaaatagatcccacttccactttcctaggagagcctgattgaatttggtcaagtctctaattcccaggcctcctttttcttttgataggcatactgtc

SEQ ID NO: 51984 - DNA, 497 bp, Glycine max
  Clone ID: PAT_MRT3847_17956C.1
cctttccccccctcccctcttcccttccccccccctccctccccctttctcttttttttaaaaaaaaaatttttcccttgggggtctttatcccatagccaacaggggccaaaaaacaaatacccttttttttttttggtttcccttcagttcgcccccaaaataaccttttattggaaccccgggaggtttttctacaactaacccaaacaggggaagtggagtttctgatgttttttggccgccctatttcctttccccattcccctagtccttggggaccaactttaaaaatccaccttccccccttgcaaagcaggaagggggacagtggttttaattaacccccccacctgctcccggtaaacggttggggtttccaaccacctttgggaaagtaattgggatcaaggccgccttatcaggggttcccatcttcaaggggtgccttttctatcgggagtaaccctgctgataagggggacccaaaacttttc

SEQ ID NO: 51985 - DNA, 786 bp, Glycine max
  unsure (1)..(786): unsure at all n locations
  Clone ID: PAT_MRT3847_17957C.1
ccacgcgtccggggtccattatatcatggcaactcgaaggagtttctagaactcataaagtccatcggcgagtcccgatccaaggccgaggaggactgcatcgtcctccgcgagatcgaaaccctaaaacgccgcatcaacgacgctgacactccgaaacgcaagatcaaggagtacatcatccgcctcctctatgtcgagatgctcggccacgacgcctccttcggatacatccacgccgtcaagatgactcaccacgactccctcctcctgaagcgcaccggctacctcgccctcacgctcttcctcagcgacgaccacgacctcatcatcctcatcgtcaacacaatccagaaagacctcgcctccgataactacctcgtcgtttgcgccgctcttaacgccgtctgcaggctcatcaacgaggagaccatccccgccgtgcttcctcgtgtcgtcgagcttcttcaccactccaaggacgccgttaggaagaaggccgttatggcgctgcaccgcttctacctcaaatctccgtcctccgtttcgcatttgctttctaatttccgtaagcggttgttcgataacgatcctggtgtaatgggcgcttctctttgcccgctttctaatatcgtttccgatgatgttaactcttttaggaccttgtcgttagctttgntaatattctcaagcaagtcgcagaacataggttgccccagacttatgattatcaccaaatgcctgcacccttcattcagattaagntgctgaaatacttgcgttact

SEQ ID NO: 51986 - DNA, 978 bp, Glycine max
  Clone ID: PAT_MRT3847_17958C.1
gaagaatcagaagatgagtcaaccagtaagaagaatcagaagatgagtcaaccaataagaaagataagcttctcatgggaaaagaagcctggtgtctccaaagtaacaactactactcatggtgaaaatctgatcccaaaagaggaagagtttttggccaagttgccaccaccaccttgcacaccagaagaatcaagtgctactcatcatcacaaaaaccaccaccctcttcttgattttcaaattccacttcctccttgtgcttttcagcctcccttttatagaacttcctccaagaggggcctttgggttcaagacaaagaccctttcttagcagctttcaaagagtgcaccaagaatcatcagaaaactagtgctaaggtgaacaaaaagttgatcaaagatggaattgaggcaagggtaaggaagagcatgtcctttttctcatgtactcgatcatgcaccgttcatgacactaatttggtcaggatctctcatctagacaaagattaatgatatgttttaactttcttagtttatgttctattgaagagatttctgtacaagtcaaaatctagtataataggtgtgtgaagaataatccaagtgagaatgattattctgctactgctaagtacgatttctgttcatgatggagagcattatggttagcttattcttgtgcttccgatggccattgttgactagaaaatcaaaagcagtatatgtatgaattcagcactccacgtacccgtgtatgactttgcaatggatagttattatcttctaaaatactactatgtcttaggcatacctttgaaaatttatttaggaaatttgtttagttgcatacatacaacttgaataaatagtgttgattgaaatttcaaaaaaaaaaaaaaaaaaaaaaaaaaaaaaaaaaaaaaaaaaaaaaaaaaaaaaaaaaaaaaaaaaaaaaaaaaaaaaaaaaaaaggggg

SEQ ID NO: 51987 - DNA, 584 bp, Glycine max
  Clone ID: PAT_MRT3847_17959C.1
gacagaaaacacatttgaaacatgtttgggaactaatcaaagaaatagtcataacttctggtggctcctagatgtagacatgaatttgttatacagcattaaggttgaactacatacagacatacagaaaagaccaaaattcaatggaccatcagtaaaccctgctattggagtgaaatagcattagttcagggaaattgggaaatataaaccaacttaaacatctaccatgcaactgcatcatacttctccagtctggttttgacatatcattatcctaaagtatgagtacaatttacaaggtattcctagatttttgttccaaaacagatgtttttacaagatatctaatcattactgaggcaaaagaatgaagctctcaaatatttcagcgcatacagggaaggaatcaatcaacttttggttcaaatttaaccaaaaaaccttttttggctttgtcatcagaattttcactggctatagcttctgttttggaaatcaaggtgagttccttaaaagcaagatattcacagaaacttgggaaggtttttcttttgacagaaattccataaaatgtttaagga

SEQ ID NO: 51988 - DNA, 778 bp, Glycine max
  unsure (1)..(778): unsure at all n locations
  Clone ID: PAT_MRT3847_1795C.1
ccacgcgtccgcaaaatcgtttaaaaccccaaacaaaaccctgcgacgccgcttctcgtcatctctccttttccctctctccggtgctccgccgccacttccgtcgtccaacgagaccgaagccgtgtctctgacaacatgggtgagattcaagagagcaaggctcttgcaaagagcaagccttccactgaacaggacgttactgatgagctagacctaagaatgaagaagtatctcagaggagaaggtgctaatttggagggtttgaaggataaaaagctgaagggtcaactagctgttaaggaagacttatatggaaaatctgcaaaagctgctgctaaggctgagaagtggcttatgcccagtgaaggaggctatctggaggccgaaggcttggagaagacatggaggatcaaacaggaggcaatagctcgtgaagtagatatctcaagctcaggaaaacaatatgatattattttaccagaacttggtccatactctctggattttacttcaagtggtcggtatatggctgtgagtggtcgtaagggccatctggggattgtggacatgataaatctgagcctaatcagagagtttcaggtaagggaaacagtgcgtgatgtcgcattcttgcataatgagctcttttttgttgctgctcagaaaaagtatccatacatctacatcgagaaggcacagaacttcactgtctcaaggaacatggtccagtgntaaggcttcaatttctggaaaccattttctcttggcttcaatc

SEQ ID NO: 51989 - DNA, 432 bp, Glycine max
  Clone ID: PAT_MRT3847_17960C.1
ataaaatatttctcccattttacacctacgttctccctcgccaaccttgatgcatctctaggctccgtgatagaagctatgcactcaccggatcaatagttagcgaccggactgtttgtaccatcacttttttgttttttggaataggcccattagcgatgctagacaacacatcgcttgctatctcaatctctggatctatcaccacctttaggaccaaatttggtttcactaacagctgaatgagccccaacagaatctgtacctcctggggcagatccaatcctcgcaacctgaaccgtgcctagagcatttccacgtcacatttgccaagtgcccatacgttcccaggagcatcagaagatctatgtcctctatccgactggtgtaggatccttccaattccagtggctgcttgcctcgttataacca

SEQ ID NO: 51990 - DNA, 407 bp, Glycine max
  Clone ID: PAT_MRT3847_17961C.1
actatataaaattacaataccctttaattctcaactcttttttaaaacactcaaaaattaaccccttgggcagtcattttaccgtggtttatattcaaaaaaaacccaataactcacaacaatttacatggtcttccacctactcattaccttttccacccacaatttaattctcacacccataccttcaatcttacaaactccaattatatttccaagatcaaaaacttttcctaatcatactcttaaccttttcctttttaaatatatcatccgctcacaatttcccacatcattacaaccataaactttatttcattaaaccctttttccctacttattgatctaactcacatttatttcattttcctcatcccccttttaccaaccttaaaacctttcctacc

SEQ ID NO: 51991 - DNA, 321 bp, Glycine max
  Clone ID: PAT_MRT3847_17962C.1
gtataatatttttttattttttttttttatttttgctttttataaaaggggggaaaaatgcgcttaatataccctgcattacaataacatgggacaagttcatttccccttaaaacaaccaatttttttgggcccttattggtcctttacaacaaataggttgcttgctgaaaatgaaaaaaatgggcccttcaaatttccaaacaagggaaacagtcaacaatactatgcttttctcaaaaggttttaacacatctctccgcccttaaaataaattgggaaaaacaatttaggctttattcctttacccacgtttttaaa

SEQ ID NO: 51992 - DNA, 524 bp, Glycine max
  Clone ID: PAT_MRT3847_17963C.1
cttaaaacataaacgaagaagttagtaatatgtttccctctgagtcactagagaaagagagagggaaatggctttcacgatatccagatctgaatctgctttgaaagatagagagaagaaggagtgtgcaacaacagagggtatgatatcgagccagctttgtcatcgtcgaaagcatcttctcatcaaagcatggacaaacatgcaatcctccgacgcatcaggcaacgcaggtttaataacagagccaaaaccgctctggaagctctcataggcacctcagaagccaacaacaacaccaccactgggcaagaacacttgtggcttcaactgggtgactctttctcttctccttaactcatgaatcacccctcagctacccatctataaataccatccctagatcactacttatgcagctatgaccttgtgaataccacgttcaattgttatataaaaaatgtgtgtattatattactatgatatcatctaatatggaaagtactaagctttgctttgcaaaa

SEQ ID NO: 51993 - DNA, 2106 bp, Glycine max
  Clone ID: PAT_MRT3847_17964C.1
cccacgcgtccgcgctcgaggacttctttggggaaatttcaattccttgagtaattagggttctcctgtttgattacatccaattagaggcattaattgtccgattcagccgtgtgccataaaatttgacggagactggtttaaggtaatcatggtgcagaagcgttcttttgatgctgaggaaatacttgaggggtctttcaaacacccaaaacatgcaggaccaagcactgagcttttttcattatcagaatctgttttccccgatgatgattgccattcccgtatgccaaaaacttcagaggatggatgtacacaatgtagtagtgaaggtattgagaagcttggaggtgaaagttttggtgaacttcctactggggctgggaactctgaaacaagctttcctgtaatagatattcctgcttcttcttgggccaccagtggcacaattgaagatctccacctagaaccacctttacatctgtccctttttccggagtattttagtccagagcggccgataaggacattaacccgctatgaggacatctactccatactccttgaacactctccccgtaaacctgtatctgttggatctgatcatcaagctgatgttccagcatgggatattttgggtgccactaataggccaaatgcctctgatgctgtttcagtttcagactttactgttgggcacattgacgaaactgaaaaaagactgatggggacctgtgtaatccctatgcctcagatggaattgtctagcaatgatgatgaagttggaaaggcaagtactgactgtagctgtgaagaccagggttccatgagatgtgtcagacaacatattgctgaagaaagagaaaaacatataaaaacatttggggttgagaaattcactgaattgggattcactaacatgggagaacaagtggcagaaaattggagtgctgaggatgaacagctatttcacgaggttgttttcaataatccagtatcccttgacaagaacttctggaactatctttccattgcttttccttcacgaaccaaaaaggaaatagtgagttactactttaatgtcttcatgcttcaaaggagggcagagcagaacaggaacgacctgttaagcattgacagtgataatgatgaatggcaaggtagtgagggcaatgatattgcaactcgagaggaagacgaggactctgttgctgagtcccctgtatgtcatgatgagacttgtatggctgactgccacaataatgatctgcaagcctataatgagtatgccgctgatgaaacttgcgcagctaatgaaacagtggattttaccaataagaacatagatgatgattcccaatacgatcctatagagatgcatcattctagtggttcccctctaattcaaccccaggatcagcctatttggcaggattcatgtgatggaaaagttaaagaagattcatgcacatcatcagatgtaggagttgtctcacaggagactaaggtgaatactgagaatggtgatcattggtgtggtaactataatggggtaaccaatggttatagccaaggatatgttttagagcattgtgatgcaaaagtgtgggattctggatttgtatcatgctctaaaaataagattgacttcgtacctacatgcaacatgatagaagaggtttttggtgatggacgaaggcaagacattagaagagcttgagcaatctcccaggcttttatgtgaagcgaatctcagttagcattctctgctaagggtgatcagacttcgatttttgtttttgtatatttgacattaagattcaaaaagtaaaccttcattgtaaaatagtgttttggaaggtgatttggtctttctgagttgtgttgtctcgtatattcttttcaagtccgtttggaactgtaaaatttcttattccttaatttatgagtttccactttgaggtgggatataagattggagggaggaaatagttggtggaaaagaaaccatcactgaaggaagagttccggttttatgatgtaatttggcattatttaatcgttaatgaaaattctcaatggtatattgctttctttcattcattt

SEQ ID NO: 51994 - DNA, 327 bp, Glycine max
  Clone ID: PAT_MRT3847_17965C.1
tgatcatcatagcacatcagcaggatggtgtagcgaaagtggagatttacttgcctagtcatctgcttcttcttcttcattttgtcttcctacatacaaggtacttttacaggtactagtggtaggactagcctcgaacgactacaaaattcgttacaccaagcgaactcatttatgctgttgtgagaagccatggtgaggacgcttcgggagagccagcttgaacaaatgaaggctgctctgaacgggatgatactgcctcctatacaccgcgaaagtgtgagggtgaccatgatagctaatgaaataattgatgcattgctgaga

SEQ ID NO: 51995 - DNA, 508 bp, Glycine max
  Clone ID: PAT_MRT3847_17966C.1
cgagaagacgacagaagggctagggcatctatcgcttttgaaatgtaaatgttctttaaaaaccaaaacagtacatgaacatttcctcaaagtgacaatcgcttgtaattgtcaagtttattatgctgtcatacaacttctgacttttgagaaagtgcattagtacaaccaacacctaactatgaaactaatgaagccactgcaatcagcatttcacatgccactgcaatccataagtattgctcagtaaaagtgtaagaagaaaaagttattacctttgttactccaacaataataaactatctctcaaatcaagtgttacgtatccttattggaactctcataacattgataaaaatataggagacttcatcatttgaagtgacaatatctacaaaaaaggaattctaaagcactccaatgggtgcaagacatatatatggtctaaaatccatgttccactgattaaatcaagggtgatactgatgagttcatatatgcacatatt

SEQ ID NO: 51996 - DNA, 525 bp, Glycine max
  Clone ID: PAT_MRT3847_17967C.1
ccacgcgtccgatttgatctttgttgacggccattgtgcggtatgcatgatcagttttgtttatttgtttcatttaatttcaacattctaatgctgttggtttgcattctaagaaagcatagaaagtgtaaagcatgcagtatctattgtgatgttggtttgcatacattttacctctttaaatgatttttggcattagctgttaggttaagctcccaaaaattatggaagtgaaatgtaggattttgaaatactaaatttgaaaaggatgttgagatgtgaagaattaagaagaggttattaactatgtgaataatttttaacaagtagttattgataacttgggattgattggaccaagctgggtttccagatctaaataaataaaatcaatatttgaagtatatatttggatttcttaaatttttttggtaggaaactttagattaaatattgattataattgaaaaattaatgttaaattgacctagcttaacttttctagcttttccttttatttttgca

SEQ ID NO: 51997 - DNA, 115 bp, Glycine max
  Clone ID: PAT_MRT3847_17968C.1
tgtattaacaacgccatagcgaacactaagctatcgggcgaggtctctcaatctacccacaacctcatcaccaaggggctgggcctgttgacagctccacgcccattgcggaacc

SEQ ID NO: 51998 - DNA, 311 bp, Glycine max
  Clone ID: PAT_MRT3847_17969C.1
acgcacgcaaccgtgaggttgggatccagcttgagatctattaacttacattctcatcatctgctgatggaccacaataccccctggagggggatgtttttatatgctcgagaaggcgtatatcaaatggatgctcacatgactgttttggattgggagactttcagggacggcagccgcagtgaagatcaagaagatattgcttttgaatatggaagagacgttcaaaacatatcatcaagtttagaggaaagcattgcgaggatagaagactttctctcatttgagagggcatttagccatggggatgt

SEQ ID NO: 51999 - DNA, 261 bp, Glycine max
  Clone ID: PAT_MRT3847_1796C.1
attttcaaagtaataccatgatgtatgaaatgacatatggagtctgaccattttctaacatattagcatacaatgtcaatggtccaatcctattgcttttgatataacaattagctgagaaatatgacttgttttggctctgcaaaagtttattggttgtgttctagttttactttggttcatttttgtatatagctcgaagctcttcttaatcagcatgggatattatgagagttctcatcccatcttgtgaattatttt

SEQ ID NO: 52000 - DNA, 338 bp, Glycine max
  Clone ID: PAT_MRT3847_17970C.1
ggagtacaacttcacattttagactaataccccctcttttgctgcatcagaagagttgtgaatgaagaccatggctgcacaagctcttgtagcatcatcttctcttaccgtctcaggggaggctgcgatacacactcttggaacaagatcataccaatctcgatctggcgtcgccaaatgagcctcctttcttgttaatgtagctgctaacccccctgtcaagcttggatcagatcgacctttgtggtttgcatcaaagcaagatcattcttacgtggatggcatcctatcaggtgactatggaattgaccctctgggaccttcataccctgaaggaa

SEQ ID NO: 52001 - DNA, 399 bp, Glycine max
  Clone ID: PAT_MRT3847_17971C.1
tcgattttacaaaagcaactcaatttaaaaaaggtctaccacattacattaggaggcatttgtataccttgcagatctacattgtctcatcttctttaactgctgaaattaaatatacgctggtctagagtaatattcatattcgcggattatgtatcgacggccgaaccaaattgtggacaaaacgaaaagaattttagcgtggttataagattaccaattactgagggtattgacaaaaagaggcaattctgctgatgatatagtaaagcgagctgagtgtatcttaaaaacatacttataacaaaagtctaatgggatcgagggtgcggttctgggacaaaggtgagttttatgggcacaacttagtttgctagaaattgtgaacctctagacaaa

SEQ ID NO: 52002 - DNA, 415 bp, Glycine max
  unsure (1)..(415): unsure at all n locations
  Clone ID: PAT_MRT3847_17972C.1
tttaagacctaatgcatattactctaaactttcactactaggtcgatgccagtggtcacaagattctgtattatgtgtagtgtttttagtagttcagattttgtacatccacattatattgtcattatcgtaaatggtaatgtgggcccaatgttgttgcataatttttaaaagtacaatttacatgcatgggcagtctatattttagtatatgcaaattgatcccttacccaagtatattataatttaatataaggtatgcatgtatattgagatcaattatttatggaacaaattcccatgataaatttcccccttgttaattgttagtttttgctcatgtgatttattaatgtaactnatnattttcccctatgaatttnagttttgtntgttaagtnaaaatattatatat

SEQ ID NO: 52003 - DNA, 442 bp, Glycine max
  Clone ID: PAT_MRT3847_17973C.1
cagagagatgaggaaactgagacccagaaaggtggaagcacttgtctaaggtcacgcctccaggaagcagtgtgtccacgactccagtccaagtggtcaggctccagagcccacagtcccaggggtccatgatgccgagctgcaatcgttcctgcagctgcagccgcggccccagcgtggaggatggcaagtggtatggggtccgctcctacctgcacctcttctatgaggactgtgcaggcactgctctcagcgacgaccctgagggacctccggtcctgtgcccccgccggccctggccctcactgtgttggaagatcagcctgtcctcggggaccctgcttctgctgctgggtgtggcggctctgaccactggctatgcagtgccccccaagctggagggcatcggtgagggtgagttcctggtgttggatcagcgggc

SEQ ID NO: 52004 - DNA, 459 bp, Glycine max
  Clone ID: PAT_MRT3847_17974C.1
atagatatatagatggtacttacgtatcacctccgtgatgcatgatggaggtcttcggagactggatcagctcacaagtccaagcaacgtcaaggaggccccgtgatttgcttagtcatcacaaagagaccgggtctagtccttcaactgtgtgcctctacaatccatacttcgaaggacatcaacatccgacactacttgtcagcaaacacgaatagccatgtttcccgtctgtcgatgggacccgtgtcattgtggatcgatacttactagacctaaactaggaagatacatgtaagagaagctggatcctagtattaggggaaccagaaagggtcagagcctagtaacaagcaagaagcagagaccgtcagaagaaaagaaatcgcacttgcaggagccttacttagggggcgttacgctgggccgggacatatcgcgctactggcgtcctagtca

SEQ ID NO: 52005 - DNA, 248 bp, Glycine max
  Clone ID: PAT_MRT3847_17975C.1
gctactttttcgttttaaaccaaaaaccctaccgtagatggtccggggggaccaacttttgaaaaaactgccgaagaaacaaacacctgttgccccaccaaaagctcatgaaaccaacaaaatcaccccacaacacctgctgaaaaaagaactgaaaagcaaagaaggggaaatgttgaggaaaactctggcgatttagaagaagctttaaaaacccccgcatataaacacgaaaccgccccagcaaa

SEQ ID NO: 52006 - DNA, 255 bp, Glycine max
  Clone ID: PAT_MRT3847_17976C.1
gtacggaattcgggtcgaggagacttgtttccagatgtctcaatctatggctctggattttctactcatgtgtaagtatgaagtaattcagactgtgaaactgcgaatggcttatatagtcagttatagtttgtttgatggtatagatattcgagatactagtaatgtttctagatgtctaaaaggccagaaaattcggcatgtgcgagggtagcatgtattagatgataggttaatagaggttgtaaatatagg

SEQ ID NO: 52007 - DNA, 1785 bp, Glycine max
  Clone ID: PAT_MRT3847_17977C.1
atgggtactttctctcgttccctttccatccgctctccttcgttttctctgtttttttcaaagcactgtcattgctccacaaacacttatgacaccgatagccatagcaacggaacccagttcttgatttccatgagaaacctatgcaagtcaggtaaagtgaagaacattgatgaagctttggacttgttccaaggcatggctagcatgaagcctttgccttctgtgaaggactttactttgttgttgggtgttattgtgaggttgaagcactacaccactgccatatctttagttaagcacatcttttcttctctaggcatagaagctgataccattactcttaatattgtgatcaattgtctctgccgtttgaagttggttgcttttgggttctctgtgttggggactatgttcaaacttggtttggagcccactgtgatgactctcaccgctctcattaacgggctttgcgtgcagggcaatgtggctcaggcagtcgggctggttgatcatatggagaaaatgaggtatccattggatgtttacacgtacggggtgttgattaatgggttgtgtaagacgggagacactttggcggcggttgagtggctaagaaagatggaggaaaggaattggaaacctaatgtggtagtttacagcacaattatggatggtttgtgcaaggatggattggtatctgaagcgttgaatttgtgctcggaaatgagtggcaaaggtgttcgacctaatcttgtcacttacgcttgcttgattcaaggtctttgcaattttggaaggtggaaagagactggttctctgctggatgagatgataaaaatgggaatgaggctggatttgcagactctcaatattttagtggatgctttctgcaaagaaggaaaagtgatgcaggctaaaagtgtgattgggtttatgattctgacgggggaagggccggatgtcttcacctataattcgttgattcatatatattgtttgcaaaataaaatgaatgaggccatgagagtgtttcatttaatggttagcaggggctgtttaccggacattgtggtttttacttcacttatccacggatggtgtaaggacaaaaacattaataaggttatgcatctgttggaggaaatggctaagatgggatttgttcctgatgttgtcacttggaccactcttataggtgggttttgtcaagcaggtagaccattagctgcaaaagaactgtttctcaatatgcacaaatatggtcaagttcccaatctccagacttgtgctgttatattggatggcctatgtaaaggaaatcttctttctgaggcagtgtcgttggctgaggcaatggagaagagtaatttggatcttaatattgtaatttatagtattttgcttgacggaatgtgcagtgctggaaaactgaatgctgcatgggaactcttttctagtttgcctggtaaaggtttgcaaattaacgtttatacttataccattatgattaagggtctctgtaaacaaggctcattggataaagctgaagacttactgataaatatggaagagaatggctgcctgccagataactgcacttacaatgtctttgtccaaggcttgctaacaaaaaaggagattgcaagatcaataaaataccttacaataatgagagacaaagggttttcagtagatgctgctaccacagaaattactatcaactacttatctactaatgaaggagacaccagaattcgagaatttttttttccaaaaagatag

SEQ ID NO: 52008 - DNA, 241 bp, Glycine max
  Clone ID: PAT_MRT3847_17978C.1
acattatcaaccacccttacaaacactatatccttccactctaatatataaccactactcattcttatcattaacaccttctacttcaacacataaatttttcttacaacaccattaaccactccttatcatcttcaaacacaattccatcttaaaatcatacatataataacaatctctattctcaaccatatatcttcattcatattattccacacaatactaacaatacactaaccat

SEQ ID NO: 52009 - DNA, 236 bp, Glycine max
  Clone ID: PAT_MRT3847_17979C.1
tccccatccactttctcgattgatatgcaagaacaggacagactgctccattctggatgtttgccgaaaacatgaggcatcccaccacaccaggggcgtgtcacatttcaatcctagcgactagagttcccgcatccccatgttctagcatgtagccatgtccgcggcacatgtttcaatccgagcacccgtcacctacgaacacacctcggtcctcgacatatgccggagcccaa

SEQ ID NO: 52010 - DNA, 372 bp, Glycine max
  Clone ID: PAT_MRT3847_1797C.1
ctgaaaagagagatattattaaagagagagactttcttcttttctttctctcatttctcaacgaaaggggaggtgaaaatgaaatcaaacatcaaatgtcttgttctagctctgccttaagctctcagctttctctatcttcattcatttactccctgctacactcactcaaatgggtgtaccataatatcaatcctctgtcacaatcctctcttgcacacccctctttgagaaaccaatttcccccaccaatactccctcttattaaaaattatcgtgtcccttaaaacgttttgaatccctatataccgattcaaatccaccatgactttattcttcatcctttcccacaaacaaatagctttatttttt

SEQ ID NO: 52011 - DNA, 196 bp, Glycine max
  Clone ID: PAT_MRT3847_17980C.1
aggcaaaacccaacagaactgtgtcctaatgaggtgcgagaaacagtacaataagtcatctcctgtatgtctcgcggaaacgtacctttggctgaataaaaatttctttccctggtaacaataaagccatgggtgtgcatatgccgacagctttttttcttcacatgccatcctttggaaggccacatcatgtgat

SEQ ID NO: 52012 - DNA, 431 bp, Glycine max
  Clone ID: PAT_MRT3847_17981C.1
cccacaccttctaataataaaccttatcattcttattcttatcctcccaaaccataacccgataatcgtccaactctactttcctactaactccctacccttactcctctaacccttcaacctctatcttctctaaaatctatatctactactctcttctcactcatcccaactaactcattttcattttcacctttttctcaaaccaaccacttttacatcttttcactttcttttcctactcctttttttcttactacatcctttccccaacatcactctttttttaatatttttttcccctctttcttcattctcacttttctttatttattaatttttactttcaccttttaatatgtctctttttctcccatcattattattacttcccctttttttttaaccacttcttaattactacattatta

SEQ ID NO: 52013 - DNA, 204 bp, Glycine max
  Clone ID: PAT_MRT3847_17982C.1
cccacgcgttcgctaacggcttctgcaattgtctgcgtctatctctgaatatactctctcgaatggctgcccatactatcgcgcatgctacccttaaaggtccgaatgtcgttaatgagatcacacttggcataacacttggctcatctgctgatagtcagtccaagatgcaccactggaatgaccagacgaaaaccaggacct

SEQ ID NO: 52014 - DNA, 362 bp, Glycine max
  Clone ID: PAT_MRT3847_17983C.1
ctaggttctgtctacaacattggatgattggccagaggatgaaatagatgctatgatgagaagctgcgggcattgctccggttaattcaacctatgaagctaatactcgagaaagatagactaaacctgaaccgcatgctgggcatgagcatggtgcaaaacacatacgatcaagaaatgaagtacaagaatttcttagaccgagtttccgcatagagactggaaaaagcattctacaatcaagtgctgcatagaagagctttatggacagtgttaaacgtactggcagctcacacagaatggaaggtatggatgaatctattggactgttgtaggttaaagtaattagcggaactttttta

SEQ ID NO: 52015 - DNA, 481 bp, Glycine max
  Clone ID: PAT_MRT3847_17984C.1
cgtacgcgtgggctttgtcgttcaccttttcagtttcttttacttcaagtcattgcttcagttgacgaagcatatcaaactgcaaggataggaatattggatccgattctcttgataatttttgttgttataaattttatattagtattccattaagaggagaaatcgatttatatttatgcataacagcagttagtattaggtagttgttctaggttcttgattttagaactggttttctgttttgaatctatcattaagtcaattttgtaccaacttacgtttattcctcttgattctagattatgtgaaaatgggtatgtatgttcagtgcatatacaaatttcaggagagatgtttattttaaaagtttgcgttttctataacctgtgaatcaatctatgctttggcgtgtacacaagaacctgaagaacaaactcaacaaagccacgcctcatattaacacaataaactctatttt

SEQ ID NO: 52016 - DNA, 430 bp, Glycine max
  Clone ID: PAT_MRT3847_17985C.1
cagggctaaaatcactaataatgggttaaatactcattaatcagccacacaaatatagatcagcacccattgacataaaatccggggacacaacctcaaaaaaatggattcatagtatttagggaaatttgtcaaattacagatattcaaatctattatgggggacatgttatcatattctgcgcatattttcagcagcttgtttaaaagggctaatataagcccaaaaaaactgggctacttccatcttcccgttgagctatcaggcatttgtccccttttgcctaagctcttttgcgcttaaggggttggatatgttccataatataatggataacttttttcaatgaagccttcctattatcctgtgaagttccatagctccacaacagtatacccaccgctggcattgaattcattaatttcttta

SEQ ID NO: 52017 - DNA, 329 bp, Glycine max
  Clone ID: PAT_MRT3847_17986C.1
gggacaataaatcatttcatatttaacacattcataacaaacgtaggggggattttagagtcctttttttaaggggccccatttgagttcaacacaacccgacctttttttcaggggacttttttacagccccattaaacatcaaagttcttcaaatgtttggggaacccatccaactttacccaacgggcttaaacccccccacggaaacggaggacaaggggaagggttgatcccttcgggatgttgaagccagggagggcccttccatcctcgagctgtttgccagaaaaaatcaccctttgctggcccggggggatgccttcctt

SEQ ID NO: 52018 - DNA, 496 bp, Glycine max
  Clone ID: PAT_MRT3847_17987C.1
aactaacacatgcgcaacaagaggtgtggtggcgcttcatgcttcttccaaatggcaacatggtacacttcttgatgcacatagcaggaccggtaggcagaggcttgatcagcccacagatacccttttggccggttaatatcttagatcaaaaaggccatccaaattggttaggaggctctgacagaaggaaaatgtggatgggccttataggaaggtcttggcgcctaaacggttagccgtgccctacaataacatgaattcttctaagccaattttgtagagggattattatgaatggttcaccattcaacgacggtcccaggaaaatgtcaccttcacatctgcttcatacacttttgaacttatatttgattacaatgtggacaattcttcatctggtggccatataatgctggagctgcctgtgaacaatcgcaccataacaatatctctgctcggaattgatggccacatcatgcactacacttactcc

SEQ ID NO: 52019 - DNA, 431 bp, Glycine max
  Clone ID: PAT_MRT3847_17988C.1
agggagtatttgatttgcacaatcaaataacattagtcctataacttcttcttcactaattaattaattctttttttttgagaaagtaggataattacaaatcaatttgagcacaaatagaatgtaaaatacatctggatccatggaggacaatgtatatattggaagtgcactagctctctttgatttgtactgtacttaggatttgtagaagccatgaagtgctgtaaggtgactagtgaatttgatttgaatggcaggtacagtgaattatccactattaaccgacgccattaatcaggccaacaagagatctttatgcacgtacactccacatctggatttaatcaatttctgctttgtaacttctatgttctacacttgacacgaaattttccttttggttcccttctaaatgtgtttttgattct

SEQ ID NO: 52020 - DNA, 1109 bp, Glycine max
  unsure (1)..(1109): unsure at all n locations
  Clone ID: PAT_MRT3847_17989C.1
cacaataatagctctctctgattaagttgtcactcacgcacagaaacacagaaaaaagatgatggcgaacaaattgcaaggggcaattgttagctgccattccagaacaaggcagttgtcgatagatgagaaagggcgcgccatctccgctgtgctcactactcatcaggaaccctttaagactaaggttcctgagttgacaattagccatgtgcccccacctacaccctccatcaagaacaaagacttcatcatcccctccaccactagtggaaagtttggtaggtttggtggcaagtttgtacctgagacacttgtagcttctttgacccagctcgaagcagagttcaaaaacgccctccgtgatcatgcttttcaggcagagctagcggaggcattaagagactatgcggggagagagacacctctgtatcatgcaaagcgattgtcggagtattacaagagcgtgaataatgggaaggggcctgacatatacttaaagagagaggatctcaaccacagtggctctcacaagatgaacaacgctcttgctcaagccatgattgctaagcgcatgggctgcaaaagcgtcgtcaccgccactggctctggacaacatggccttgcaacagctgcagcttgcgcaaaacttgctttggactgcaccgtcttcatggccgacaaagacatccacagacaatattcaaatgtgaggttgatcaagttgttgggagctcaggttgaagcagtagatggagggttcacagatgcagcatcagaggcgtttcggtattgggtaggggatttggaaaacaggtaccacttgagtggctcagcggtgggaccacacccgtgtccaaccatggttcgggagtttcagtcagtgatagggaaagaaacgaggatgcaagcattggaaaaatggggtgggaagccagatgttcttgttgccagcgtagggactgggtcaaacgctttgggtctgtttcatgagtttatagcagacaaagatgtgaggttcgttggagttgaggctgggggtttgggcttggagagtggaaagcatncttcaacgttgaccacaggagaagtgggtgcgtaccatggag

SEQ ID NO: 52021 - DNA, 309 bp, Glycine max
  Clone ID: PAT_MRT3847_1798C.1
ccaacctggtagtgaaacagataaaaaaaagaaaggggcggcttaacagaaaatcgggggaaaatcgaaaacagcactcaactgacaaacaagacctaggatgcaggcccataacatggaaacaacaaaaaaactgaccccacccaacggtaaaaccaagactcttaccaaacgcacgaacttaaaggggaggaaatctgacacccgacactaacatacctggaccaaaataaaaatcaagtggataagaactacccgacctattatcagaaccaccaacacctatatcctgcactaacggtgatgaaa

SEQ ID NO: 52022 - DNA, 471 bp, Glycine max
  unsure (1)..(471): unsure at all n locations
  Clone ID: PAT_MRT3847_17990C.1
gctagattcagccacagttggaaaaaaaaaaaaagttgttcgagatggcacgtacgaagcaaactgctcgtaagtccacaggaggaaaggcacctaggaagcagcttcgcaaccaaggctgcacgtaagtctgcaccaactactggtnggtgtgaagaagccacantcgttattcgtccctgggtacccgggttgctttttttggggggggatttggaaatccccccaaaagatcccccgcctttttgaaccggaaaatccccctctcaaaaggggctgtttccgaaaatattccaaagtctttaaaggttgtttgcggggttnttataaaagccaccctacannntttttctttttttttaaggaaggcttggggaaaacccccttggggcccctttgggaaaaaactttagggggccccccacccccggggggggttttttttttttcccccaaaaaatatttgcgcgg

SEQ ID NO: 52023 - DNA, 408 bp, Glycine max
  Clone ID: PAT_MRT3847_17991C.1
gagcaaacatatcgaccccttctttgagtatctgagtgccatgtcgtgtcgtagaggaatctcaatttgtctgtgacggtatcgaagatgagaatcccagctctgatgccagactgggttactatgaaatgttgatgtgcgttcatagatactaacgaagaaaagagccaaggcttttgtgacaatattgcaaacaatactggagaagattcatctgatcttcactataattattattagctctttgagacagtaaacagatggactaaattgtgcagctacctggaaatcatcaacataagaggcctttcatgtgctgaatcttgctcaagcgtattacgcgcatttggaagattactattggaacctgtaacggacaaggccttttagactcataacaagggatca

SEQ ID NO: 52024 - DNA, 788 bp, Glycine max
  unsure (1)..(788): unsure at all n locations
  Clone ID: PAT_MRT3847_17992C.1
atttcagatcccatcttcaacctatgggcatctgttacaggctctatcatttcctcacaaaagctctggctttgcaaatgtcaaagactgtgactttagggcgttcaagacgtgatagttcaagctcaactgctgtaagaagttctgattctaaagctaaaagggaggtacagtcagagacaccatgcgaagttgatgatggcaagaagcttccaccaactgaaggtgtcgttggtgactctatttcttctcctgtacagcaagctgaagagaagaataagccatgcatgaatgttgataagatggaaggagagaatgctgcattaacattgccaatgccaagtttagcaccaacgcggtctataaagaaaactgtaagcataagtgagaacgtggaagagattcccccacctaagaagttgaagaggaagtggagcaggtccttccaaaaatcattttctctggatcaagaggaagaaccaatacctcccccgcgatcaattctgaaagtgggttctgatcttgatgacaagtccaattccttttcttaatttcatgtttcgggtgtaataatgttagtgtcaataatttatgttacgaaacagcatacagaagccccgtgttaatgttgtggctagccttaacaatctctttgatcattgataattccacaattagctttcttttattttgtacatttaaatatttctttggcttcttttgctttggagaacttgatcgaaagaaacttatgttctaaagtaatcaaacatccatcttattanatg

SEQ ID NO: 52025 - DNA, 175 bp, Glycine max
  Clone ID: PAT_MRT3847_17993C.1
gccacacctgcgccactaccacttgaccttgagacatatcgtgcagactaaggatagagggtactggcgctttgtatcatatacattaattgctacagcaaacgagattatgaagtactagctactttcagagacatagagaatcactgcgtgcaacctgacgatatccaacaca

SEQ ID NO: 52026 - DNA, 176 bp, Glycine max
  Clone ID: PAT_MRT3847_17994C.1
gacgtcacgatgtgcatgtcagagtgtgtattagagtacaagccgcatttgatcgcagtgtgttaggatgagtaacaccatcagggactctagctgaagtgggagacgtgattccagaccgcactgtcgccaacctggctcacgccaacagcacccaagtcgtcaccattcaggct

SEQ ID NO: 52027 - DNA, 304 bp, Glycine max
  Clone ID: PAT_MRT3847_17995C.1
ggctagggtgatgcctcatattctttattctcctttgactattcctgaatatccttggactgatttacctatggattttgttttaggtttgcctcaaacaatgaatggtaaggactcaatttttgttgtggttgacgggctctaaaaaatgacacatttcataccatgtaagaaaaatgatgatgcttgtcacgttgctgatttatttttcaaggaagtggtgtgtctccaccgactatcaggaagcattgtatcaaactgagacaccaagatccttagtcactattggagaacattgtggggg

SEQ ID NO: 52028 - DNA, 447 bp, Glycine max
  Clone ID: PAT_MRT3847_17996C.1
gctgcaaaatttaatgcccagtcgtttataatttggctcgggcatactataattaacggttcataattcttctgaacagtcaccaactggtgaagattttcaaccccaccataggtccaataatctatatatagtttactgcggtccaaaaaggaaaaagagacatgctactgttaactagtcgaacgagttttttggactactgcatctgtcgcactgcgagttcttgtcagcaatggaccatagacgccagatatcaacccaaacaagccagaactagatccattgcttttgtctactttagggtcccttgatgatggcgtaactgatgggggctcaagagatagcctagcggaacctgactgtgaacccctggaagagggggaaactggtggaagctcaagggctggcctggaagaactggaaaaaaatgcctgaatatactct

SEQ ID NO: 52029 - DNA, 201 bp, Glycine max
  Clone ID: PAT_MRT3847_17997C.1
cacctctttgcaagccctatacatctaaccctaaccacacccattgatgagttcatggctgcctaggtgcattttggctgaggttgatggttgtggggtgccccatgccatgcagcttactgcggcgggcgtgtgctgcattgattttccttagttggtgtcctcttttttcttacttattttgcctttttcttttttttt

SEQ ID NO: 52030 - DNA, 556 bp, Glycine max
  Clone ID: PAT_MRT3847_17998C.1
gcagatccacagagtacaaggaagtgcgatcatcagggtgtcacagagcagcccttgagcaagaatcagaaaatcatatatccaggtccaggactgcatccttgccaccgacattgccaactgatccaccatctccatcgaattctggtggatctttccaggggccaaaagtagacaaaagcaatggatctagttctggcttgtttgggttgatatctggtgtctatggtccattgctgacaagaactcgcagtgcgacagatgcagtagtccaaaaaactcgttcggctagttaatagtagcagcatgtctctttttcctttttggtccgcagtaaactatgtagattcagaagaattatgcaccgtcaattatagtatgcccaagccaaattataaacgactgggcattaaattttgcagagaggctgtttctctcgagtttcattaggattcaaattaaaataagaatttgtccagtattcaactgggaaagagtggctattgaattgttgtgaacccttttgttcaccgtataattttgagaattagatgcc

SEQ ID NO: 52031 - DNA, 1666 bp, Glycine max
  Clone ID: PAT_MRT3847_17999C.1
ttcaaaactagggtccactgaggaaaaaaaaggagcagggagcatccgcaagggtttgttcgatttcattgtcttgtttgtgtcgctgaggggagaaacataaacaataaacaatcctaaacgcacagcacaatcgcaattcgccgaatcctaaacgcagcgtttcgcgctaaatgcttctcaacagtgtgcgctagctagtttgctaagactcactggcgccatggctctttcactcggcaagctcgtcattctcgtcagcgcaggaattgctggttcagtaattgcaaaagaagggcgtctgccagatgtctctggtctcgcctctggtgcttttaaggttgttttgaggcaacttaaaagcgatgatcctgctccaactgttaaaaagcagccgcataatgatgctttgttggctcaggtaaacagtcttcggcaggaactgcaacttcttgctagagatagatcgatcactattgtaaatgcaagtggaacaggtggaagaaaatatataacagtgattgttattgttgtggtaggatatggatacgtttggtggaagggatggaagcttcctgatctgatgtttgcaacaagggcgtggtttggcctgatgcttgcacatcaattggtaatcagatgggaaagctttatgaatcaattggggataccaaaaagaaattatctgcaagaatcaacggtcttgataaaaattttagagaattgtctggcattactgaaaggtaccaggaaggatatatatgtaattcaacggaaagcagatacaataagtgaagattcgaagtcttttcatgttgcagtccatgttctggaatctaaaattaaagaaatagaagagaagcaggtggccacaattgaaggagtgaacatgttgtgtcaatttaccaagactttggagaatagcagatccacagagtatattcaggcatcttcttccagttcttccaggccagcccttgagcttccaccagtttcaccctcttccaggggttcacagtcaggttccgctaggctatctcttgagccaccatcagttacgccatcatcaaggactgcatccttgccaccgacattgtctacggatccaccatctccatcaatttctggtggatctttccaggaacctaaagtagacaaaagcaatggatctagttctggcttgtttgggttgatatctggcgtctatggtccattgctgacaagaactcgcagtgcgacagatgcagtagtccaaaaaactcgttcgactagttaacagtagcatgtctctttttccttttttggaccgcagtaaactatatatagattattggacctatggtggggttgaaaatcttcaccagttggtgactgttcagaagaattatgaaccgttaattatagtatgcccgagccaaattataaacgactgggcattaaattttgcagcagagaggctgtttctctcgagtttcattaggattaaaattaaaataagaatttgtccgatattcaactgggaaagctggtaaaggaaagagtcactattgaattgttctaaacccttttgttcaccgtattatttttgaattttgagaattagatgtaaaatcttgttaagcataaaaaaaaaaaaaaagaactcgagactagttcaactcgtgcc

SEQ ID NO: 52032 - DNA, 470 bp, Glycine max
  Clone ID: PAT_MRT3847_1799C.1
ggctcgagcacggggtgtgttcttcattctggattaaagccacaaacataacacattccggtttgactttggaggctaagggcctaaggcaggttcccaatcactgggatatcatggaatccccacaatccgctgggtcaccattcaagagctctgtcttgggtgaagctgagaagtatacgactgatgttatgacacaaagctcggggcctctgtctaaggacattgaagtcaatggaaaggacgctgccacgattaatccataggaactcatacgtgctgtagctgtttacattcatcaggctagggacattcatcacatctgcatataccacaggctagatggtcatgcttagatttgcttgactagctagcctgagaatactgtctctaccaacactatcaatggaggaggacggaaccccgccattaatgagaatcttggaataagggctatgactgttgattct

SEQ ID NO: 52033 - DNA, 806 bp, Glycine max
  Clone ID: PAT_MRT3847_179C.1
cgacgagcgcgtccgcagctgccagcttgtcatctaaaattttaattatcatcgcctgaaacacaaaccaatctacatggaagcttattattccggttcttaccctgcgtcgaccaagcctatttctctgcttcacaccgtgcggaaggtacaagcaaaaccgtggaagaaggcggcagtggcgccaccggcaccgacaccgatcagagtgtacaaggtggacgctatcaacttccgtgaccttgttcagcagcttaccggtgcacccgagttcaagccagctgatcaggaacaacatcaacttttcccaagtgtcgcacctattgctgccacctttgtagatacgccccaaaagccaatgttgtcgagcaaagacaatattgcagcatcatcgacagtgtcctcggccactaattggtaccagggggcaaaatctgaaccattggaaatgaatttatcatcaccctcttcttataactggttttttgtccctcctatcagccaaggaaacatgaccagcttggaaccggggagggttctctagttattttttatttatttatttatttttatctcccttagttatatatgcttaattatttcgtccggtggatatagcttttgtccacagtttgtttcatttggacttcggagcgtacaccagctatctagatctgagctccggcagctgctagttacaccgttttttgattatgtatttcttaaactcttgaggtatagatgaaaaacattgaagtgtaactttttaatattgaataaaagtagaaatgtttgattcccaccac

SEQ ID NO: 52034 - DNA, 239 bp, Glycine max
  Clone ID: PAT_MRT3847_17C.1
ctctttctctctatgaccaatcccaaacccataacacaatttaaaaatgggaggggatctggggccaaagctgatgggaaaaaggaatgaagaggaagaagaacaagaagaagagtttttattgggccaaaaggtttggaatgagaaccatggtatttggatagtggcggtaccagccatatttacaaagggtttcaccttttgaatcaatgttataatcccaactttttttggccata

SEQ ID NO: 52035 - DNA, 578 bp, Glycine max
  Clone ID: PAT_MRT3847_18000C.1
gggccccgggcaaaaaatccaaaaaaaaggaaccgaaaacccccaaaaaagcaaaccccagtaaaaaaagttttaaaaaaaaaagaagaacaaaattagttttgggaaacgggaaaaaaaaaaaaaaaaaccccaaaaaggggtccacctttaaaaaaaggggaaaaaattaaggggaaataaaaaacctaacaaattttcaactttacaaaaaaaaaaggggggggaaaaaaaaatttcaaaggggaaaggattggctaatgggaaaaattggcccgggccaaaacctggggtttaaaaggaggggcccaaggggccggtttttttttgaccccccccactaaataaaaaaccccaaaaagcaggcaagcggtttaaaggggagtttaaaaggggggggcccccaaatggggggcaccccaaatttggccctttttaaggggagggaaacaaccaggttttccatttaaaccaacccacgcatttttcccattggaagggttccctgggaaaggagttaaagccgggataaaattaaccccaaaattttgggccaaagtgggggggaggggttaaaa

SEQ ID NO: 52036 - DNA, 446 bp, Glycine max
  unsure (1)..(446): unsure at all n locations
  Clone ID: PAT_MRT3847_18001C.1
cgcgtccgcccaggcgtncgtacacctccgaaaggacctcagattggggcccttcattgaattcatggtattaggggctagcgtaatggagctgagaataaattttgcaatcactgccacgggacataaaagaatcgcccaaaaacgcctacatctacacatgagcattacgcccttatctttcttagagagagctgcttctggccaccccaccataaactccctaattcacggatcttcgtcttacacgtggcaacatacttaccaccgttgtcgtcgattcacctccgctctttctaataattccattggtcttggaaaacactgtagcatttattgtacccaacattacagctacttatgaagcttacttttggataccaattgtaggggctgtgttaaacccttgttattttaaggttaattgcattcacggttgctttttt

SEQ ID NO: 52037 - DNA, 922 bp, Glycine max
  Clone ID: PAT_MRT3847_18002C.1
acccactaatgggtggaaggcttactatgctgcaacaagagcaattgtgaatattaatacagaattcttcaacattgttagagataagtctcttcaagcaatgagtcatttttggctgaatgcagattatgtcaagtgcattcatgcctcaggtttcttttccgggtatgattttttgttacttgagtaagttggtctgcttttttgttataaacttgtctattttacaagaatatctttgtatttttggacttgctgttcatgttgattttttgccgtgacatgtatgatatatgctgtgtgatacttgaagagattgtttatcaggtctgacatatatcaaatttacaaaagttcttggatgcattttatttgacttgggtcattgaatttcatttttgttgataatttaaatctgggccagtggtctcatatttagaacagaaatgagaggatttattatgttgttatacctatgcaaagtcttactccttagcactgatatttctggggataagaaaggtcttttcatttggttccctgtaggaaccacctgccttgccgttctgcgttcctccttttctgttctgttaaggtggggcgtgttccttgtgctggagagatctcatctagcttgtgagcaatatggtacaatgcagttatgcagggttggcaacttgtattcaactgggagcaaggattgaactttcaggttcgagatgtatgtgctcgcgtcttgacagacatggcttgggttaccatgaaaacatatgttgacatggatacagggccattcaatgtgaccaatatttatgagttccataatggacggtggtatatggttcatcatcacagttctgtggatggggatgtggaccatcagattgtgcatggataatagtgagagatgatgatacattgt

SEQ ID NO: 52038 - DNA, 391 bp, Glycine max
  Clone ID: PAT_MRT3847_18003C.1
ctacaaagtatcaaggatacttaacggctcgacattagctctttgttacataggcgaatggtccataaaaacatagatacatagcttaacgcgcgaaaggtatttgtattgcattatcgacataaataagctgaggatctcagctgaagtacaagacacaccatctaagactgcgcgcattttgggaactcctgccatcatatatcgccctcaagaggttgggcaaacctcacgattgtgtggagacagaatttctggcttcaatggcatcaaaatggcatccattgaacacgctctttgtgccgtccccaccaacaacccttgtaattggggacgaagactagcaggcggaccggctttttctatagagagttgaacaacagcatcacgt

SEQ ID NO: 52039 - DNA, 1071 bp, Glycine max
  Clone ID: PAT_MRT3847_18004C.1
ttgctactgaggggccacaggaacagaaattgaatggaataccattattgcatggtccagaaacagagcgaaaaggctcacggagtatggttgaaggaatgaactttttccggagagtcaatagaacatcttgcatctcaactgaagctaaaaaagtttctagtcagagcatggacagcaatggggaatgtgatttcatttctgattctgattctggatctgctttacttctccttgggactgttcaaactgctgaattgtcagaacacgataatcctagaaatccctttaaaagctcaaaaagacataaaaataagtttactgagcatttgggtgcccagtgggatgtctttcgcagacaagatgttccaaagctcatcgaataccttgaaagacactatgatgaattttcttatacccatgactatcacaagaagatggttcatccaattctagatcagagcatttttctagacagtactcacaaaatgagactaaaggaggaatttaagattgaaccatggacttttcagcaacatgttggacaagctgtcgtcattcctgctggatgtccataccagatcaggaattctaagtctagtgttcatgcggtattggaatttgtgtcccctgaaaatgttaccgagggtatccagttgttcgatgaggtccgactattgcctgaagaccataaagcaaaagcagacatgctggaggttaagaaaatggcgcttcatagcatgaatacagcaattaaagaagtacgtcaacttacaagcaaaacatgattgcaccagctaaaatatacttacatgcctctgagcctctagagatctcatgtctcaacctgacttccatatcttcattcttgtatatagattaatgctcggacaaatttatatctagtaaggtacttattaaattgattaattttcgcctctattttcttttcttctgtgaagtttatgccctaccggaatttgaaataaatcttatggtctgtatatatatttctttagtttatttgaagtaaaatttgatatgaacttttgctagttttaaatgctatca

SEQ ID NO: 52040 - DNA, 587 bp, Glycine max
  Clone ID: PAT_MRT3847_18005C.1
aggcccgcaagtaccgggccgacccacgcggtgcggacccagacttgctaactaacttcctttggttacgaacacctaagagaaagagcatgtataaaaatttctatggacttaggacttcaaaaaaaaaaaaaaaaaacagaaaaaaaaaaaacaaaaagcaaaaagaaaaaaaaacaaaaaaaaacaaaaaatacaaaataaatccagggcccctgacttggtactgactctgtacagagagcaggatccaaccattttaatgatagaaattttggcgtatcatatacaaattctagggacaaaacggattgaaaaccctaccgaataccataccaaagtttggtggccacacaaaaaaaaattccaaaaaaaaggggagggaaaaaaaaaaaaaaacaaccgaataaaaaaacacaaaaaccaggggcgggccatctaaaaaaaccaagctcccctccccggtgcctgcaaaataataactcttttaaaggggaaactcaaaaaaaaattacgtagcccgtttttctacaaactagagaaccgggaaaaacccctggcataaaccccaaattaaattgcccttt

SEQ ID NO: 52041 - DNA, 196 bp, Glycine max
  Clone ID: PAT_MRT3847_18006C.1
aaagaaggagatatttaatatatttaaaagtaaatccacgtatatatcatcactacacaaaggactcttaaccaaaaatttaaattatcatatcttctcatctcactccttagaactagttgacaggataaaaaaaatatggataacatgggtaactgggaaagtgaagtttgaatttacagcttagcaaccataa

SEQ ID NO: 52042 - DNA, 552 bp, Glycine max
  Clone ID: PAT_MRT3847_18007C.1
tcctctagagcggccgcttttttttttttttttttttttttttttttctcaatcattttaagtaaaaatttattcattaagtcatattgggacaaaaagtttaaattaaattgaattttatagaaataaacattttcatctcacaaaattttgttaatttttaaattttagaggtaaatatttacattatattattaatatctaaattatgattgaatacataccccacaaggactttacatgaaaatatattaattttgaaaactaggaatctatctaaacatattacattatgaaatataaataccttcaaaagaaattgacctaaaaaaacacatttgctttagtgatggaacagggcaattggcaacctctaaaggatcattggttcaaatagtaggtgcttccattttttaaattcgtgaaccaatttatgaggtttggccagtttctgactggttcatgacaatccagttgcataagccaggtcagatcagctggagaaccggttcaaggttaacccacttaaaccatccggtccagttttcaaaa

SEQ ID NO: 52043 - DNA, 434 bp, Glycine max
  Clone ID: PAT_MRT3847_18008C.1
tttttaaaaaaaacactaaattacataaacaaaagaggtgtgtaagccttaattatcaaaatagttttatcctcctctcaagccacatattcaatacacatacagattttgtggcaaactttaagaagccaatgaaagaaacaagtaaaggcacttgcagcctactaaaatgtacacactcttcacgtaatgttatgaataaaaaattggtaagcaataaatgtccagcaacaagtaaatgagaaggcaaagagaaatagtcacaaaaattacaaacaccatacgaaacaaacaaaataatccagaggaagatttttttgctgctgttaaaagaatttgttatactggccagtgagagagtcccttagatttgagtacaagccatagagagagtactgccgcaggttttccacttcaaaccatgaattaagcac

SEQ ID NO: 52044 - DNA, 398 bp, Glycine max
  unsure (1)..(398): unsure at all n locations
  Clone ID: PAT_MRT3847_18009C.1
gggttaatccctttttttttttttttccttttctatcatgtatttttttttattatcatttataattgttgtcttgacccaaccaaacaaggatttgttttttataaaaaaaaaaaagggggcaggaaacattggaattaagagagaatttttttggggggggcgaccaggtaccttggacccaaagacaaaaaattaaaaccccaaaggggcttcacagagggcccttttttgggcgcaagcaaaaccaaatggaattttggaaaccaagctatccccactttaaacccaacgaaagcccgggggaaagcgaaaaaaaaaataatnttcctcggaaagggagacaagggaccctccaagggcggccccataaaaaaaactgggaaaaagggggggaa

SEQ ID NO: 52045 - DNA, 127 bp, Glycine max
  Clone ID: PAT_MRT3847_1800C.1
gagctgaagatagagcaacgatgctactggggaacaccagtgggaagcgagtaaaaagaccaagtgagacgaattgtgggatggagacactgttcatcgcctgaagacttccagcagagagcaaaac

SEQ ID NO: 52046 - DNA, 470 bp, Glycine max
  Clone ID: PAT_MRT3847_18010C.1
ttggattcttttaaacgggcggttcgttttttttttttttttttttttttttcccccaccaaaattaattttattttaatttataggcattaaacaaggggcttggcatgattttttaattggtaaaacttaaaggttacaaattatgcccttctggtttacaaacccagcctaccccacaaaaaaaagaaaattaatggccaaaaaaaaatttcgggctgggaaaacccccttttgtgtaagaaaaattcaaattgggaccggcattggaacttggttctaaaaaccttggggtttgtttttaaaaacccggggaaggaacaaccaaacccccccccaaacttaaccttaatggtcgacaattctttaacccaaagttgctcctccccaaaccccttaattggggtccttactaaaaaaatcttttgggggcttatttaaaacctcccggacgcggggttaaaccggga

SEQ ID NO: 52047 - DNA, 583 bp, Glycine max
  Clone ID: PAT_MRT3847_18011C.1
atcctctagagcggccgcttttttttttttttttttttttttttttttggggtaaaagcaaatttgctgaacaagaattacaaatggaaaagaggtgaaaagaaccatgctcttgttcagaatttggaacaaaacattttcagatacactcaaatcaaacaaaggggcagcaagcagctctctttttgtgaaggggtagaaattaagggagtgagttgtcaatatcagtatcacactgaggggattcatcattgatcattcatgttaagtggttaaaggggtctgtgttgaactttccacttggttctcagatgatattgatggctgattcactactatctcaatctgcctgacattttctatcatctttactagttctaacatcttaggcctctgatcaggaaccctcaccacacatgacatggctatctgcaacatttccaccatctcttcctctatattgggatatcttatcagctctaagtcaaacacttcagctgtccactcctctctcacaaccgaatgaaccccttctgtcaagtgcacgcagccgtacggacgcgtgggtcgacccggggatttc

SEQ ID NO: 52048 - DNA, 325 bp, Glycine max
  Clone ID: PAT_MRT3847_18012C.1
cccatataacattgattgaaaagatcataagcactcagtacaccacttgtagtgaatgacgacagagtggaagtgatcacacttgactcttaacatgtacgagaagcttttatgacgtgtatgggtgacactctcgacattaagcctaagcaactatattgttggttctagccttctttttatccttagatcatattgatgtcaaaagcattaatataagaaagagccttcatatgaaattactaactgacttactctctctattaaagcctacacttaggcaacatagtgcttgcttatggatagatttgtgccatgccggtca

SEQ ID NO: 52049 - DNA, 417 bp, Glycine max
  Clone ID: PAT_MRT3847_18013C.1
ggttaggatatcttctgatccacagactgtggctgccaggcaaagaagggagagaataagtgagaggattagggttttgcagaagattgtgcctggaggaagcaagatggacactgcatcaatgcttgatgaagctgcaaactacctcaagtttctcagatcacaagtcaaagcactagaaaatcttggtaacaagcttgacacaatgaattgtcctcctactaacatagccttctctttcaacccttcttttcccatacaaacacatttccccatgcaaaaccctagcagccacatccaatactccaagggttgaaaacttgacatgaatattatcatggaagataagatgtaaaaaggggtctgagaacccataacctctaattttattccatccagtgagtatgattaacgtat

SEQ ID NO: 52050 - DNA, 273 bp, Glycine max
  Clone ID: PAT_MRT3847_18014C.1
gcaactttccacttcatccaacacatctcataagatagtgaatatttctgttaatgtaaatgcatggaagccaccacaacatcaggaaccacgagaggttacagaattagatggtaatagaactttttacaatgaaagagctcccagatctagtacacggccagtgaaggagaatgccaacactctaaaagttagtaatgggaatgcaaacctgctcttgatgttcagaagagtttagcaaggctcacttaaccgcttctggttctaatgctg

SEQ ID NO: 52051 - DNA, 130 bp, Glycine max
  Clone ID: PAT_MRT3847_18015C.1
caacggggcgttttttaaccttttcaaaaacatccaaatgccaaagggccccaaagaattacgagcctcctccatacatggaataacacatttcgttcagttaattttaaggctgggaccacaaggtgag

SEQ ID NO: 52052 - DNA, 688 bp, Glycine max
  unsure (1)..(688): unsure at all n locations
  Clone ID: PAT_MRT3847_18016C.1
ggtcaatacaaaccttaatttctaatcttcatttctatgagattttgaattttccaatgctttttcaatcatttcaggtgcaagaccaaaaataacttggagtattttaattttgaattttccgaaatttctttagcagtcaagtattttaattttgaagtgaaacttttctcttctttaaatgaccaaaaataacttgtggagagggttagatatgactgaaacagtcagtgaggactgagttcttgtttcctctgttattatcaatgggcgttatttttcaatggggaggaaaactgatggggtttggttgtgaaggaaggactttctgttctagatgtagttcaatatagttgcttttttggaaaaatggttttacacgtgaatgaaactcattcagttttgcaataatgtttttctattttggaccttagtattgttcaccaattaagctcaaaggcaatccttgcttttatttttcaatatatgttttgtgtctacttcagtatatttcgtggagcatttttacatccgaatatagtctcgatttatgattttatctttctttgggatgaggatncttagggtgggagcattttcaccattcaggtatgaagggatgcttctttgcttttctggtattcttggtattttgatatggatgtgcaatctaccttggatgtgaatg

SEQ ID NO: 52053 - DNA, 493 bp, Glycine max
  Clone ID: PAT_MRT3847_18017C.1
taccacgcgtccgcccacgcgtccgcttaggcgcgagcaagattttccttggttctcttctctcgatcgggtgtgtacgtaattaacataacatgtttcgataaccacacaccccttgtgtcatggcatgatgatgatgatgatgagaccagtaacgtggccctgataaagttttcaaagtctaagcatcttcttccttgttgtcatgcatgcctgatggaatcgacgacgcaaaagaacaaaagcaaaaagtcatcgctgttgatgcgtctcaaacccgttatgggcttcgacgactctattatgcccaatcgcaatggggatgacccagttttgtcgtatctcgcgatcgctaacaagaacggcgctgttttgccggccatgttgtcgtcgatgttcggaggggcggaggacctgggagaaaaatgcggatgtcgccggagaaagtggcaggccctcaaggcggttttcagtggaaccactttgatgagga

SEQ ID NO: 52054 - DNA, 199 bp, Glycine max
  Clone ID: PAT_MRT3847_18018C.1
agaatttgacattttatctttcgcatgggttacctagtttagtcgggcaatgactgagacatttgtcaccacatgaagcatctcgttgggatgggagttgttatcttactgttcaggatgcagggtgttccgttctgagacccacagaatctcagagcgaatctccttttagtttttcacttttcatgtcactatcaga

SEQ ID NO: 52055 - DNA, 759 bp, Glycine max
  Clone ID: PAT_MRT3847_18019C.1
cctttgtgctcttcaggttcttcttttttattctttcttttgaggagaggaaggctaatttgttttcacgcgtggcagctctcaactctgctgctgataatgatgaaaatgatgagcgaaagttcattgcggatgcctttttttggctacactagtagaatctttgttgatccggtgtctacagaatctttttcttgaaactttattagcctgcctgtgtatttctccgcccaaaatttggattctttttttggagttgggtgagccttagctctgggcgaaagaaataaccccccctttcctttttttcgaccttttttaaatccacccttttaaaaaaacataggggcggcccccttttgggggcttccccccccgggatttaattccggcccggttctttggggggcccccattttcctttttggggggtctttttaaaaacctggggggaggaggaaaaccggggggtcccccgcattaattggttttgggcaccttccccccttcccattggggttgtagcgaaaagggccgggccggggcgccctagcgagcgggcccccccccttttgtgggggggggcccccccccccttttcccgctagagaacccggggggggcgggtggttctcgggagcggcccccccccctgggaaggcccctaccccccgcccccccaggttttttttttttttccccccgaaagcggcgaatttttccccccccttcccacctggccctttttttttgcgtccc

SEQ ID NO: 52056 - DNA, 512 bp, Glycine max
  Clone ID: PAT_MRT3847_1801C.1
tcagagccgaagccgacggagccgatcagaggaccaaacagcgcctcctccaggctgccattgcttccctcaaaaccaacaactgcaccctcgccaagcggcagctccagaagattcaccgcctttatagcatgtggaaacggaacatgcaccgcctcgacgccaccgaggttttcctcaagaccactcgccatgaggcagaggaggcctgggaggatcacgtcttgtccaagaccagaaggattctccataagttcctgtatgaggacacgcatgttgttcccgcaggtattgcgtctgttgttattgcttcttcgccgccgcccatgcctgccaccgccgccgccgcaactcactagagataatatatatatagggccagagaatctaatatagagaaacgtttcccgctgacatgcctccgatgacactactacatgccatttaattaacatcttttttaacaaaaaaaaaacaaccctcggaaccggcagactgacaacaaaaactcc

SEQ ID NO: 52057 - DNA, 194 bp, Glycine max
  Clone ID: PAT_MRT3847_18020C.1
cttaattgcatgaaaaatacgagcataagggcaacctagtgtacattatcaggactagttattatcatatacaatattaatccatgacaagtagactgcccatcataatcggtttatacattagaactctgacaaaaagatctttgattagcaccactttcaactcgtaccaactattcagattctacacctga

SEQ ID NO: 52058 - DNA, 255 bp, Glycine max
  Clone ID: PAT_MRT3847_18021C.1
gtccatcctaaacgttttattggaggttgggatgacaccatcatggcgcgaagatatttcttcctgggccacctgaatctcttactgttctattagatgggcgtgcagtgggtagtatagcttccatggaagtgaaaaaagttgatgctcaccatacacaattaaaagtgatatctgtcgaaatgatttctgatgatatgaaagtaagatctgtttgttccagcatgggtggagcctattctgagatctatctgt

SEQ ID NO: 52059 - DNA, 474 bp, Glycine max
  Clone ID: PAT_MRT3847_18022C.1
gattgttttattagttttgtaagtcttgtttataaattattgatcttttgcagtgattttgacttgtattcttcttcctattagctttatgcttgtggttccatgtttaatttattgggaaaaaaaaaaaaaaaaaaaaaaaaaaaaaaaaaaaaaaaaaaaaaaaaaaaaaaaaaaaaaaaaaagagagaaggagaaaaaaaaaggggtgaaataaaaaaaaaaaggggggcgcgtttaaaaaaatccaattttactaacccggccatccaaagaaaaagtttttttatagggcacccaaaataaaattaacgggccggggtttaaaaacgcgggaacgggaaaaaccctggggtacccaaattaaatccctttgaaaaaaatccccttttccccagttggggaaaaaaaaaaaagccccccaccaatcccctttccaaaaatttgcccaccctaaatggaaaagggaacccc

SEQ ID NO: 52060 - DNA, 382 bp, Glycine max
  Clone ID: PAT_MRT3847_18023C.1
attaaagattcctgtagcgagttcaataataagtcctccaccacactcagatctgcgagtctctgtattgtgtatactgctgcaaattcgatgttcaattcccaatttctattttcaaattctcagaatttcaacggtttaattttaagtgtatgagatctgagcagaaatcataattttccatcgcaccggaagccggaaccctaaccgaacctgatcccaatctccgatgtcttgtttagcgctttctctgcaacccgcaaatggatccgacattctccttcagacgcgcgagtggtttccttcctcacgcgccctctacgccctcttcgcctttcgtcacactcaccgcgcctttctcttctacaagcactttgcccct

SEQ ID NO: 52061 - DNA, 354 bp, Glycine max
  Clone ID: PAT_MRT3847_18024C.1
atcctgggtgtccataaaatttggatccattttgtcatcccttgtttagaatctctaattccaataaatcttttcttcaagcatcgtacaattctagctggcactgccagtcttaccgcactgtgtttgatgatgataatatatattaaggaagtttattatttagaaccacaacaaagccttcataaattacaagtataaagaggtagtcttactcctgctcagatccatattacattgttctgcctttcctttgcaactagttcattgaagagcaacaaaaataatggctgaaacaaagttgagctttaaggacaaaagatggtcactccatgggatgactgctctagtcac

SEQ ID NO: 52062 - DNA, 141 bp, Glycine max
  Clone ID: PAT_MRT3847_18025C.1
ccttgattctctctcttcgggcagaaacatgaatttgggaacgcaaccagtaacggcgtggtattggtgctacagctgcacccgattagtgcacctatgtggtcaaagtaacatcgcctgcccccactgttaaagcggttt

SEQ ID NO: 52063 - DNA, 709 bp, Glycine max
  Clone ID: PAT_MRT3847_18026C.1
tacatgttgcaccaatcttccttataataactacatagtttcttttcctaataattaaattatttaatgttgttaaaaatattagctatgattttaattcaaataaattcagagggtattcatgattgaaataaagaagtagaaattctttatttatttaaaaaagtctaccaactctagttatttcttagtaaataataattatactccacaaaagacaattagatccaaacttcaaaccaaaatagttgttaaaataatataagaaatttgtataataaaacatacaatacttgtagaaaataacattttttcactaaattgtgaatttttttttcttgtgatgatattggtacaaatattcaccgcctgaatcaatgactaatataagttataaatcaaacaaaaaaatgcattacttagatcaagacagacaaagttcttaccattcaaaagagtagttttctctcccgtgtctttgtactaccagagacatattggtttatgcggaaaagattaggcaaaactcttccaaagggattgcaacagagtcgctgccacaaacagagtcagcttccaatcaagcaactggatactaaatgcatcaattcataaggaatagagtaaagcaagtcccagtaacatgagcaatactcatttcccaccgcttcaaatcatccctctctctctctttctctctctctgtgtc

SEQ ID NO: 52064 - DNA, 311 bp, Glycine max
  Clone ID: PAT_MRT3847_18027C.1
aaccggtccggagttcccggctcgacgccccgcgtgcagaggacgacagaagggaacggctgcggaaggacgacggactgtgcctgggtgctagtagacaacagagggggccgggtgtctgatgacgactacacgttccgggtgggagatgacggctgcaagacatatcctatagcaggcggagctacccgttggattactcgtatcatgttactggctatgatgatttaaacttgaagagcggccgctctaatcgatccttgctcattgctacttgcatgcggacgcatggcatttcaatcaagtgacct

SEQ ID NO: 52065 - DNA, 266 bp, Glycine max
  Clone ID: PAT_MRT3847_18028C.1
ctgtaacaatgacacaaagcggtgtagtctactcaaacactctaccagtacgtggcattgtacacatgatctcttatacatctcctatggaccggccgagaacttttttagtttcatccactcaaagatccgccttttaatcctactctgtcaggatacaagctttgcctttaaagcgccacaccagacgtttccaatcctcctgtctatccgacgactccaagatagacctcaatttctatctgtgccaaacaccgatcgtcata

SEQ ID NO: 52066 - DNA, 566 bp, Glycine max
  unsure (1)..(566): unsure at all n locations
  Clone ID: PAT_MRT3847_18029C.1
ggctcgagagataaatagagtgtgtgaataatatttagtagttgtagctggggagagtggaacattgtcagcttcataataaagatgacaatgaagctggttttggtagttgttgttgaagttgcatgcttagtttctgggatcttgtcctttggatctgagacactctctgagctttctttcttagaaaatgatgtcgtctcaacaacaagaccttcctcttcatctcaacttcaacctcaacctcaacctcaacctcttatggtggacctcactctcattcatgaagctgattctaaaggagctgtctgtttggatggaacggtgcctggataccatttgnatcgtggatttggatctggtgcagatagttggcttattcatttggagggaggagggatggtgtaataccattcagaaactgtgtctatagaaaaaatacctcgtcgtggatcctcaaaatacatggaaaatcaaataccattcacgggaatattgagcaacaaacctgaagaaaaccctgatttctttaactggaatagagttaaattaccgtactgtgatgg

SEQ ID NO: 52067 - DNA, 274 bp, Glycine max
  unsure (1)..(274): unsure at all n locations
  Clone ID: PAT_MRT3847_1802C.1
gagccatgcttttgtgacagaccgacaagttcaagcatcttctctttcttctgctcctccaccagaggctcccccaagtccaagtaccccacttcagcatccacatgaaaagaagangcnagctatgtgttgaggaattagaagaggaattagaaaataaggngccaaaaaagcagnatgttagtgttacnctnttggatctgantattatccncaggtggtgaagatgnatcatgcacgcnngaaganggnccagaatnnntttntcgnnggg

SEQ ID NO: 52068 - DNA, 2550 bp, Glycine max
  unsure (1)..(2550): unsure at all n locations
  Clone ID: PAT_MRT3847_18030C.1
gtttgtaacaacttgtgcaagtacaactcacatacattaaaaatatactgataaagatagaataagagagagagagagagaatggaagggagagagagttgtcacccattgctgagaggaggtaggagaagagaggagaaaggttacaaccatggcttatccaccactcagatgcatgtcatggctgccatatgtgatgccctcattccttccctcccactcaacaaggacacttcacaagaccaagctctctcagacttctacaatacctctgcttctcagctcccttttcctgatgaggctgcagagctgttgtacaagaggactgtgccagaagcggtgtcgttggtgagttgggttctgtggatactgtctttcagattggggacactgttgctctgtggaagactttccttggactggaagtggcctttcattcgcaagttctctgagatttccttggagaagagagaacaaattttcaggaactggaccagggaaaagagttgggtagccttacgggtagtgtttgtgctcatcaaactcttttgcttctataatttcttctcaaggactgatgcaaatgggcaaaatcccacatggaaagcaattggataccaagtggacaccaaggagaagttgatcagaaaggagaggcctttggaaaagggattaatagaaacaatgtatgaaactgattctactttgatccaatccctcactgaaaaaggccttgaagtcactgaagataaaaggcagaacctgtacaaggtcaaatgtgatgttgtgattgtggggtctggttgtggtggaggagttgcagctgcagttcttgcaaattctggtcataaagtagtagtccttgagaaaggagagtattttgtttcacatgattattcttcccttgaaggtccatccatggatgaacaatacgaatccggcggcattatgccgagtcttgatgggaagatgatgatcctggctggctcaacagttggtggaggctctgctgtaaactggtctgcaagcatcagaacacctgattctgttctgagggaatggtctaaaaaatataaaattccactctttggtagctccgattaccaatctgcgatggactcggtgtgcagaaggattggtgtaacagagaagtgcaagaaggaaagctttcagaaccaaattctcatacaaggatgtgagaaaatgggcttgaaagtagagtctgtggctataaattcctcagcagatcactattgtggttcatgctgttatggttgcagaacaggagataagaagggaactgactccacttggttggttgattctgtaggcaatggtgcagtgatcctcactggatgtaaagctgagagattcatacttgaaaatggaaagaatggaatgaagaaaaagaagtgcttaggagtgattgctgcagcaagttggaggagtaaggtaacaaagaaactccaaattgaatccaaggtaaccatctcagcatgtggctctctcaacactcctcctctaatgatttctagtggactaaaaaatccaaacattggaaggaatctccatctccaccctgtccaatttgcatggggttacttcccagaagacatgacaacaaacttcagcggcaacaactacgaggggggtatcataacttcgatccacaaggaatatgcagaggattccaccccaaggttcatcatagaaacaccttctctaggaccaggatcttnttcggcgtttgttccgtggctttcagggcaggacatgaaagacagaatggccaagtacgcaagaactgccaacattttcgcattgatacgagaccagggatcaggagaagtgaaggctgaagggagagtgacttacagacttgacaaagaagacaaagaaagccttagagttggactgaggaaggcattgaggattttggttgcagcaggtgctatggaagtgggaacatacagaagtgatggccaaagaatcaagtgtaaggggatgaaggaggaagatttggaggagtttcttgacactgtgacaatagttgggggtccaaggtcaaggaatgaagtgtggacagtgtttaccactgcacatcagatgtcaagttgtagaatgggtgcctctgaagaagaaggtgcactcgatgagaatggtgagacttgggaagcagaaggcttgtatgtgtgtgatgggagtgttttgcctagtgcagttggtgtcaaccccatggtaaccattcagtctacatcttactgtattgccagtaagattgcagaatcacttggcaaagcatcaacatatagttaagttgtattgtttcaatctaagtttcataaaaataaaaataaatgtacatgtgcttcatctctttagttttgtttaaattcagcattttgacccggctataacggtattgttagtggtagttaatgaatttccatgtaactttgttattgtatgctatggaggactttgtaataaaatgttatttatcctgtgtttcttaacaaaaacatgcaccaaaccgtaaagagtgctcct

SEQ ID NO: 52069 - DNA, 821 bp, Glycine max
  Clone ID: PAT_MRT3847_18031C.1
gaaacatcataatgaaaaaaaaagaaaattacgacgtgggtctacaatctttgtgtctgttacttagtatcagtaagataggctttgtttcctccacatgagaagagaaagtgagaaactaccaatggttcttatttaaagcaaataaatattgaaagacaagaggtaacagataaatagagtgtgtgaataataataagtagttgtagctggggagagtggaacattgtcagcttcataataaagatgacaatgaagctggttttggtagttgttgttgaagttgcatgcttagtttctgggatcttgtcctttggatctgagacactctctgagctttctttcttagaaaacgatgtcgtctcaacaacaagaccttcctcttcatctcaacttcaacctcaacctcttatggtggacctcactctcattcatgaagctgattctaaaggaactgtttctttggatggaacgttaccttacaaccatttggatcgtggatttggatctggttcgagtagttggcttattcattaggctggaggatttaactggaaatacgttaaagtaccgaactgtgatggatcatctttcactggaaatagtcaaaaacaggttgcacagattccattatgaggacaaaaaatatggcgcgctgcaatgcacgaattattgtttaagggaatgcagaaggccaaccaggcccttttgacttgatgctctgcaggtggtctggcatctataatacattgagatgagttccggagcttgttttctacatctaccaaagtgaaatgtttgagagacgccgggtttttcct

SEQ ID NO: 52070 - DNA, 181 bp, Glycine max
  Clone ID: PAT_MRT3847_18032C.1
ctgatacaaatctcatagcagaggtacgtcaatagagagctaatattgctaatcctggtgatgataatataatgtcactccacgcgcgtatagtatggctgccagaagcgaatgctgctacgatatgacagtatatgatgatcacgattcgagacataggatggatgatgcgccatgatct

SEQ ID NO: 52071 - DNA, 477 bp, Glycine max
  Clone ID: PAT_MRT3847_18033C.1
aattcggctcgagaaagaaaattacgacatgggtctagcagtaccatctttgtgtgttacttagtagcggtaagaaaggctttgattcctccacatgagaagagaaacgaccaacggttcttatttaaagcaaataataaatactgaaagacaagacaagagataaataataactagttgtagctgctggggagagtggaacataataaacatgacaatgaagctgcttttggtagccgttgttgaagttgcatgcttaatttctgggatcttgtcctttggatctgagacactctctgagctttctttcttagaaaacgatgtcgtcttaacagcaagaccttcctcttcatttcaacctcttatggtcgacctcactctcattcaaagagctgattctaaacgagctgtctgtttggatggaacggtgcctggataccatttggatcgtggatttggatctggtgcaaatagttg

SEQ ID NO: 52072 - DNA, 523 bp, Glycine max
  Clone ID: PAT_MRT3847_18034C.1
ggtgttgcacaacctagaaacattggatctaagagaatcaggggtgcgtaggatgccaagagagatctacaagcttaaaaagttaagacatctcctagtttatgataagttgtttggtttcttgggtgggcttcaaatggagggtggcattggagatctaacgtcgctacaaacactacgtgatatggatgcagaccatgttacagaagaagtaatgaaagggttggaaagacttacacaattaagggtgttgggcttgacctgtgttcggggacaattcaaaagttctctgtgctccttgataaacaagatgcaacgcctggacaagttatacattactgtatcaacatttaggtccattaatttgcaatttgatgtatgtgcacctgtacttcagaaggttcgcattgtaggggggttaaaggagttcccaaactgggttgccaagctccaaaatcttgttacgttgtccttgacacgcacccgtatgactgatgatccattgccactacttaaagaccta

SEQ ID NO: 52073 - DNA, 2002 bp, Glycine max
  Clone ID: PAT_MRT3847_18035C.1
tatccttgaaactgtctctgtataaataaataccacatcagacgagtgagtgaatagtgagattaagcttttgaggctgttgcgcagaaatgagaatgaacgctgcgagaagaagaaggggaagacaagagataaataataactagttgtagctgctggggagagtggaacataataaacatgacaatgaagctttgtagacaattttgaatttgtatgcttagtttgagaggaatagtagcatttacataataaagatgacaatgaagctggttttggtagttgttgttgaagttgcatgcttagtttctgggatcttgtccttttggatctgagacactctctgagctttctttcttagaaaaagatgtcgtctcaacaacaagaccttcctcttcatctcaacttcaacctcaacctcaacctcaacttcttatggtcgacctcactctcattcaagaagctgattctaaaggagctgtctgtttggatggaacggtgcctggataccatttggatcgtggatttggatctggtgcagatagttggcttattcatttggagggaggaggatggtgtaataccatcagaaactgtgtctatagaaaaaatactcgtcgtggatcctcaaaatacatggaaaatcaaataccattcacgggaatattgagcaacaaacctgaagaaaaccctgatttctttaactggaatagagttaaattacggtactgtgatggagcatctttcagtggagatagtgaagatgagtctgcacagctccagtttcgaggacaaaaaatatggctagctgcaatggaggaattaatgtccaaaggaatgcagaaagccgatcaggcacttctctctggatgctctgcgggtggtctggcatccataatacactgtgatgagttcgggagcttgtttggaaaatcttccaaagttaaatgtttgagcgatggaggtttttttcttgatgcaatggatgtatctgggggacgcacactgaggactcttttcggaggtgtggttcagttgcaggatgtacaaaaaaatctgccaaaaagttgtctcgaccaactagacccaacttcgtgcttctttcctcagaatatgatcgaacatgttgagaccccattgtttctactcaatgctgcttatgatgtgtggcaggtccaagccagtttagccccaccttcagctgaccgccttggttcttggaatgaatgcaaatcgaaccatgcaaattgtagctcatctcaaatgcagttccttcaagacttcagaaatcaaatgctgggtgacattaaagacttctcaagctcatctcaaactgggctattcataaattcttgttttgctcattgtcagtctgagagacaggagacatggtttgctgatgactctccccttatcgaggacaagccaattgcagttgctgttggagactggtattttgatcgagaagttgtcaaagctattgactgtgcttacccatgtgacaacagctgccataatctggtgtttaactttaagtgaacaaaatttgttgtctcctcattacactttaatccttgtaattgcaatgagtattcaacaatcaacattcattaattattatggaaagacaattcttggttaaaaaaaaaactatggatagttttagcccagaaaagcaaatgcactataggcaggttcgttagtccctattcaatcttccatttaagccacttatggttatctgtgtcagctattaattacaggtcaagacctggattcagcaatagatagtttaggacttgaagaaccaatttggttaaggaaaaacaacctgtaactatgtaggtacctcctccgatcttctaaatattttagccaattgcacagttcactttgtaatctcaagtttgttataaaggagtttaagaaaagttttagcgaaacttgaattacatcaaggtgctatatataaacgcatgctgttcaaaatgaaaaaacaccc

SEQ ID NO: 52074 - DNA, 531 bp, Glycine max
  Clone ID: PAT_MRT3847_18036C.1
ggaatttttggtgaaagtatcggagatgtttgaaatcatcattttcacagctagtaaacgcatgtatgctgaaacattgcttgatgttcttgatcctgataaaaagtttttttctcgacgagtgtaccgagaatcatgcacctggaaagatcgccgctgcgtcaaggatttgacagttcttggaattgacctggcaaaagtatgcataatctacaacactccagaggtattcaggtttcaagttaacaatgggattcctatcaaaagttggtttgacgaccccactgactctgctttgatgtctttgctcccctttcttgagaaactggttgatgtggatgatgttcgcccccttattgcagagaaatttggggcaaggacttaattttgcacttgtggtcgccttgcccttcttggaagcagtagataacttaatcttaggattctagatctcctttcgataaccctacctacccaattttcatagaagagaatgttacctagttagggttttttttttttagttacata

SEQ ID NO: 52075 - DNA, 471 bp, Glycine max
  Clone ID: PAT_MRT3847_18037C.1
cggctcgagataacagtttcagatcttaccacggacttgcatgtgaagcaccgtcagctgccgggaacgaacgaattggagctgtctttccaggaaagagcataataatctgccacgatttcatctgaactcaattttttggagacgagcttgcattctctgcatatacgagctgcatgctgagacaactgtcagagaaccgttggagaactcagctccagatcttaccacagaactgaatgagaagcagagtcagctgctggtgaagtgagactcggagctgtctttggcggcaagagcacattaatccgcctggatttgatctgaacttaattctttcgagaagagcttgcattctctgcatcacgagttgcatgctgagaaatctgtctgcgaaatgttgctgactgcacgttctgatcttaccgcagggttgaatgcgaagcgatgccatctgctcgattctgatct

SEQ ID NO: 52076 - DNA, 396 bp, Glycine max
  Clone ID: PAT_MRT3847_18038C.1
tttcgaaacgttgccttgttccgattaggtatttgctatcgtgatgaaaaaaatttggtgtgaatttatctccttgccctttgccatgattcaattaaagacgtgtttggaaccacattctaacaccactttatgatgggttagacgcaaaatctagattgggtagtgtttacacacagttacaaacacattccttgtttaatgttatcatgcctaggagttgaataacttgtaactttaccaattagacattactactagcattctttttcctattcaagttgatgttatctccagttagtgatggtcatttcattccataaacttcaattgttaaaatgagtgaaaagggaaaaaggaacccgtttgattgttatggttctagtgatttttagc

SEQ ID NO: 52077 - DNA, 264 bp, Glycine max
  Clone ID: PAT_MRT3847_18039C.1
attcaccattttctccatcttcattcacttgcaagactcctccatagatatgctggtggtgaccctcttgcagttcgagttagctgttgcatctttctgattttacctgccactgcttttcccgagggcttgtgattgtcaactacatattcaattgcatttaagtaaggagttttgtcttgaaaggaccttatcttcgccgcagcagccatgaaaggaaagaacaggagaagtggtggtgctatccatatggagtacctcatt

SEQ ID NO: 52078 - DNA, 430 bp, Glycine max
  Clone ID: PAT_MRT3847_1803C.1
gcctctacagcagcacgccctcctttatccactcctgatctcaaaacttcttttctctctaactgaaacccttgcaagacggcgagaacactgaactttattgctacacactaaaaagtaaaattcttatccttcaccagaaagcaggatatttcagtactaaatttcacaactacttcctggtgttttatcatacaaaaccctacgcaggttcaagatactctcttccatatcaatcgaaaagtgtagagagcaactcaactttacaaattgtttatttacaaattcttgtttgacttgcttgacacaaactgactataagcacttccctgtcgccattcatctgttgaaacatcagaaattttatacccaacttcaactttaggagccctttttctttatttagataggtactgcctttgggcaaaaa

SEQ ID NO: 52079 - DNA, 595 bp, Glycine max
  unsure (1)..(595): unsure at all n locations
  Clone ID: PAT_MRT3847_18040C.1
ctgaaaatgagagaaaatagaattagaggttaagaaaatataacattaatgcatagtatgaaatctcatttaaatagaattagaggttaagaaaatagaacatttatgcctattatgaaatctcatttccaatctccaaccaacccacggacatccacttgcaaaaagattccacgtgtgtgcatgccatatataaagcatggtcggtcaaatctatagttactttaccttgatgtgacaagttcacaaagggaaggtaatagcacaaacagatggggancggttgtcatgcttctccttttcctctgctaggccagttctcaacaatgggtgtaaagggagaatgggtgctgcatctggatgaattacaagatgtgccagttcttggagaacataaataatttcatcaagtcttgcttttggtaatggacagtcacctgaaggaaaaagaaaatagttaagtaggcaaaaactgggagatgaaatgaagatgattgatggtgggtttgtcttttcattaaaatagaagcacacctaagccattttcatctgtcagaaacctgctcaagatgtattcacattctggtcatgagca

SEQ ID NO: 52080 - DNA, 410 bp, Glycine max
  unsure (1)..(410): unsure at all n locations
  Clone ID: PAT_MRT3847_18041C.1
cagaattgagctagctatctangatgnagaacacgananttgaagcannactacacaagatatttatttcttggagantacaccaatattctatgtgcaatcacaccctctnccgaggnggncacgcgtacaacatgggagctgaccccacctctccagnagatnnatctnntatggtatgtctctctcccanagtttntantgnntgganacatngagacngcgcntgatatcacatgtatngagntgnagtananactgngangagntntctctccccanantctnatgtgtgtctctgcnngangctccgngtatttgtgggatatgctgtaatatctcctcccncttctgtggntatgtgatattnaganagaaanagtagatgggggagatttctttcatcaaca

SEQ ID NO: 52081 - DNA, 328 bp, Glycine max
  unsure (1)..(328): unsure at all n locations
  Clone ID: PAT_MRT3847_18042C.1
gtgactataagtagtttatcgtgaggagaatatgaagttgtttgttttctttgttgctgccagtagtttggtagcatggccatgccatggcgcaagctaccaaaggtccctctccgatgnnaaactggcatggtgacggtcttcggaggtaaaatncnaagttttaggcttgctgtggaancacacaacatccgagtnttaaaaacnatcctgaagaggcgttgaacnaacaaaggctacataatggcgacnattagnncagacctaaaccagtaaccacaagcttctttatgctaggacgcgagncacacacgncntttatatcgga

SEQ ID NO: 52082 - DNA, 630 bp, Glycine max
  unsure (1)..(630): unsure at all n locations
  Clone ID: PAT_MRT3847_18043C.1
gcaatattttaggctcctgaaggaacacctgctagtggtggtttacttgtaattatcgtccatgaagctgaagatgtggaaggaaaacaccacacaaatccatatgtgcgactgctatttaagggagaagagagaaaaaccaaggtattatacactgattatgatatagtcaactttgattttttgctatcaggcttgtcatcattttcttctttttgatcaataaggtgtgttacgcttcttcatccggaagaggataaatttgacattagacagtgaagtgctagcaagagcaaagaataagggtagcagaaacgaaaatgttgaggtagatgagtggatattaaagaaaagataagattaggaacatacataaacgaaagaaaattgtagtagtgtctatcaggagaagtgattgaagaagactaatagaggctctagttagattagtggatcaaatgatatatagtcccattaagtaaggtagtgccagttcagatcctgcagctgatgctgataatgcgggagggaagggatcacccgcaaggacacaattttcaatagttttgangtatttatgtttttgtagttattccttggtattctaacttttacgtattgggatttata

SEQ ID NO: 52083 - DNA, 1635 bp, Glycine max
  Clone ID: PAT_MRT3847_18044C.1
ctgaagatgtccctaatggtgggggccttttgctttctgaattgtgggctggacctacctactcaaactcaccacctcccagttccttgccaattcccaagttttccgtccggccgaagaggaccgtgtctcttgatctccctggttcctcctcccctgggattgaaatgcgcccggtggctaagtctgcgccctcttcccctagcagggagcttttggatttgccttttacaagggatttctttgatgataatgctgattctgctgcgactaagaccctgtgtcgcattcttaatcttaacatcaatgatgactgaaatggaaggagcaataggctcctgttagtgttagatgtgtatagataccaaataaagttcgtagtcttagttggtttatgttgcctttggttgtggtgttgcccttgacaatctgggctgtgatggtgggtcaacaatctccagattttggaatttggatcaagcttttagctgtggagagggtaactgggtgtatactagaggaatctattgaaagcaggctttgctatggattgtacaacttgatggaagcttcgatgaaaatgtttggtatatagaatagtggtaatgggtagaagtggcatggaatagacttgggttgacattgatttaatctattggacctgaagaatcctgtatttatgatacatagttctcagcatcatctcctcctcacagaatggttaactttcccttattcttgcgtaggatttaggcctcttgctttagatattatttatatactgcaaaatcctcccctccccttcctgcccttctctctctatctgtttcttctttctacaatccttaaccattcaaacttatattctaattatgtatatagtgtgcatcactgtcatatcagtcttctagatggtaatgctgtttgctagttactaccttcctcacctgtctttcttttcctctagtcatctttgtttctctttggttaactttgtatttagctaccctcagtgagggtgtagtttaccccttcatcatcttttctgttttttttcaaagaaaagtaagaagggattggtagtagtcttttgcagtatctgcttcagtttttaggattaatccatgtcactccacctactagtaaacccctgatatgtttcattccgagtaatgcttatttccttagtcctagacctagttctctcctggcttatcttccattttcatggggtgtgttgaccgttctatgccaaattttaagggtggcaaaactttatgaagtttgtttggatcgtgacttgtgagatgtggtcagttgcaactcagtttttctccctaatgtccgttgtggctcataaatttgtctgtgtttctttctttctgcctcagttacttgtggattttgtttggtctgctggaatatgttactgactcttaactatacaacattttgtatctgaattaaatctccttgttaatttatatagctgttcttcggaagctatgtcctatggcatgattatctacattttatgaactgttgtatctgttgtcagttgtttgatcttttaaatgaattggtttccaaatattgatggaacttgggctatgaaatattcagtaatgattctca

SEQ ID NO: 52084 - DNA, 267 bp, Glycine max
  unsure (1)..(267): unsure at all n locations
  Clone ID: PAT_MRT3847_18045C.1
ggcttcctcantgatctcttccccaactgttaccactgtccaaccgtgccgatgccggcntggttgctaccattcgctgggcntcangtccatggcttgnttccccaccaggaagaccaacnatgacattacctccnntgctagcaacggtggaagactgcaatgcatgcnggtntggccaccagttgggcaagangnagtttgagactcntcctacctgccagaccttgntgatgcncaattggcaaaggaagtagagtaccttct

SEQ ID NO: 52085 - DNA, 1467 bp, Glycine max
  unsure (1)..(1467): unsure at all n locations
  Clone ID: PAT_MRT3847_18046C.1
gtccggnattcccgggtcgacccacgcgtccggagagatttagataacacaacaccaatgcgggaactcaaacgcctgtttcgcctaaccaaaggaagctccactgcggtttccgtttcctctctgccttcaccactctcttttttttctcaacaggaacaaagaaaaatggaagttgcggcagcgaaagccctgaaaccaagccttcggacagagttcattttccctcaagcaatttacgacgagattttgtgttttaacgccaacaacgttgttgccggcgaagatttctccgtggacgacctactcgacttctccaacggcgaatttcaagtcgggaaagatttcgatgactacgaggaagacgaagacgaagaaaaaggcagcacctccggttccttgcagtcgcaggacagaaccgaagacgacagcaactctaattccaccgccggaggcggcggagactccgttttcgccggcgagttgtcagttccggcggatgacgtggcagacttggaatgggtttctcactttgtggacgattctctcccggagttatctctattgtacccagtccgttgttccgagcaaacaagggtatgtaccgaaccggaacccagaccgggctcggtccaaaccattccagcagttccaagaaagccgagaaccggaaagactagaaagcccaacgctcgtgtctggtcctcgatgtcgtctttgtgttcttcggtgacggccaagaaacagaagaaaaaggtcgaggcccaaaacggtggggcccagtctctgcgacggtgcagccactgccaggtgcaaaaaacgccacagtggagaaccggcccactagggcccaaaacactttgcaacgcttgtggagttcggttcaagtccggtcgactttttccagagtatagaccagcctgtagcccaactttttctgacgatattcactccaacagccatcgtaaagtgttggagatgagacgaaaaaaggagatagttgaatcggaccggattcaattgatcccaagttgttaatttttgttagactgaatttagatgcagttcattaagtatttctagtagagtagtattgtttttttccgttagaattaaagtttgacctcattaatatgcatataaaagtttgcataattgagataaaattataattctaacaaggctatctaaggatttatgtttttagattccaataggttatagatcagaaataggtcaacgaatcggtctgagctggtttggtatttgttccatagttagtgatttaaattagtgctagtcaggtaaggaagaactaagtgataacggacattaggagagcattgatagtttgtatcccattttcctagcgcagttgatttaattaatgagatgtagttaagttgaggaaaaaaaactaaattatttatgaggacatctttctatatatattcaagttgggttgat

SEQ ID NO: 52086 - DNA, 517 bp, Glycine max
  unsure (1)..(517): unsure at all n locations
  Clone ID: PAT_MRT3847_18047C.1
tatgacgatcgcatgncacgnncgtacgtaagncttggtatccctctagnnagcggccccgcccttttnntttttttttttttatnntaaattcccaagnntcgtattcaannatcctctatcaataaaaccactgannagccaaattaaaatanntttctagtacacacccnncaaaaattcttcaaaagaaaaactctccgggaattctagcacgacnccaaaatcataaattaatgggaaattctaanncccatcgnnataattaaatttgatgggggaattanntgatgtagnncagtagcacaacgttctnncaccattaaaatnncaaaataccaggtnnncaaagtttcaagggtaacttagggacccagaacgtannaaaaaaaaccctagataaaatgggagtagatanngctcggtacccattaagtcacttttagcanncttgacccnnggacgcgtnngggtcgacccnnngggaattccggacccggnntacctgcaggcgtac

SEQ ID NO: 52087 - DNA, 419 bp, Glycine max
  unsure (1)..(419): unsure at all n locations
  Clone ID: PAT_MRT3847_18048C.1
gtaggtccagccagtaatgtagtatacagatagtctcaactgttaaatatatgttactatcatatagtatgttagtaacatttttacccgcaatgacaaaggttgaaatagtaatggcgtctgtaaactaattctgggtcattgaccatcaatggttggcaattttcagaaagctcaacagttggagggcctcaacaggaacactgacgcttactttcccagtgaatgacagtaaactcaaaacaacaggaggcttttgacacaagtatggtgagcaatttctaccatccctgaatatcaccaaccagtaatgtagtcatcatcaatactatactaccagcatcctgaaccactgacaagtgaatcaagaaatatatgttgtagcacggcaggcctaaacagaagntaatagctaattt

SEQ ID NO: 52088 - DNA, 365 bp, Glycine max
  Clone ID: PAT_MRT3847_18049C.1
tttgggttttgctgttttttcttaacactgagaagaaaaaacagagaaacacaaacacgagcgaaggaaggaagaaaacagtttgttccagaactgaacccaaagatcttctctttacgtgctcatgtgaggacccaattcttcttcttcttcttccgctgcttggatctgcacttttcggtcttttctttcattcccgcacgcgaactccttcacgggtcaattccaattttgctttgcgcgctgtttttttcccgcaccacaaaagctttcgcggaagtatttgttcggtgggtcgaaggtcgagaaaggttctagattgggggcgtggctttggttcgtttcaattcggaagggttttactt

SEQ ID NO: 52089 - DNA, 1144 bp, Glycine max
  Clone ID: PAT_MRT3847_1804C.1
cggctgcgagaagacgacagcagattgaatggcaaatacgaggatggcaaatatgaacacaaacagcaactccaaagaagaaagcaaaaaaatggatgaaagagaggcgatacccttcctcacctcatacaagatgggaaattttaatctatcccacaggattgtgttggcaccgttatcacgatcgaggtcttacaacttcattcctcagccgcatgctgctctgtattattctcaaagaacaactaagggtggctttttgatcggggaagccgcaggtgtgtctgatacggcaaagggataccctaatacacctggcatttggacaagagaacagctggaagcttggaaacctattgtgagcactgttcatgaaaaggggggtattttcttttgtcaactttggcatgctgggaaagtctccaactatgatgaattccaaccacatggtgaagccccaatatcaagcacaaacaagcgacctcgtaaggaaatccccaagcttgtcaatgaattcgtaattgcggccaaaaatgccatggaagcgggttttgatggaatagaactacatggagcaaatgggtacttgctggatcagtttctaaaggacaaagtgaacgacaaagatgatgagtacggaggaaatttagagaatcgttgtcgattcccactgcaagtggtgaaggcagtagctgatgagataggagctgacaaggttgggatgaggctctcccctttcgctgattacaatgactgtggagactctgaccctcatgcattgggcgttcacatggctcagtcattgaatgaaatgggcattctttatattcacttgattgagccaaggatggtaacacaattccacaagtttgacggtaccaaatcgtccctaacgccaattaggaaggccttcaaagacgggacttttattgtggctggtggctacgataggaatgagggaaatgaagctatatcatgcgctgctgcagatgtggtcgcctatgggcgcctgtttttggctaatccagatctccccacaagatttcagctcgatgctcacttaaaccaacccgatgccaccaccttttactcacatcatcctgtgctaggatatacagattacccgtatcttcgacccaacgcc

SEQ ID NO: 52090 - DNA, 640 bp, Glycine max
  Clone ID: PAT_MRT3847_18050C.1
ccacgcgtccgggcctgagtgtcatctccaatccatagcttgcaattcccggcaagcacagtgattggtgtccagaaaggcttcagcttgctcctcccttctcaacttcaacaatttcgctatagcacttaatgtcctgttgttgtagggacatcagtcttgctaaacatgatatggtcaaggctaagtaggagaactcatcttttgccatcccttaagactttgcaaacaaactctcttgaatccaggttatgtgatgttgcactaattcctatatttttgttaattttgtctcagattattaattcttttatggggtatgttctgaaacatattggcgataaaatgaatggaattatactttacttcttaggcagacttctcaaaccaattgttctctctaattagtgttttgttctaattatagagatacatatatgtgcaatgaaaccttttgcttctctaaagtctgacttccaaaaagaaaatgtgaagaaattagtttctaatgagttatttgtagataattttgtttttattcagatgcctgtctatcattcctaaaggatcaagttacaagttcactaatcctagttccagcttccaacacaatttttcttgttatatacgggtatcaaag

SEQ ID NO: 52091 - DNA, 480 bp, Glycine max
  unsure (1)..(480): unsure at all n locations
  Clone ID: PAT_MRT3847_18051C.1
tcgactctagatgattcacgggggattncccgcatgaagtcgcaaatataaacttatagattcacttatttctcataaagaaaataaagaatggaaccgttaaattaagaatcggatctatttgtaaatttttgtttgaatcattaggaaacctgaaaccctaatacatgagcaaaggcgcagctatactcctagtctcctaaaacaccatcatttgtggttctcaacatttttcttacttgctggaagaacaaggatcaaattgaaatggtggtagtttgtgagacatcataagtaacaaatcacttgaattgtcaagtggttatgtaaaaaagcaagttttttgtgtgtatctaaaaaatattttctaaaccaattaagagaaatgtaacttattttgaacctaggtctatattatctataaatatatccaacttaacatgaagaggggactaacatctggtattttctttgatgctt

SEQ ID NO: 52092 - DNA, 869 bp, Glycine max
  Clone ID: PAT_MRT3847_18052C.1
ccacgcgtccgcgcatctgcagcgtcttcctccgtggcgtggcttgttaaggtgtgaaaagtgaaagagggaacaagaagttgacggtagcagaatggtggtctccagtacaaatccccacaataaggagatagctatcaggaggaggattgctagcatatttaataaacgtgaagatgatttcccatctttgagagaatacaatgattacttggaggaagtagaggacatgacatttaacttgattgaaggaatagatgtttcagatattgaagcaaaaattgccaaataccaggaagaaaatgcagaacaaataatgattaatcgagctcggaaggctgaagaattagctgcagctatggcagcaagtaagggacaacctgcacaaactgatgatgattcagccacaaaccaaaactcccaagcaggatttggagctgttcctcaaggacaatatgcacctacatttgcaggaggacagccaaggcctacaggcatggccccacagcctttaccactcggagggggcgacatgccgggctttgcaggtgatgatgaggaaaccaagaggctacgaactgagagggctggaggatggagtggagatattagtaggaaaagggcacttgaagaagcctttggaagcatctgggtttgctgagacaataataatcatgcaaggctggacatgcttattttaaaatggtgtttagatactttctaaatcctaagggcatgcaaattccagtgtcacagaagctattttggcatggatattgcgatgtaaatggtgtagaatgtagatttgttgaattttgttctgtgaaccatattgaattttattgtaaggggctttggcttttcttttt

SEQ ID NO: 52093 - DNA, 262 bp, Glycine max
  Clone ID: PAT_MRT3847_18053C.1
agctctatccggaacagtggtgagcacgtcgttgatgaggaggggagctgtgaccaccacacaggtaaagacatcaccaaacgatggtgaagttatttctggcccgaaatttggatgaggtggtcgtgtcaattgcatggccgcgtacaacgagaagctcataaccccagaacgattttttttttttgaatgcgcaaatgatgcctacatagctgattatttagaggacctaggcatggagactggctactcgcgtagggca

SEQ ID NO: 52094 - DNA, 162 bp, Glycine max
  Clone ID: PAT_MRT3847_18054C.1
gggaaaacactggggcggtttagttaaagtttgcttcgctaacttttccccggggacaacaggctcactgagaaaacattttttactagcagagtattggccatcttggtcgcttattatacaatagtaacctaatttagaaaattcctaccgcattacatt

SEQ ID NO: 52095 - DNA, 1923 bp, Glycine max
  Clone ID: PAT_MRT3847_18055C.1
acgaggcgttttcctccgtggcgtgcctcgcccggggcgtggcttgttaaggtgtgaaaagtgaaagagggaacaagaagttgacggtagcagaatggtggtctccagtacaaatccccacaataaggagatagctatcaggaggaggattgctagcatatttaataaacgtgaagatgatttcccatctttgagagaatacaatgattacttggaggaagtagaggacatgacatttaacttgattgaaggaatagatgtttcagatattgaagcaaaaattgccaaataccaggaagaaaatgcagaacgaattaaacaggctgaagaattagctgcagctatggcagcaagtaagggacaacctgcacaaactgatgatgattcagtgagcattagattgctgtttttataagttgattactgttacttttcggcacaatattcaaactttattgagcttggactgttatttgagattgagttttggttttatcatattacttcatctattagcatatatactttacctgcacaaactggttattgacacaattactgcctctgtttcatttgtgaaaattgttgtttgtttttccttaaataagcatttggctttatgatctacatttgaccagaaaaaaatataaatccttgaattcccaaataaattaataaatcccagtcagattctttttaaaagaaaaaactgtagttgttaagaaagacagaaaatgagcctatattatcattacataacaagctctaggacagaaaatgagccaatatttacataacaagctctaggacatttgaatggttgatggcacatatgaggattgttttgcagcagatgggatgcctgaaagaagtgatctgactaaggttgccttgtgcctatatatgcagcaactgtgaaaattaagattcattgtgtatggaattatggtattgctgattgggtttctacaaggtcctgctttggattgctcttgtatcttttctcattgtgttcttgtaagtttgtataaccataatatatatatatatatatatatatatatatagattttcaactattatggttaaaattttgatccttgaagccttgttctttcttttggtagttttattttggttgggatttatttaactttgtgtgaattagccaatatgttgtaatctgcacgttaaagggttttatttatgtgttctgttcaaatatctagtttgtgctacatagtcttttagagcacattcgcaaatactacaatatgcacgatttactttgttgattcttttgaggcaggccacaaaccaaaactcccaagcaggatttggagctgttcctcaaggacaatatgcacctacatttgcaggaggacagccaaggcctacaggcatggccccacagcctttaccactcggagggggcgacatgccgggctttgcaggtgatgatgaggaaaccaagaggctacgaactgagagggctggaggatggagtggagatattagtaggaaaagggcacttgaagaagcctttggaagcatctgggtttgctgagacaataataatcatgcaaggctggacatgcttattttaaaatggtgtttagatactttctaaatcctaagggcatgcaaattccagtgtcacagaagctattttggcatggatattgcgatgtaaatggtgtagaatgtagatttgttgaattttgttctgtgaaccatattgaattttattgtaaggggctttggcttttctttttaaactattctctttctcccttttctttgaagatgttatttgtttatagaaagactttaatttgaaatgaagaatttgggaaaaacaaaaattatgccattaaaaatataaaatttataaatatattatttaataaatagagggcggcc

SEQ ID NO: 52096 - DNA, 261 bp, Glycine max
  Clone ID: PAT_MRT3847_18056C.1
tatcagcttgtaccctatcatttgttctaatatagttgaaggtatacatttattttttctacataattatatgaatgcttgtgtacaatgtaacacgcttatgagatgttggcatggctgtgacgtgtttcgatgctaaaaaaaaaaaaaaaaaagaaaagaaaaaaaaaaaggggggtccccgtaattatagggtttgtacccggggtttatctgcgttccggattattggaggggccgttttttcccaaggggggagat

SEQ ID NO: 52097 - DNA, 529 bp, Glycine max
  Clone ID: PAT_MRT3847_18057C.1
cgttgaccggtgaagacgggcaggatgtggtggtgcatcctcccgaggagcgcgacccgattccgttgattattcatcatcttcccattgctgttacctttggatttttcagcaatgaaaatctcctcgtgatagatccgacgcaccatgaagagtgtgtgatgacagggcgcatgactcccacgcttaattcaaacggcgacgtttgtgcaattcaaaagcctggtggagagagtgtctctcagagcgttatcatgcactgcttgaaacttgctcatgttaaagctactgatattacaactaagattaaggatgcagttgaaatacacaacaatgaaaggatgctacggaagattaaacgccattcttcgtccgctgctgtggatgtatgtggtgccacagctggatttgggggaaaacaaaatccactagatggcgatgatttggaatgtcgagccacaccatcaggacaacaacatagtaaggatggagcctcaaagaatttcaccggtggtccctcgagttggac

SEQ ID NO: 52098 - DNA, 709 bp, Glycine max
  unsure (1)..(709): unsure at all n locations
  Clone ID: PAT_MRT3847_18058C.1
cgggatngtacgagatgagagaaagctcatagtcccactattctacttgcagtgctactacaatacaatcatggcaaatgatggtacagtgtctgaaacaaagtgtacccatgacgtattccttagttttaggagagatgatacccatcacacttttacttgtaaactctatgattctttgtgccggaagggaattatcaccttcatggacaatgaggagctcaaagttggagatcaaattggtcataagcttctaaaagccattgaagaatcaaggatctcgattgttgttttgtctgaaaattatgcagcctcttcatggtgccttgatgaacttgtgaagatccacgagtgtatgaaggcaaaaaacctgctcgtttggcccatcttctacaaagtggatccctcagatgtgaggcaccagaatggaagttatggtgaggccatgactgagcatgaaacacggtttgggaaagactcagagaaggtgcacaaatggaggttaaccttgactgacatgaccaacttgaaaggagaacatgtgcaagaagggtaggcaaatgctaaatatatatacatgttattttttctatttgctattagagttgtgaaatattttctacttgttagttttaaggccaaggaaaggatgattgttcttattgccatttgtggcgtgccttgggcattatatacacttttccttatc

SEQ ID NO: 52099 - DNA, 258 bp, Glycine max
  Clone ID: PAT_MRT3847_18059C.1
ttaaaacaatttgatatttattataagacagaggcatgaaaacacgcacaggaccgcatgctttttgagaccaagaacgcaccctcctgaaacgcgtctatacgcgaaagatttattttattttttgattggagggataaagctaagcagtgttcatcataacaacctcgtggcaccaaccaggtgagagacagccattaaaataaatactttttctacggcaattgaacggggccaatgttgcatatatggcgggca

SEQ ID NO: 52100 - DNA, 1000 bp, Glycine max
  Clone ID: PAT_MRT3847_1805C.1
ccacgcgtccggttgaaagcggcacatccggattggagtcctgctgccatccgatctgccctcatcactactgcttacactcttgacaatggaggaggccctatgctcgatgagtctaatgccaatgtttcctccgtctttgattatggggctggccatgttcatcccgacagtgccatcaaccctggcctggtctatgacatctctacctacgattatgtcgatttcctctgcaattccaactatacctcccacaacatccgagttatcacccgaaaccaggcttcagactgcagtggggccaagagggctggtcactctgggaatcttaactatccttctttatctgccgtctttcaacagtatggaaagcagcacatgtccacacactttattagaactgtcaccaatgttggagaccccaactcgctctacacactcactgttgcaccccctcccggcaccgaggtcacggtggttccggacacgctagctttcaggagattgggtcagaaattgaacttccttgtcagggtgcaaaccagggcagttaagctttcccctgggacctctactgtcaagactggttccattgtttggtcggatgccaagcacactgtcccaagtcccttggttgtcaccatgcagcaacctctctagactctagtctaataagttgggttccttcgggatttgtattggggtgtataaattttgccgcgtttccggactacccccttagttagcactgtcttataaattacttcttgttctctatgtatgtatactagtgtgatagcagcgcagcgtctggtgggggttggattgttgtaccaaaccctacagtgtcgtcaaggtatatatatatatggaaaatatatatatccttctctcttgttgtaaaactatgaatgaatgtctgtaaaaaatgctgtgttaaaaaggaggacgaggataagggaaagattcccatccttttacagcaatttttgttggctgc

SEQ ID NO: 52101 - DNA, 392 bp, Glycine max
  Clone ID: PAT_MRT3847_18060C.1
gggtttgcttttttttttttttttttttttttttttttttaaaaaataactggaaaactcttttttgcattcggggcaatcatataataatttcatgcgcgaatctggattatagcagccgggaccggaattcaaaactttggattgtctcctgcaaatgccgaaagagaaattcaggcatggaccttatacaacatcgggaggctaaggagcctgacattaaaaaatattggccttataccaaaccacttttgaattggaaggggatttaccgggcaaaataccataaaacccttcccaaccaagcaaaaaaggtccccaaatcagggatgccaagggcccttttcattttaaacccaaaagatccaaaaaccattttaaaattaaaccta

SEQ ID NO: 52102 - DNA, 1606 bp, Glycine max
  Clone ID: PAT_MRT3847_18061C.1
tccgagcccgcgacaatacaaaggatgtgtttgttttcaacacaaggggactcacaaccacaacaaggcagcagtgcgaagagaaagaaagagaagaagcgcttatcgaactcggacggaagcactgagttaactcagagcgagtgaaagtgttgctgcgtgatgtctggtggtattcgcccgtggacgcctcaccgaggagcgcaagtctgtggcggaagaaccatccccatggttttgttgcgaagccggagacgctgcccgatggaaccgtgaacttgatggtgtggccattgcactattcccgggaagactgggactgattcggagggtggctatttcctcccttgcgctggactttagttaatactacccaaacaagcatggaatgggtatgttccaacaagggcaattcccaccctaattgttaaggcttctgggactcattgcttgtattattcttaatgaggatagtttgtggcgaccaggcctaacgaaataagctcatgatttgtgctattcaaatataagttgcatccgagtgcatctaggatttgaaccggagtattaatttaaactgcaaaaatggcgaaatatcggagggttttagtcctcacaatcatccactcttccacagtcaactttcctttccttggtagtcaacctgaagaactcatcctcagcagcatcaacacacacaccattcacatcacaaatctctccctttggcgaaagaggaagcaaggtgtgaatcacgggatccgatttcaccagcgacacgaacttggtgtatagaagctccaccttgtcaacctcttcactcacaaagagtgagaaaacatcatcagcaatggcctgagcttccttagcagttggaagtgtgccaccttctagaaacctgtcaaccggaatataaggccttctgatgaaataagagttacccttcttgccaacacttatgacagtgaattccaagccaagctccttcaattccctgattctagcctcagctttctttatgattgcgttgttgaaaccgccgcagagaccacggtcgccggtgaccacaacaagtgcaactttcttgacaggcctaacctttgtgagagggatgtctacgtcctcagttaggagctgctcgttgatgttgtagaggacttcaacgagggtctctgagaagggtcttccgttgacaacagcttcttgagctcttctcactttggctgcagccacaagcttcatagcctcggtgattttctgagtgttcttcacggaatcaatgcgggttctgagttctctcagaccacactgaatttgggtggttgaggagcgtgaaggagtgcatgaagttgggttttgtgaagggagctgaaaagggttgaggacagagcggaaggagagattggagggatcggaaagggaaggttttgaggacaccaacattgtgagattggagcaagacattgtttcttcttgttcttgtacttgctgaggatgttgaagagggtgtgaagtgtgtggtttggttgttttattttgagatttttttttgctttgtttcttgtgtgtttgtgagtgagagagaggggggggtcttatcctctcc

SEQ ID NO: 52103 - DNA, 250 bp, Glycine max
  Clone ID: PAT_MRT3847_18062C.1
ggctgaagatcctcaagacgtagccgatagggagcgaattttcaagcgttttgacgccaatggcgatggccaaatctcttcagctgagcttggggaagcactcaaggcccttggatcagtcacagcagaagaggtgaaaaggatgatggaagagattgacactgatggagatggctacatttcatatcaagagttcacagaattcgccaaagccaaccgtggcctagtcaaagatgttgccaagattttt

SEQ ID NO: 52104 - DNA, 322 bp, Glycine max
  Clone ID: PAT_MRT3847_18063C.1
gccccatgggttccattggtttttttttttggaaaaacagtcttttcgctaagcgcaagcctcgcgctaagcgcattttttgtcatgcgctaagcggagagtctctagcgcttagtgctgaacccttgcatcacaggttgatttggtccgctaagctggccaaggctgagctaagcccatttcaattcgatctgaattcggctaagcgatggcctgctcgctaagcgcaacacgttgctgctaagcctaattctttgcggcctaaactggggttcattgagctacgcgctactccccctctgtcgtcttctcgcagcccgta

SEQ ID NO: 52105 - DNA, 1708 bp, Glycine max
  Clone ID: PAT_MRT3847_18064C.1
tcctgtatagaattcgtctcttcttcatctccctccttaaaccctaccctacccgtcgcccatggcttccgagaacgtaagcaccgatacggtgtccaaagccgtcgacgctctcctgaaatggcgtcgctcccaatctgaaaccctaaaaccaaaactcttcgacgaagacgaggaatatgtgtacctgatcctgacgctgaagaagatcccttcaaaatcccgcgtgaaccctcacaagattcctctcccccactccctcttctcccctttctccgagcagtgcctcatcctcgacgaccgcccaaacaaggcccgcgtcaccaaagcccaggcccaagcccgcatccagtcggaatccatccccgtcaacaaaatcctcaagctctcgaaactcgcctccgattaccgccccttcgaggcgaagcgaaaactctgcgattcttatgatttgttttttgcagagaagagcattgtgccgctcctgccgcggcttctggggaagagttttttcaagaagaggaagattccggtgccggtggacctgaagaaggggagctggaaggagcaggtggagagggcctgctcgtccgcgatgctgttcatgaggacggggacctgtagtgtggttagggttgccaaggtgaggatggagagggatgagattgtggagaatgtcgttgccgcgattgaggggattgtggaggttgtgcccaagaagtggggcaatgtgaggtcgctgcatttgaagctgctggagagcgtggctctgccggtctaccagactgttcctgatgtgaagttgaagattgagggatttaaggttgaggagaagaagaatgagaaggagagggatggtgaggttagtgattcgattgagggagggacggagaagaagaagaagaagaaggggaggattcatgaggttaggtatatggatgagaatgttgtggaggctgggatggaagatgaattggcgagtgatgacgatgatagtgaagatgagatggtgagtaagaagaggaagaaaggggtttcgagtgagttgagtggtgttgagcaattgaagaagttggtatttaatgagttgagtgccaatgggaagaagaagtcaaagaagggctgcttgtctgttgggaagggggttaagggaggtttgattgaggggagtggaagtgaattggttgtgaaggatgaggagtcgggggtgaagaaggagtgaagaagaagaagaagaagcgagaggaagtgaaggcaaaggctactaaaagtgtaaaggctacgaaaggtgtgaaggctaagaaaattaaaaaggctgcgtgagttggattagtggttgatgttagaaattgcagcttgatgtggctctgtgcaagcttgtgtggttctgcttgttgaacctccagcggatttttgttttagaccccattattatggtagttgtgttgtgtcagttcagttcgtcatttctaattcaaatttactatacttgaggtttagaatgattgttaaatgggtaaaaatctaaatgttgcatcccgacaagtttagtatactaaagatatttagatattgcatgttgttggagatcgacttggaaattgagatgagaagttggtgttttactaagtgaaagtgtatcaaggaaatgttaggagaatgctgagaacagattaatgctttcaatgggttgagtgttgtttcctct

SEQ ID NO: 52106 - DNA, 479 bp, Glycine max
  unsure (1)..(479): unsure at all n locations
  Clone ID: PAT_MRT3847_18065C.1
ggctcgaggttacaagtggctgacagtgcaatatatgccattgcacaatgtgctgaaactttcacacaagacatttgttcgagttgtttgtcaattgaacaaagcgacatacaaggttgtcttcccaatacaaatggtagggcattcgatcctcctgggtgctttctgagatactcggggacacccttctttgctgataatcaaaccactgatatcagtcgcttcttaatacaaggagaaagttcaagcaagaagtgggtcatttttggtggaggtgttggaggtgtagtccttgttgcgatccttctttcattattaacctggcatagaagatcccaaagtcccaagagtgttcctagagcttacaaatttggagcaactgagttgaaagcagcaaccaagtacaattatagtgacttgaaagctgcaacaaaaaattttagtcagaaaaatatgctangagaaggagggtttggcgc

SEQ ID NO: 52107 - DNA, 336 bp, Glycine max
  unsure (1)..(336): unsure at all n locations
  Clone ID: PAT_MRT3847_18066C.1
gggcaaggaagagttttaagaactttgaatacctgtgctacctttccccctgccaacgaattntgttactgttcaccagaacttgttggacataaacttgtaccgaattccaagttatggttcatcatcatgttgagctctgatcattcccatccagcttccacaaagaacagaaagaaacactttgtcccttccaccatagtccaacacttctattgtcatcttccactttcatctcccagttactttcatacttcctcagcaaagctctacctccatctattgcatcttctccaaatacttcctccacaaaccctgcttctttcattctctcac

SEQ ID NO: 52108 - DNA, 467 bp, Glycine max
  Clone ID: PAT_MRT3847_18067C.1
atcggcacatgcaaggcgaaaccgggcccccgggtcgacactcttacggcggccgcccttgtcctttttttttaaattactttgtttaccagtaagaattctcatgatctattatgaatgcatacgtcaaaaaaatcaaacgacttacaatgactatttggaacctgaaagaatgagcacgggtcaaagacacctgtaacccgaagggaagaaaaattaatccgattgtgaaacagtcctctaggaacggtgggtgtgacattggaaaggttgctaagcaaacgtgtgttgcgcactactgctaaaaaaacctgtaccctttgactaaagctagagagtggagtgaatcaccttcaacgctgtttccccataagttcatccataaccagaactgctaaatctgagtacggtgagaaagcgcacatcgatgagctcttcaggactttacaacatatccaaactgttag

SEQ ID NO: 52109 - DNA, 291 bp, Glycine max
  Clone ID: PAT_MRT3847_18068C.1
gaacactacaaaaagaacggggccgtttaataaaccaacccgactcaacgcaagataggcctgaacctcggtgcgcttaacaaatatggaatctggggctccgccatacacttcacattaaacctcagctaattaaacgagtcttactcactcgtcacccaagagggggggcctgggaccaccagattctaagatggtggcggggacctacaactttggacattatacaagcgacctatatgaggtacacatgaatacggcctaaaatccggcatttattaggaccaacat

SEQ ID NO: 52110 - DNA, 569 bp, Glycine max
  Clone ID: PAT_MRT3847_18069C.1
ttttttttttttttttttgaagatgaaagttgaaacctgttatatataaatgaaacaactctatgctaagccatgaatttgggaagacatggtttgtatgcaaataagtagtaattaatttattacattttttctcaatatcaataactgttgacaagaaattacccattattacaaaagaaaattgcgaactcccgagtggatagtagtgtgactaattaagtagcatggatctctcgtaattgtaataggattgttccaaaccatataactctcacaagacaacatatgcactatatgatagtcatcacacataaaggactctttttgaggaacatccaaatatggtttagctaaagctccataacctcatgcatgcatgcttaatgtttacctccaccttcttcaccaacaccaacaccaccaccaccaccaacaccaacaccatgaccagcaccagctccaacccctactccaaccccaatcccaataccaatcccaacgcctccaccacatcctagaccaccaccattccctgcaccacctccaacaccaccgccaaatccgga

SEQ ID NO: 52111 - DNA, 209 bp, Glycine max
  Clone ID: PAT_MRT3847_1806C.1
cttccaaatcagaagggggggggaggggaaatgattcattctctaatgatttcaaaacccattcaagtgctccttctttgcacttttgctttattttcagacgttgtatttgccgatccaccgtataatatttgttccacaagcatcatttatgcaaaagacaggtccttttgaaaaccaatctaaccggaccttcctttgccttcttt

SEQ ID NO: 52112 - DNA, 259 bp, Glycine max
  Clone ID: PAT_MRT3847_18070C.1
gttctgggctttggctttgagttatgcactcagttgttagctagcttctacatgctcatgcacctgaaactccaaccggcaaactcactacctccatgcgaaggagcattatcataacttccgtcatgccactgggattattacttccactaatagaggtggaagtccctcgcatcaatagtatatcaccagcatacactcctaccatgttgcacgtgcagcacccaaactctcacctttaagatcacaacctcaacgt

SEQ ID NO: 52113 - DNA, 178 bp, Glycine max
  Clone ID: PAT_MRT3847_18071C.1
gggacacaaaatcttatattctacgatcgaaaaactggcagagaattatggatgtacatcttcgcaacttgctcttgcttggattcttcatcaaggagacgatgtggtacccatccttgcaacaactaagataaaatttcttgatagtaatatcggttcatgtgatgtgaacctcagt

SEQ ID NO: 52114 - DNA, 1359 bp, Glycine max
  Clone ID: PAT_MRT3847_18072C.1
actagattcatttgagattgttcttgcaggtgctggtggtcacagtaaggaattggatggtgaaagtacccttggattctgatgagttgtatgaaatacaaagtcatgaatctagtttaaagaaaaaactcatccctcacactaaccaattcagggttctagacaaagctgctgttctacctgaaggcaatgaggcaaggagatggaaagtctgcacagtgacacaagtggaggaagtgaagattctgacaaggatgatgcctattcttctaagtacaatcatcatgaatacatctttagcccaattacaaaccttctccatccaacaaggtaccttaatgaacacatacattggcaaactgaacatcccagcagctttcattcccataattccattagtattcatgacccttctgataccggtttacgaatttgctttcataccacttgtccggagaatcactggccatccgaatggaataacagaactacaaagagttggggttggccttgttttgtcagcaatctcaatggtcatagcaggggtgatagaggtgaaaaggaagcatgaattcaatgatcacaatcagcaccgaatcagcctcttttggctctctttccactatgcaatctttggtatagctgacatgttcacattggtggggttgttggagtttttctacaaagaagctcctcaaggcatgcgttcactttccacttcgttttcctttctttccttgtccattggttactacttgagcactgcttttgttgagctcatcaacttggtgactagtaagattggcaagagcaagaaagggtggctagagggacgtgacttgaaccgaaaccatgttcaattgttctactggtttttggctatactcagcctgattaactttctcatttatctgatgtgtgcaaaatggtacaaataccaaagtgttgtaccatttgataagggaatgttgctcaaagatccacctcctcgtaatgatgaaaacgtgtactctactagttttgtatccacggttcaaaacattccccagaatgaagataaataaaccagaaaaatccactctcacgagaaattattatatggtccagaatcgcattattccaacttccaactgatctacacatgacatggaattatatttttatcagtttgttaaaaagaattaataatgtgtcacgtggagattggttaagattgtatagaatagactatacaataatttatacccactgaccatcttcattattgtactttgttgtgattcctgaaactgtatctttgaaaatattcttgtcaaccattatgtattttgtaatatcaattcagattatttcgcgttc

SEQ ID NO: 52115 - DNA, 241 bp, Glycine max
  Clone ID: PAT_MRT3847_18073C.1
atatctgcagaattcggcttaagcagtggtaacaacgcagtttacgctgtggtgaatgatctacattcactgacagctcagatcaaacttcatctcttgatttcgatatgggtttcatccaatttccaaattccattaacttctaacaccaatcgttcccaacttatcaagattttacacttcttcctatcttcgctattttcttcctcactgttcgttttttcctctacaggttcatttt

SEQ ID NO: 52116 - DNA, 238 bp, Glycine max
  Clone ID: PAT_MRT3847_18074C.1
atcgcaaggaggaaaaacacggacgaaagggcagtgaagacgagaaagagagagagttggcttctgatacagccaggtctggaaatatagttaacgaggacaaagacgttgaagaaggaagacgaggacacgaaagtggtggtggtggtggtgttcagcatgagaggaagtgtgcaacgaaagttgaagacaagtagggttttggggaaaaggctgaactcgagggaataacaatagt

SEQ ID NO: 52117 - DNA, 2027 bp, Glycine max
  Clone ID: PAT_MRT3847_18075C.1
gccccctctcactcactcccactcccacacttcactccattccactcccaatcaaaaacaaacaactcatcttcccaaattcaaatcacacacacttttctctctgtctctcagattagagttggggttagtgtttggttcgatcatggcttcgtcttcctccgatccaggaaagtccgcggagacgtcggaggcggcgttggtggtggcgaacgaccagctcttgctctacagaggattgaagaaggccaagaaggagagaggttgcacggccaaagagcgcatcagcaaaatgcctccgtgcgccgccggcaaacgcaggtccatataccgcggcgtcacgaggcacaggtggactggtcgttatgaagcgcatctttgggataagagtacgtggaaccaaaatcagaataagaagggaaagcaagtttatttgggggcgtatgatgacgaggaagcggcggctagagcatatgatcttgctgctctcaaatattggggtcctgggactctcattaactttcctgtgacggattatacaagagatcttgaagaaatgcagaatgtgtcgagagaagagtaccttgcatctttacggcggaagagcagtggtttttcaagaggactagcaaaatatcgtggactctccaggtgcgaatctatcattttttttgctgaaattgtttggcagttaaattattatttgtatccacatctgagtctgtgtggggtatgtgtgtgtggagctagttcttctgtgctctgctacacagcttcagttttttatgatctactttagctgtcataaagtacatcgattccaacatggatttgactgctaacttaaactcttcatttcattttgcatgtgttgctaccaaaactagtcgatgggatccatcgtatggccgtatgtctggatctgattacttcaatagcatgcattatggtgcaggggatgattctgcagcagaaagtgaatatgtaagtggtttctgcatagaaagaaagattgatttaacaagtcacatcaaatggtggggatctaataagagtagacattctgatgttgggacaagattatcagaagaaaagaaacttggttctgctggagatatttgcattgaaattaagcaattggagcagaaagttcaacctacagcaccttaccagatgccacagttaggaaggccccaaaatgagaaaaagcatagaagttcttcagtttctgccttaagtatcttgtcacaatctgctgcttacaagagcttgcaagagaaagcgtcgaagacactggaaaatatcatagataatgatgagaatgaaaacaaaaatacaatcaacaagttggatcatggcaaggcagttgagaaaccatcaaatcatgacggaggcaatgaccggcttgacattgcaacgggaatgagtggaacaatgtctcttcaaagaaatgtttacccattgacaccattcttgtctgcaccacttttaacagcctacaatactgttgatccattggtagatcctgttctctggacatctcttgttcccatgcttcctgctggcctttctcatacagctgaggttacaaagaccgagaccagctcaacgtacacgatgtttcggccagaggaatgaatggttggacatttggatttccaattgaagaagaaaggctcaaaggcaagcatctgaaagctgagcttgtaccgaacaaagaacagaatataggtctgaagtgctcaaccaggtctaagagaattctcccatggcttttttttgccagattacatgggttatagaggtcagagaaaagaaaatatttacatcgatgataaatatagaattagcacgaatcttttcatttcaagtcagatatgtatcagttgacatctctttcatgtatatgcagtcagagttatagataaattttgaatttacgcggaatattctgtacagaataagaggtggaattatgcaaggacgtggtaattaatttaattgattagcgtatggtttttttcaaa

SEQ ID NO: 52118 - DNA, 422 bp, Glycine max
  Clone ID: PAT_MRT3847_18076C.1
tttggcatctcaatatatatataacaacacggggatggtaatagaaagatagagatccatcaagtctacgttgaaatttattgctacaaggtagacagaaaacgataccaaatctataaaatgtatggaataaaaaacacataaaatgaaggtaaaagaaaagaaaataaaaacgatggctgtttttttgctaaagggaatttttgtatagtgaatacaagcaaacaaacaaggggctagaagaaacatcttttgttatcatgcaatttgcgaaataattaacttccccattgaacaatatgatgtttaaggggttagccaaccaactcatagtgaaaataaagttagcaatttcatgtaaaatacatcagtataaaaatctatttaaatttggattcgcttgtctactttactttaataat

SEQ ID NO: 52119 - DNA, 899 bp, Glycine max
  Clone ID: PAT_MRT3847_18077C.1
ttttccaccctacacttcttcacactcactcaccaataaacttcttccgaggtcaatcatcgtgcgactcggtggctggtggattttgagagtggctttgatttaatcccagcacttgtggatggtttacatggcagcatctcgaggaggggttcataaacttgtatccttctctcagattgaaaaactagtttcctttgtacattgcaaacaatatctgccaccattgcttgagactgtgcgccattttagctttaccgatgattgcagtggcagaagcaaacaacctgttggagaatccgatgacttttttcttcaacagtcagactcaagttttaaagataatggagaatctgatcagtctttgtcagaaccaattccaagtagacctttgagaagtaggaagccagttaatcagcctcctccacgtttccaagaatatgatagagaacacaaatgtggcaaaaacgaatagggatgctggccaatcaggagacagtttccttaataaattcaagcttggttttgatgataaaacagtgaatctgtcagaggttgcagcaagtaagcaatctgaagaagcaaagaggtcaaatcccaatcaaccggctcaagagtctatgcctcaagatgctgatgagatcttcaagaagatgaaggagactggccttatcccaatgctgtagctatgctcgatggtctatgtaaagatgggtttggttgagcattgaaactttgtttgatgccgggagaagggggttcccattccttcccttcgagattttatgacaaccatggtgggcctgatgaattggaccaaacgaataaatcttccaaaattgatcttgcatttcagaacacaaatgtgggcaaaaacgaatagggatgcctggccaatc

SEQ ID NO: 52120 - DNA, 739 bp, Glycine max
  Clone ID: PAT_MRT3847_18078C.1
gttggatcatggcaaggcagttgagaaaccatcaaatcatgatgggggcaatgatcggctcaccattgcaatgggaatgagtggaacaatgtctcttcaaagaaatgcttacccattgactccattcttgtccgcaccacttttaacagcctacaatactgttgatccattggtagatcctgttctctggacatctcttgttcccatgcttcctgctggcctttctcgtacagctgagaggaagagcaaccctatggcagtataactttatcagacaataataaggtggcggggacaataattgttcaattcaaaatcgtcagttacacgaaacaattgatatggttacaaagaccgagaccagtttggagaccagttcaacgtacactatgtttcagccagaggaatgaatgattggaaattttaatttccaattgaagaagaaatgctcaaagaacagaatataggtctgaagtgctcaaccaggtctaatagaatgctcccatggctttttttgcaagattacatgggttatagaggtcagagaaaagaaaatatttacatcgatgataaatatagaattagcacgaatcttttcatttcaagtcagatatgtatcagttgacatctctttcatgtatatgcagtcagagttatagataaattttgaatttacgtggaatattctgtacagaataagaggtggaattatgcaaggacgtggtaattaatttaaaaa

SEQ ID NO: 52121 - DNA, 1139 bp, Glycine max
  unsure (1)..(1139): unsure at all n locations
  Clone ID: PAT_MRT3847_18079C.1
tttggctggagcataactcttatgtttatggatgcttctttggtacataacttgatctgtagataagattaggcatttagcatgtatggtgtgaagctcgtggtctttttagtggggtttcgtcaactgctaattattttggtttatttatacttgctaggtgaagtttttcagtgttaatgataaaaatgttccttgacgcagatttgatattccagttccttcaatcaagaattattttacatggtttaagttttagcaaataactgcttgaaaacatttttttctattcttgccagattatcagttctaacttattaaggatgatgttagatagaattagcattgtagcttaacttttggatttgtagttgttaattcattggcaagtgcaccaatttgtccaagtaatatttaaaatggtaagactgagtatcgagtccacagagactttgactgtactcaaagtttgtatatgtccaattttaagcaatcaatgaactaaattcgatattggtcaaataatgacatggaatataaaattcgacataaatgaagataattaagcggggcacattaaagatcgtttgccaacctggacaaacctacgggtcagacaagtggagctaaacgactcaagatgccctttatgtaatagctcggaggaagatgcagcacatctatttttccactgcacaaaaacagaacctctatggtgggaaactcagtcatgggtaaactctttgggtgcattcccacataatcccaaagatcactttctgcaacatgacaacaggtctgctggtggagtannngctagaagatggaagtgcttgtgggtagcactcacatgggtcatctggaagcatcgaaatggggtagtatttcataaccactcttttgatggaagcaaggtcatggaggacgccatattgctaacttggtcatggcttaaggttatggagaagggattcacagggccatttagtttctggtcctcacacctcaaagcagctttctaattctagggagtgataatatgtgtaataggttcaaatagctgtgcagggcatgtattttttcttacgttttnnnncagatgcttaatgctctgaatctgttatcttcatacaacctac

SEQ ID NO: 52122 - DNA, 147 bp, Glycine max
  Clone ID: PAT_MRT3847_1807C.1
ggctcgagctctaatgctagctaataccaaatttgcaatactcaagaaggaccaacccaaaagacagggcgggtcataatcaagaaccacccccctgcatacagcggcacgacccacccaacacgggtaaacaacaacgaggaaagc

SEQ ID NO: 52123 - DNA, 332 bp, Glycine max
  Clone ID: PAT_MRT3847_18080C.1
actttatttaacagtcaaattttttgaagattatattttgcagtttgcgttgggctttcatccgggagaagctgggtgtaaacccattcttacttcatatgtaattactaaacatctatagctattatgaaattttttaaactctttctgatattattatttatacaattcattattccataggtaattaaccctttatttttcccttacgctttgattaattcacgaattttttaatttagttgcacccttcttttaattctttaaattgcattttcatttccatattaatttcttacaaattttattggcctacttgagaagtaatatat

SEQ ID NO: 52124 - DNA, 399 bp, Glycine max
  Clone ID: PAT_MRT3847_18081C.1
gaactaatttcctggggcttcagggtacgccttattaggaaaccaaatatttccatttatttattaacctttttggcctcctattggcctggaaaaggtggattgggattcccccggggattcccaacccaatttctttggctttcaggttgggcttaaaagaaaaccaaaaatttccattcattttttgacatttttgccttcttatttcttggaaatgtgggaatgggatttcccccggaaattccattttaatttcttttggtttatgattggcctaataagaaaaccaattattcccattcctttattaacctttttggccccctatttcttggaaatgttgaaattggatttccccaggggattccctttaggccacctgccggccttccacct

SEQ ID NO: 52125 - DNA, 328 bp, Glycine max
  Clone ID: PAT_MRT3847_18082C.1
tttttaagtgacacatgcatatatattatatatagagaatattaggggaaagcaacaacttttgctttttacacaaattgagctaacaggacactaccattatttttactaccttctattagtatataactattattagcctttcagtctctatttatccattatgactcttttccttgttaactgcaattccttaaatttatttcaagtaattactccaactttcacgcataaaatataataaaacttaaattaatataaaaattgttcatttcttcaattttgttcagaacaaaagaaattattttcctcattaattaagctttat

SEQ ID NO: 52126 - DNA, 574 bp, Glycine max
  Clone ID: PAT_MRT3847_18083C.1
atattccacagagagcgttccagtgagtgatcttcgccacttgatgacatctgacgcgaaattctcatgcattcttctcactcttcctttgcaaaataagccgatcgaaaacttcatccacctgaggtctgaagaaggtacatcgcgcccgtgacgcatgaaggaggcctactatcgacatgatcaccacctggacctctcggaccacatgaatcagcaccggcatcaactgcaacttgctgagcgacctgctttccgccactccggtcgagctcatgtgcatgttgatcttccatgctttcacactcttcttctgcctatgcgtcatcttttacttctatcttgcaataacgtggatcccggcgattctatactacgctatcgtgtctggtgacactttactgattccaacttatatttatgcgccatcttccatatacactgttcctacatgtccgacactactctacttctctgcactacctcacactgtgtcgcttgtacactttattggctggcacatcagttgcgagcgcttcgtcgataggagagattatatggcctaatgcattgt

SEQ ID NO: 52127 - DNA, 509 bp, Glycine max
  Clone ID: PAT_MRT3847_18084C.1
ctcgagccgaatcggctcgagggcctcaatgatgatggagtagatttgactaaagatagtgtgtgtgggcatgtgtgccaaagtttggccttagggtaccaggtgaaggctgagtgggagaggctgatccaaatctaggtgtcccgcgttgaaaaagaccatcagctggctaatagaagtgaaaatgctaccagaaagatgccactatagaagtccagaaaccaaaggaaaatgcagtctacaagtttttttttaatcaagtggcggtggtgaactgtgaggaggataaattcttgttaggttgtagataccatgttaagggaaaagagaaaaagaggtgtatgataaaatatgcgatccactagaccacatagagtgaacaatatatgcaaaaaaattataagtactgagtaagtttaaaaagttactctcaatctgaaccttttattttaagccaatggctcagatttaatctctaaaggtccacacgtgacttcttctcaaatcta

SEQ ID NO: 52128 - DNA, 432 bp, Glycine max
  unsure (1)..(432): unsure at all n locations
  Clone ID: PAT_MRT3847_18085C.1
gaagggaggctcctgtagagccgccgctttttttttttttttttttnttntttttttaaaaaaaccaaggaaaaaattggggggggccattaaaatattgtgtgccacaaaaacgaccgaaaaactaaaagctaatcgtattcctattacataaataggattacgaacaagatagctgattaaaaattcaaattgtccttttaacataagcaaaaacacactgaactattaaaaataacttcctttttttccaaatttaaattaaaaaaaaccttttacctctttaaaattaagggaaaaaattttacgggatctttaacggaaagggatcttgggtaacccgctgaaaaacaccaatggtacggaggagcgtgcgttacaccaccaccgggcgcagtataatattggaattattccaccaaatttttccaa

SEQ ID NO: 52129 - DNA, 388 bp, Glycine max
  Clone ID: PAT_MRT3847_18086C.1
tccagtttggaattgcggcctttatggaatcctcccgtgactaagaagggccatcacaaaatagaacttaaggtaaatgcatcaaccaatttgtttgcaatggcagttggcataaaacagaaagatcttgtgagcaagatggttaaaaagtttatagacagtaatttcgtcgtgatgctcttccactatgatggtattgttgacgaatggaaggatctcgagtggagtagtcttgtcattcatgtgtcggcaattgatcaaagcaaatgaatatgattatattttcctttgggatgaggacctaagagttgagcatttccatccagataagtatgtttctattatcaaacgtgaagggctggagatatcacaaccagcactggatcct

SEQ ID NO: 52130 - DNA, 633 bp, Glycine max
  Clone ID: PAT_MRT3847_18087C.1
actgctaatattctcataagaaactaaggtaatgtggcaccactccctataatacattgtgctgcaataatgagtacttttacacaactaaatacttgcatgacttgcagtggtaatacgaaatggtagttcaatacaacagagtcctacagttagcttctattcaaccactcattttctctcttttggaagggagcgtaggaaagttagaacaaaatcatgaattaagtttgaactaagaatggagggaagcaaccttctgtgtcaactcatccagaatctcattgttgacctctctaagtggctcctcctctgaaactttactttgtttcacatctatactctttgaaccactaatgctggcactcttcaacaggctccgtgcgctgcactttggcctggagggtccattttgtgcatctgtatttccagaatctgtcacatcaaaccctggaggactctgaagatttgctccagttggattttcaacatcattgttttgattattttcatccttgggagcaagaactcgctctctaggtaaggaggcgtggtgcctcaacaacggtgtgcttcgttcacctttgccataatgctcctcaagatgtgcaaactgtcgcttgaaccggtcaa

SEQ ID NO: 52131 - DNA, 881 bp, Glycine max
  Clone ID: PAT_MRT3847_18088C.1
gaggggatatgaaatagggatctggtgagggtggaggcgagggttggttcatttgatctgcgagtggagaagagaatcgtgatgggaggaggacacggtcacggcaccacctacaaaggagttaccgttcatcacccaaagcgctggcacactatcaccggcaagggtttgtgcgcggtcatgtggttttgggtattctacagggcaaagcaagacggtcctgttgtattgggctggaggcatccttgggagggtcatcacgatgatcatggcaagggccattaagcattccttaggcatgagctccaagaacaggaagaacagaatttgaagtgtctgttgctgtgggtgtgctgttagttgaaatgtttactttgatcaattcaataaatttggctgtaaaataagagatttctttttgcgtggtttcatgagcattagatatgattgtgcatgttacctgttaactgggatcaaagtcatgtctatgtttggttggattattaaccatttcgtcgcttttcttagaaatttatgggagttgactcaatgtgtgtgtcaactatgatagacgtgtgtccgccagttaacaaaatgttgtagtgctctccgtttgtgctaacctatgcttaattgttttaatgggagcataatttgttcaccaaataatatggattttttggaagagtgcgccagtaccaattcatggcaatcgccttaatttgatcgataatcatctttggaatgatgaaatttgagacagcaattgctacatatgtatacgattttttacatgatgaacgggactatgtgttatgctgaataattgtaaagtgtaacttatatgcccaacaaatataaagaaatgacatgtttctccg

SEQ ID NO: 52132 - DNA, 1355 bp, Glycine max
  Clone ID: PAT_MRT3847_18089C.1
aatgaaaggttaaacaaatatgcaccaaactcaatttgaggtgaattatttttccccatgaagtcatgcttgcccttgagatgctaaaaaaatctcctataggctattttaactactcccctccccatgatcaacatttgttttatctgccaattgaatcagcgacacgtcacatctcagggcatgttcagcaaaacaaaacacatcttacagttattcagcataatacataaccttggtgtcatcatataaaaaatcctatacataatagcaatttctgtctgaaatttcatcattccaatgatgacccctcttccaaatccatttcatgtctctccaacgaaataaaataccggattcataaggtaacacaacatgaagttctttgaaataaacaaaaatgcactataacattgtgttgtcaactggcggacacacgtctattatagttgacacacagacattgagtcaactcccataaatttctgagaaaagcgacgaaatggataataatccaaccaaacatagcatgactttcatcccagttagcaggtaaggtgcacagacatatctaatgctcatgaaatcatgcaaaaagaaatctcttattttacagccaaatttattgaattgatcaaagtaaacatttgaacaacacatccacagcaacagacacttcaaattctgttcttcctgttcttggagctcatgcctaaggaatgctaatggcccttgccatgatcatcatggtgaccctcccaaggatgtctccagcccaatacaacaggaccatcttgctttgccctgtagaatacccaaaaccacatgaccgcgcacaaacccttgccggtgatagtgtgccagcgctttggctgatgaatggtaacacctttgtaggttgtgccgtgaccctgtcctccccccatcacaattctcttctcttctctcagtcgcagatcaaatgaaccaaccctcacctagacagtcgatgatgctaactagtgattgttgtgtttgtgtggaatttaagaacaagctaggtagtgtatgtctagtttgatgtgtatggagaatattagatcaagcggcactctacgagagtagaccccatgcatggatcaagtcaatctggatcatataccaaatgcaacgccaagcagctcttgagaaaacaggagccatcatttcaacccaccctgtgcaagaaggagcagtgctacttccatcacaacgttttccactaacaccacttttgtaaatccttctgctcgcacaatgacccccagcacactcaatatagacacaagtatcaacttcaaaacttatttaataatttaatgatatgatttatcaat

SEQ ID NO: 52133 - DNA, 354 bp, Glycine max
  Clone ID: PAT_MRT3847_1808C.1
ctaatgaaaccgcctatcgcttggtgacatagctagtttccgttttgatagatgaagaccgcaggctaattttatacattaaagaccccgcctctgggcgccagaagacgctcgccatcgaacccatatctaaaactgaaatcattttgacacaagaggatgctcacgttgagccatgccatatgctctcgagctggaattgaacgactattggttagcaaataccgcgaggcgggacgaaccaggatctgcaatgcagcacccaactgtgacctctcctagagctaaactatggcgtcgcacgagaactacatgcttacggggatcttggaagcctaatggcgatcatgagag

SEQ ID NO: 52134 - DNA, 244 bp, Glycine max
  Clone ID: PAT_MRT3847_18090C.1
cacccttccccttatccttacttttcactctctttccaaaacgctccatttcaggatccccttacccttcttctgtgtctcataatctatatatacaataaaatgagaccaaccttcactcataaatacttctaacacatctagtctttcactgcttagaactctatcttccaatttatttatgtatcaacaaagataataagtctcaacatataacgaacatcaacacatcctaatttattta

SEQ ID NO: 52135 - DNA, 1846 bp, Glycine max
  unsure (1)..(1846): unsure at all n locations
  Clone ID: PAT_MRT3847_18091C.1
ctcgagccgcttttcaaatattgcatattgcttgtggctaatcaaacacttttccatgacctttgctgcttttgattttgatcacaacaacacaacgccaacgccgttctctgcttttgaaaatcagatattatgaagtcaccttctcgagctttttctggtgctgatacaaagagtagaaaatcatgtctttatgccatcttcccagcagcttctttaatttgtgctgttttatttttcatgacctcgtccttcacacacgagccgaaactaccaggcttgaaaatggatacagcagtggacgcagatcagaatgtaatagtggacacagtaattgataaatgcaagaaccagtgcaggcctaatggaagtgaagcattacctgcaggcatagtctccaccacttccagtttggaattgcggcctttatggaatcctcccgtgactaagaagggccatcacaaaatagaacttaaggtaaatgcatcaaccaatttgtttgcaatggcagttggcataaaacagaaagatcttgtgagcaagatggttaaaaagtttatagacagtaatttcgtcgtgatgctcttccactatgatggtattgttgacgaatggaaggatctcgagtggagtagtcgtgtcattcatgtgtcggcaattgatcaaagcaaatggtggtttgccaaacgattcttacaccccgacatagttgcagaatatgattatattttcctttgggatgaggacctaggagttgagcattttcatccagataagtatgtttctattatcaaacgtgaaggactggagatatcacaaccagcactggatagtaaaaaatcagaggtacatcatcagattactgcacgtgggaggaggtcgaatgtgcacagaaggatttacaaaactggtggtagtggcaaacgttgtgatgaaagtagcactgctcctccttgcacagggtgggttgaaatgatggctcctgttttctcaagagctgcttggcgttgcgtttggtatatgatccaatgacttgatccatgcatggggtctggatgcgggcaggcggtccagatatgcagctaggctactgtgctcagggtgagggaacaaaaattgttctgggagtggagaagggagacgttgtgggagagaatcgtgatggcgggagcacccgcaaagggcaccacgttcaaagccgaaagcgttggcacaccatcaccgggacgggtttgtgcggggaagggttgttttggggttttgacgggttggggcaagaccatgctgttgtatggggctgcaggtatcctgggcaggggcattacgaggatgggggctagggacattaatgatacgtgacatttgggctccaagaacaggaagaacagaatttgaagtgtctgttgctgtgggtgtgctgttagttgaaatgtttactttgatcaattcaataaatttggctgtaaaataagagatttctttttgcgtggtttcatgagcattagatatgattgtgcatgttacctgttaactgggatcaaagtcatgtctatgtttggttggattattaaccatttcgtcgcttttcttagaaatttatgggagttgactcaatgtgtgtgtgaactatgttagacgtgtgtccgccagttatcttattgttgttgtgttctcagttgggaaaattagttgatgtcaagtgctattgtggacagtttataattattgattttcaaatataaaaaaaatttatgggagttcagaacgacatataaagctagtaatgatggtaaagggtgtgataaaagcagcactgccccaccttgtacanggtggatagaaatga

SEQ ID NO: 52136 - DNA, 364 bp, Glycine max
  Clone ID: PAT_MRT3847_18092C.1
tccaggcgcacgccccacgcgtacgaggaaaactctctgcttcccctagacgatccaatcaaacgtgcgcaaacgcgcgcccgaaggaccaatttgaaagtgagaacgcaatacaaaactctggcgaggctgagacacgagagacctcggggctacccgagtgagcgagccccttgacaccactagcactacaaggcgaaattgggcaggcaaagtaaaagcaaaaaaagcgaacgcggatgggccttcccaacaaacgagcagacagaatggcgaagggaacgcaccctgcagcggcgcaataaacaccggcgggcggggtagggactcacagcgagaccgcccgcccttgccagcgaactaa

SEQ ID NO: 52137 - DNA, 264 bp, Glycine max
  Clone ID: PAT_MRT3847_18093C.1
tctaaggcgacgtactctggggaaagctggaccccatggagaacgcgttacggactttgcgggtcaaccgaagcattgggtgacaactgttgtatcgatgcgcgatacctcacgattcaccctgtaacaccgatgctgctgactgaccctgacgagcatgtgtaccttcctctgaccacatggtggacatagatggccagggatgatatggaaaagaatccctgaggaaagatgacctgaacgacctgctcggcaaagtacggg

SEQ ID NO: 52138 - DNA, 802 bp, Glycine max
  unsure (1)..(802): unsure at all n locations
  Clone ID: PAT_MRT3847_18094C.1
atcttcttcttctgcccgcgattgactcttgttgttcgctaaatgtgtagtctcatttccaagtcacactgtcacctgcgacaacaactccctctgcaacccactcgcactggcaatggaattgcgagggtgaggatgagtgggagaatggaggtggtgtgtcggggaatgttgaaacccagaaagttcatgcagaggaggaggaaattcgaggttttcaaggattctgcagatgaagctgaccagaagaattggaggagaatcatgactgaaatcgaagaatccggttctgctgtctctgtgctctctgctgagaagattaataaccaaaatattcctaaagacctcgttgttggtaccttgattaggtttaaacaactcaaaaagtggaaccttgttgttgagattctcgaatggcttcggactcagaactggtgggattttggtaagatggatttcttcatgcttatcacggcttatgggaagctaggagacttcaatggtgccgagaaggtcttaggcttgatgaataagaatggttatgcaccaaatgtggtgtctcagactgcacttatggaagcttatggaaaaggaggcagatataataatgctgaagcaatattccgaaggatgcagaaatggggtcctgaaccttctgctttcacataccagataattcttaaaacatttgttcagggtaacaagtttagggaagctgaagaattgtttgacaacctactgatgatgaaaatcacctttgaaaccagaccgnagatgtttaatatgatgatttatatgcata

SEQ ID NO: 52139 - DNA, 416 bp, Glycine max
  Clone ID: PAT_MRT3847_18095C.1
ggagcataataaaatatggggctgacagatcaaaaagactatacatggcaataatattagcaggttattatcatgtcgggttgcccatgaaacaaccacggttgtttaataaaatataatattacgatcaaagtcactgcagacatccactttaacggggcatattactgatactgggatacactcactgaatccactagcacgtttctcagagctatctgcttttcttcccaattactcattccttctcaaaccttcataaacattttcttttctcttctgaacctgttttctattctattctgaactcttgggttgcgctcctttcttctttcccaataactctaacagtgtcacacacaccactcaaagtcacaagagaaaaacaaaggtaaacaaacatcaatggctaccaa

SEQ ID NO: 52140 - DNA, 165 bp, Glycine max
  Clone ID: PAT_MRT3847_18096C.1
ttatttagaaaaaagaattttgattaaaaacaaatataaaaattggtaattagtaattcacaagattcattgaaattcaatcaaactacaaatatatgttaattaacattactgagcaattttatactagatctcttaacttaataatctagttaatataaatgg

SEQ ID NO: 52141 - DNA, 231 bp, Glycine max
  Clone ID: PAT_MRT3847_18097C.1
cctgcatcatgggattggaggaataaaggtgtcatcacccaagtgaagtaccaagggggctgtggaaacggtagggcgttttctgccacgggagccatatacgcagcacatgcaatagcaacaggagaccttgttagcctttctgaacaagaactcgtagactgtgtctaagaaagcgaaggttgttaccatggatggcactagtcatcgttcgaatgggttttagaacat

SEQ ID NO: 52142 - DNA, 167 bp, Glycine max
  Clone ID: PAT_MRT3847_18098C.1
attgatttgatcgtcaaacaggtgaatacttatatggctagtgttatacaaaatactctttaaaaagaaaagaaacatcaatctataactaacactagccatataagtattgatttgatcgtcaaacaggtgaataatgtagcatcatgtttttttaatcatccatc

SEQ ID NO: 52143 - DNA, 440 bp, Glycine max
  Clone ID: PAT_MRT3847_18099C.1
gggggggaaaggaaggagtggaacccaaggggaattggggcccgatttttaccgctttccccactaaacagaaagattttttttggacccaaacatcattattattcataaattacccccccccggcccaaaaattggggatttttaggttttttattccccctttttattggaataaaccttttatttttgaccccaagccatgcgtgggctttaaccccctcccctttttttttttaaagcttttaaaataattccctttttttttaaatcttcaacatttcatttttacaaagtttccccaccccccccgggacccttgtggtcaccccgaaatttcggaccggggcctggaggggaaccagttttcccttaagggaggcccattaaagcttgggcgaaacaggggcaaaagtgtttcccgggggaaaatggtttcc

SEQ ID NO: 52144 - DNA, 144 bp, Glycine max
  Clone ID: PAT_MRT3847_1809C.1
gctcgcctagccatgctcttcaattgctaagaacttgctcagcacattgtgtcgcgcttagcgactttattccagaccatgtctttcttatccagattgctcgttctcgttaagcctaatgcgaggcttagcgagttagtacct

SEQ ID NO: 52145 - DNA, 369 bp, Glycine max
  Clone ID: PAT_MRT3847_180C.1
ctactagtcggccgtgtcgtcctttttttatctctttttaattttcgcaatgtatttactggcactcgttaatttcttgataaaacggtataccctgccttattttactatattgagcacgaatgttcatctaaaatcaatgtatggtgcctactaatgacaccaaaccaagaggcgtcgttccaggaccgtgacacaactggcaatgcttgaacatcacggacttgcgttatcatcccttgtggtactctccaattgacggaatgaagcagattacctggaacaggtgatgatattacggctggcataggtaaaccttggcaacttctgcaacctgttccaaacagaattacatggaaacattggcca

SEQ ID NO: 52146 - DNA, 668 bp, Glycine max
  unsure (1)..(668): unsure at all n locations
  Clone ID: PAT_MRT3847_18100C.1
atagtaaatgcataataaactcgaattgctgacattgataaagaatataaattacatggaattagttttgtacatttgataaggtacggtactaaaagcaaaaaaaaatcatataaattgcacagattagttttatgtataactgactgattattgaatttcaacacagtcctcctcctcgtctatctccttgtcccaatccaatgacaacgaggtggccgatttcatcaactctgtcagtccagtgacatcctctaggaaggtaggataattaattgcttgaagtatgaactccattccttggtttcgatattctgatacaacctgaatgattgcaattttaaaatcatgtgataaagaaaatggtaatgataagttcaacaggctaaagatcaactgagatgcaaatagcagatcctcgtgtatatccattaaactttgctgcataaagctaggcaaatgaggacagtacacacgctactagnaaagcgaactctgatcagttctccatgcaacttttgtccccaaatttccagcatagtgattatttattgagtgtttgttaattaaaatacacaaaagatataaggacataaaagtgttttgataattgcaagttataattttgataattacagccccaaatcttccctctattggctcaattc

SEQ ID NO: 52147 - DNA, 422 bp, Glycine max
  unsure (1)..(422): unsure at all n locations
  Clone ID: PAT_MRT3847_18101C.1
gattaaaatgttgaaaaattatgtatttctttaatggaagaaatacaatatagcaggatatagtaagcttatcttcaatttaggatggttaaacaaatgacttacgaacaatgttcaagatgattcataagtatgttttcttgattggaaatatatcaccgaggacatcctattatcctacgttgtnctcccagagatggccttcactactaacgcaaaaatttgaaactgccactcttgaccttgtatattgtagcatctctttaagcaaacatataacttctcaaaaatgcaatcgtgtgtaacacactattgtaccttttatcttgtctgccaattagaacattgcaagtatatggtttatctgtctctttctttccatcttagcaaccggtatccttgagaatatgcggaggtcctct

SEQ ID NO: 52148 - DNA, 243 bp, Glycine max
  Clone ID: PAT_MRT3847_18102C.1
actcagcacccttccattagtgggaagaaaaaaaaaatccatcattgataatgcttaataatcatcacacgtaaataatacgcatacacactaacacagtttggtgtcttatgaaaaagtttcaaaagaaggcagaccaagtctaacgctggtttgacaaagaccctctctttctttccatgtttttcggttcccttatccctcataaagctttgttaacatccatacaacaaattagaaaag

SEQ ID NO: 52149 - DNA, 242 bp, Glycine max
  Clone ID: PAT_MRT3847_18103C.1
tatgattttttttaccgaagcagaataatttgagttggatcatctcgcccaagcgaccaaactcgcctgggcgatgttgtattctacaaatacgtccagcagcgtaaaagagccatattattcctccttatcttcccctaaaatactccccccccagtttatcactctcctccaccacctcctaccaacaagccttacatctatgcgtcacctccccctccttaccactattagctagcata

SEQ ID NO: 52150 - DNA, 710 bp, Glycine max
  Clone ID: PAT_MRT3847_18104C.1
acaacccttctggtaatggtatgtggggttctccaggatgtcctaaaccttctgaatatgtacaaggcctaataggtgttgttttacttgccttgaactcactaaaaaatgcaaagatgatgccaactgaggcaaatataactgattgcatccggtatggagatcccaagcaccgcaacactgatgttaagaaggctcttgaaagtgctattgagcagaatatggtggtgaaacaaaatttaggtgctttgccgttgtatgttggtaagaatgataaactttggaaatgtgtaaatcctttaggtggtactcctaagcagcactcaaaagaaacatgggatgaaattgaaaagtttttaacaactcctgctggaagatcagcactaatgggtacacagtgcaagtatgaagcaggtattgtgattaagagtatgtgctttaaagatcttgctttgggtgatgtccttcagatattgaacatgttaattacccataaaaaatgggttacgcatcatccatctggttggcaaccacttaacattactcttcccgagacaaaccccggttcaagggttgtagctggtgcataactgcaccctgacgtaaggaaaggcaactaggaaaactcattgaagttaatgattaatgaataaagtacgagccgttgactatgaaattgaataatccctttccgcatctgaggtagtttt

SEQ ID NO: 52151 - DNA, 1226 bp, Glycine max
  Clone ID: PAT_MRT3847_18105C.1
gcacgagaccacgcgtccgctcttttggtgtctcctcaaacctctctatctatcttcactctctctccctgttcaattctctatctctactattaatccctctatgatccaattgtgtgtccataaagcaaattaattactagagagcatacccatattttggttggtgaatttttgcaatacacaaatgggaacaaagaggagcttcaattctccggttaatgttttgattgaaaggttgaggaaggttccaatgaaagtgaagattttttgtggggtattgtttgctgtttttgctttggtggccttaaagctcaccataacaaatcactactatttcttcatagcttctgaaacggtccatgttgctgggataattgccctcatatacaagctttttgccctgaagacctgcactggtttatcgcttaagacccaagagctcactgctttattcctagcagcaagattaagctgtagcaccttgacagaggccaacatacacaccgcgttagatctgatctctcttttcgcaacattattcctcatatggatgataagattcaagttaaagtcatcctacatcaaggatcttgacaacctgcgtttatactttgtggtggtcccttctgcaatccttgcgatactaatccacccctttacaactcattggcgtttagttcgaattgtttgggcattcagtttgtatttggaagctgtttctgttctgcctcaacttcgttttatgcagaatgcaaagatggttgaaacatttacagggtattatgtattcgctctcggtgtttcaagattcatagcactggcttactggttaattcagatctatgagactcgaggggcatatctatttttggttgggagtggctatttttggttcttagcagcttttctctcggagatggttcaatccttcatcttggctgacttttgttactactacatgaagagcttcatgcaaggacaaattttaaggaaaatgcctgtttaataaggatcatgacttattctatatataaaaaaattatgacttattgatgtacaatcttttgaataagagtctttttttttttcctttcagttaagcatataacgtttacaattctttcagttaagcatggtaactttgtttgaggctaagttatcttacaataaaaaaaaaaaaaaaaaaaaaaaaaaaaaaaaaaaaaaaaaaaaaaaaaaaaaaa

SEQ ID NO: 52152 - DNA, 329 bp, Glycine max
  Clone ID: PAT_MRT3847_18106C.1
ttagctcgagccgattcgtctcgagctttacacacacagatccgagttaggtgagagacattcttgaaaacaaaaagaaactccccactgtctcagcaattacgcctctgcgatcgagctatacctaaaccgtgcgttggagaaacaggatctgataccctggattgtccctgcgagaagaccaatgactacgcacctgatataaatggagtctcggccgcacataaccctattgtcggcagcctttttctaaccttccatgctagactctctcctgaaaggctgagaatcaaagcacgatcctctaccctttcaccctgtcttacctc

SEQ ID NO: 52153 - DNA, 470 bp, Glycine max
  unsure (1)..(470): unsure at all n locations
  Clone ID: PAT_MRT3847_18107C.1
agcggaacctcccttcgatctccttcgctgttgatggtggctgctgccggaacctccgccgtgcatgggcgacggcgatccttccctgggggatggaganganggggagaacgatgaggaagacactccgttgttgcgagttccactcgtcgatgctcctatactcttgttcgtttgcttacacaaggcttttcgctccgaactcgatcaccttcgtcgcttggcggaaacggcgtcgtcgttggaggacgagccgcgccgttgccgacaaatagttcttcagcttcaacgtaggtttcagttcctcaaactagctcataagtatcattgtgctgcggaagacgaggttatcttccttgcactggatacacatgtgaaaaatgtaatctgtacatattcccttgaacatagaaacacgaatggccgttttggttctgtttttcatttcttggatgagctgatggttccta

SEQ ID NO: 52154 - DNA, 367 bp, Glycine max
  Clone ID: PAT_MRT3847_18108C.1
atactctgttacggggatcatgtatcaaatggtttacctcgtgtataacatccccatacgggtgttcaactacctagaggcctactgagtgaaatttccctgtatccaacacttgaatgagtacatccgctttctgaatgatgatgactggtccacaacgggtgattaccaaaatactgatcggaacaatgcacgcttcataattatatacatatggttgcacatccttgtgtgtgacttcacttttaattcaaactactgttctacacattgcacaaggtgctgggctccccctgagaaatatgagattgtctctgattcagataaatccttgatgcgtgtcttcagtcggttcactcactactgc

SEQ ID NO: 52155 - DNA, 1227 bp, Glycine max
  Clone ID: PAT_MRT3847_18109C.1
aagaatttggaaaaaattgtttctttaaataaaaaaaaggaaaatgttagcgtgaactgtgaactgtgagtgtttgtttctggattttgaatactgccactctttcacggtgaaattcaagctctttttcctctcaactcaaaatccctaatcaccaacacgaagggtttttggaccaaaacgctgcgttttcattttactcacaatctcaagctaaacccagctctttcttttgacgcatcaggtagagataatccaggcaatttccatcattgcttcaaaaggatcagcacaagtcatgttttctagtcctttcaaggaaaactattgaggtgctcttatcattagctacactatcatggatgtcgaggcagtagatgaaggggaaaacagtgatagacctgcttctgaaaatgttgaaactgaaaaaggccaggaacaaaatatgactgtaaacttggctgaaagagaagtaaataatcagaatggtgatgcatataggaagccacaagtgggcatgctgtttgaatctgaagatgctgcaaaatcattttttgatgcatatgcaagacatgtaggatttagcacacatgttggtcaattcagtcgtgctaagcctgatggtccaattataacttgggactttgcatgttccagggaggtatttaaaaggaagaacatagttagttgcaatgcaatgcttagagtagagagaaaagatggaaactggatagtgacaaaatttgttgaggaccataaccattcccttgcttcctctagaaaggtgcagaaccttcaacccggtaggcattttgtaggtgctgcaaggaatgttacaacagagacatttgatgcccgtaatgaatcctatgtttccgtgaatggaaatcatttagaaccaattggttcagttaggagctcctctctagcagaaaaatgtcatccaatgagaaacattgagtctcttacctatgcaagatcttctcgaaagaggacccttggaagagatgctcaaaatcttctgaattattttaagaagatgcagggagaaaaccctggcttctattatgcgatacagctagatgatgaaaatcgcatgaccaatgtattctgggctgatgcaaggtcaagaacagcgtataattactttggtgatgctgtaatttttgacaccatgtatagaccaaatcaataccaagtcccatttgcttcatttacaggattcaa

SEQ ID NO: 52156 - DNA, 367 bp, Glycine max
  Clone ID: PAT_MRT3847_1810C.1
cccacgcgtccgtacggctgcgagaagacgacagaagggggccacaagctacatacacaagaatggctcgcacacttgtctcagtgatttcgttaattttttttacctttgcagtcatggttgttgttctattctcaattggtgtgaatagcagtcagatctgtcctggaaattgcgaaaatttttcaaactgcaatgcctactgccaggcccactatcataagaaagggatatgcatcagcccacctaaacgagggtacatttgttgttgcttctcatgagttttcttcatataattataagcaagcaatgtattgtttttaataattattagcatcagtgctggaaataaaaaagcattctgaga

SEQ ID NO: 52157 - DNA, 371 bp, Glycine max
  Clone ID: PAT_MRT3847_18110C.1
gcgtggcacatcaatgcatagaaaaactcataactatttgggagtgtgcactactaggcaactcatgggggtggacgcataatacacttgataacaggcttgccattagcgaccttgccctgtctggtcaattcgaacgcctccaatgcatccttaaagtcatatcgtagcgagaccagtggcttgaggtctaccaatcctatttcgacgatagacatgcactgtgcgtcttgcacatgaccgaatgctaattacaccggattcactagcatgaacgcttaggactctttgaagaggtacggggacggtcatgttggatcccataccgacctgaacgtcggtaccgggcggctcgagaacgtgtataccca

SEQ ID NO: 52158 - DNA, 188 bp, Glycine max
  Clone ID: PAT_MRT3847_18111C.1
ggccgcccttatagatttgtagataaactttatggaatggaacatagataggtatcaattacaggtataaacattgaaatcaagcccaataaaaaactaacaggtgtaggacatcccatgaaacaaattactgctatattttagccataaaatgttataaacataaatcatgaacttaaagcctatgt

SEQ ID NO: 52159 - DNA, 433 bp, Glycine max
  Clone ID: PAT_MRT3847_18112C.1
gaatacgaagatgactagcaaagggttgctgagaggagcttcgttaactgcaaacgcagtttggcatagaagcagtttcttcccaaaggtaacggttagcgtccaccccaagttggtgaaatttcagagcttctcatcaaccaccgcttgctcctctcttccacccccggatttgcctcgtttggcaaaaactgctcaaatttcacttaccccaaacgaggtttggacagctgcagggtattgatcttgaaagtgttgaaccctcgatcagagcagagactgaaaacaatttgcgtggtaatgctcctgaaacatttgaccataaggacgccttgatcgcttctgtcccgagctatgaagagccttatattaaagttccgagggtcttaagcatggactaaagttaaaattgcttagacgagttatttggtag

SEQ ID NO: 52160 - DNA, 1963 bp, Glycine max
  Clone ID: PAT_MRT3847_18113C.1
tttttcgatgggttgctgaggggtcgttagttaaatacaaacgcagtgtggacatataggcactttcttcccccaaggtttgggttattagcaattacaaataagggaaatagcatagcttttcattcaatgagacgtgttcttcccatcattatcaaaaaatgaaagaataaaaattaaaacgttttacagattttcttctacgatatgaaattgtctcaataattaccaaaattaaacaaatcccatcatctttattatatcttcaagcagtcgcttgtggttcctttgctgtactccccagaaccactgtgaattctcagctagcatctacttgaatttatcttccatctcaataatggggttaaatctctgtcccaagatgaaccactgagcaatagcatctagcgtcaccttgaacaaaggctacctcacaatacgtatcttcaaatttgttgccgacaaaaaattagcgtgataatgatcctgaaacaatttaccatatggacacgttcgcagctttcaaatcgcgcgaagacaagcctcttaaaactgccccagcagtcttaaaattggactcaccatgaaattgcttgcccaaactactcactagagtagaagcaatattcatacgattatttcctctcacaaaatgatatgtcactttagccatatcctcaggactttcagaaaatatgtactcagctagcatgatgtgcagctctggagatccattattatttgctccatgttcggcggaccacttgatagcagcttttaagaatgaggagcagccctcaacacgtgtctttgcacttccaatgttttcagaaagctgctgcatgtcatcgacatcccataggttttgtggcaatgaaacccgaggaaatgatttgtagattttgttgagacgttcaagaatttcctcattgtaaggaattttccctttccctaatgtctccacaaacaatagagctaactctgctccacaggtaacctgcccatgagacaactgaatgcacgctcctgaatgtaggatatctaatgcttcagagtacctctgagcagaaacatatctggcactaacggatttgtacatttgctgagctccataataatttccatcgtttacaactttctccaatttttcaatattctcctgagcgggaggtagttcggctcttctggatctctgtcgcgacatagcgaagacgacgacgctctcttcgtcccgaagatgactagcaaagggttgctgagaggagcttcgttaactgcaaacgcagtttggcatagaagcagtttcttcccaaaggtaacggttagcgtccaccccaagttggtgaaatttcagagcttctcatcaaccaccgcttgctcctctcttccacccccggatttgcctcgtttggcaaaaactgctcaaatttcacttaccccaaacgaggttgaagaaattgctcccaaaattcaacaagttatagaatggtttggacagctgcagggtattgatcttgaaagtgttgaaccctcgatcagagcagagactgaaaacaatttgcgtggtaatgctcctgaaacatttgaccatagggacgccttgatcgcttctgtcccgagctatgaggagccttatattaaagttccgagggtcttaagcatggactaaagttaaaattgcttagacgagttatttggtagaaggaaaacacattcagactattttgtgttgtactttgaagtttgaatctttttggttctttgtgacccagctcttattttgaatttttatgagggaattcagttcggctcgtgaaaacagatctaaaaaatacatttattcgaaaatagtactctctctcgagtagtgtgtttgttttatgccaatccgtttccagaggcacattaaatgtcaatcccatgctcgctcatggattattagcattcaatgtgagcaaacaaa

SEQ ID NO: 52161 - DNA, 489 bp, Glycine max
  Clone ID: PAT_MRT3847_18114C.1
cgtagagagcgtcgtcgtcttcgctatgtcgcgacagagatccagaagagccgaactacctcccgctcaggagaatattgaaaaattggagaaagttgtaaacgatggaaattattatggagctcagcaaatatatgtttctgctcagaggtactctgaagcattagatatcctacattcaggagcgtgcattcagttgtctcatgggcaggttacctgtggagcagagttagctttattgtttgtggagacattagggaaagggaaaattccttacgatgaggaaattcttgaacgtctcaagaagatctacaaatcatttcctcgggtttcattgccacaaaacctatgggatgtcgatgacatgcagcagctttctgaaaacattggatgtgcaaagacacgtgttgagggctgcttctcattcttaaaagctgctatcaagtggtccgccgaacatggagcaaataataatggatcttcagagct

SEQ ID NO: 52162 - DNA, 484 bp, Glycine max
  Clone ID: PAT_MRT3847_18115C.1
cgtacgcttgggcacaagtcaatctaccttctgatgggttgccatcgcggatgactttttcatcatcttgcatattgttgcatacttgttcatgacagtgcccgtttttacacagccttgactctgataaaaccgtggcgaaacacaatttatatcccgtgcgagcacatccctttttctgggtctggccttatcgaagagaggcccgtacatatccctctttaacacagtttcacagtctgtatggaaactgaaacgcgctctgttgccgcacattaaacacggtgtgtgtcgtggaaactcacagggaacccctctttttggggggcattatagccccctcttgtggcggtttctcacatcgttatggcgacacttgccggcgctttccaacaagatctctagctgggggtctctttgtagggcccctatatagcgctatatagcccctaggccctaaaactcgagatcagtgtgaggtttc

SEQ ID NO: 52163 - DNA, 519 bp, Glycine max
  Clone ID: PAT_MRT3847_18116C.1
gcttcgttaactgcaaacgcagtttggcatagaagcagtttcttcccaaaggtaacggttagcgtccaccccaagttggtgaaatttcagagcttctcatcaaccaccgcttgctcctctcttccacccccggatttgcctcgtttggcaaaaactgctcaaatttcacttaccccaaacgaggttgaagaaattgctcccaaaattcaacaagttatagaatgattgtttttgcagtgagccaaacttttgaatttggattgaactgtcttgtgtggcaggtttggacagctgcagggtattgatcttgaaagtgttgaaccctcgatcagagcagagactgaaaacaatttgcgtggtaatgctcctgaaacatttgaccatagggacgccttgatcgcttctgtcccgagctatgaggagccttatattaaagttccgagggtcttaagcatggactaaagttaaaattgcttagacgagttatttggtagaaggaaaacacattcagactatttt

SEQ ID NO: 52164 - DNA, 208 bp, Glycine max
  Clone ID: PAT_MRT3847_18117C.1
cttgtatgcctacttcaacatagacaacatatctctcaagggactcgccaagttctacaaggaatcaagtgaataaaatagagagcttgctgagaagcttattaagtctcagaacatccgtggtgaacaagtggtgctgcaccctatcacaagttcttcctcagaatttcagcattccgaactaggggatgccttgtatgccatggaa

SEQ ID NO: 52165 - DNA, 298 bp, Glycine max
  Clone ID: PAT_MRT3847_18118C.1
ccctttttgttttttcgagagagaatgagaggaccggggggtacttttaaggagatttcaccaatacccccgaaaccctggcaacctccgtgcaacagtgaactctgaggggttactgctaaaggttcataatgccaaagggaacaagagaacaggaaaggcgcaaggaaagcaggtgtgctggccaagtccaaatgccaaggaacacactccgctgcaacacacggttggagctctacagatcgtaagcaccgggagaaacaggaacagcggctgtaggaacgggtcaggcgcgccg

SEQ ID NO: 52166 - DNA, 377 bp, Glycine max
  unsure (1)..(377): unsure at all n locations
  Clone ID: PAT_MRT3847_18119C.1
aggacgcgtggacggacgcgtgggcagacccgtgctcaaacgttgttgtacgagataagattgctgtagcgctgattgctaacacctgcagagtacaatggcctgtgtatcaacatctttgctcaagtcttcacttgttgttgacagactgagtgggtgaaaggacaaacccttagccaaccttttgcagtagttgtgagaagcaaccccaccaccccatcaggtctgaccatcagagctgggtactatgctgatgagctcgttaagaccacngatacacgggcttcaccagggaggggtatttggcgcatgcatgagtgcaatgctacctgtgggagagcgttggctttaattgggctatagaacactggagctta

SEQ ID NO: 52167 - DNA, 364 bp, Glycine max
  unsure (1)..(364): unsure at all n locations
  Clone ID: PAT_MRT3847_1811C.1
ggtacaaccagactcgattgggtcgcttcggctagctttgctggccccaaaaagnnnagccatccagattccaaacgggctgtacaggctccaataaaaccaaatacattggatctctataacatccataccttcacaatttcttacaaccaatccttcacaggcttttaagctgtcttcccccttaaccacttattttgcctccaaagcctcacgcttttatcccataaaaacctttgggcttaaccaaaatcaaagttcattaccattccatctttcgaagccccaaccaatcctttttaagaaccccgaaccgaataacttttggccggttaacaataattgtttttttcacgtcaaaatt

SEQ ID NO: 52168 - DNA, 373 bp, Glycine max
  Clone ID: PAT_MRT3847_18120C.1
cacaatccttcgatttgctttcttcaacgcacccacttatatttcttaaactagttttccagagagccgggagcactgtacggtgccgatccaatatacaggtctgtaaagccttgtttgggacttcccaaagacccccacctttcccttgattgatatgttttgcaaagcgtatactcttttgcatgcaaaatcgccctcgtcgattcccactctttccaaacacttaccttggcgcacctgaaattacaagtcgccacaactgcccacggtgttcttaaaactggctttaacaaaaacgacgttttcctactgctcgctcccaacagcatccactaccctatattctatcttgctggcaccgccattggcg

SEQ ID NO: 52169 - DNA, 428 bp, Glycine max
  Clone ID: PAT_MRT3847_18121C.1
tacccaatcgagccacacattctaattctatcgaacgttttattaattttttttctatttctttttttcgacattaatacgggacctttatcatgaatgctactactattacattaagaaataattcttcattctcataaagattaaactttaagtccatattttgccctattatccatccaatttcaacacaaaatgttatcttcttaacgaaaatgtaaacttgaactaaattaaatacttttctttattattaggaacttattaattaaaaaatcatattactttccattaattctttattaatccatcaactactacttaaatgaataaatttcaaaaattctatgatttcattatttaattttaatcctactattatcttatatatcccactaaaatattttttttttcttattttttaccaa

SEQ ID NO: 52170 - DNA, 2162 bp, Glycine max
  Clone ID: PAT_MRT3847_18122C.1
caaagcggctagaacaaggacacaagaagtacgacaaattaagacagggcctaagagaaggtgttgtagagaggatacagcgagagcaaaatgtattctcattgggttcgattgatgcttctcattgcttgcattcttccagctttggttgaatgcagagtgaggcactacaaatttcatgtggtgtctaaacaaactaatagattgtgttcaagcaaatctattgtcaccattaatggcaagttcccgggacccactctttacgccagggaagacgatacagtgttggtcaaagtcatcaaccaagtcaatcacaacgttaccatccattggcatggtgtgaggcaattgagaactggttgggctgatggacctgcatatgtcacacagtgcccaattcaaccagggcaaacctatgtatacaatttcacactcacagggcaaagaggaacacttttgtatcatgcacatgttaattggctaaggtcaactctctatggtgccttggttatcttgccaaagagaggtgtgccttatcctttcccaaaaccagatgatgagttggttgtggtattaggagaatggtggaaatctgatacagaagctgtaatcaatgaagcactcaaatcaggattggcaccaaatgtctcagatgctcatactattaatggccttccagggacagttaccaattgttctacacaggatgtttacaacctgcccgtggagagtggaaagacctaccttttgagaattgtcaatgctgcactcaatgaggagctattcttcaaaattgctggccacaagctcactgtggtagaagttgatgccacatatgtaaagccattcaagattgaaacaattgtgatagcccctggccaaaccaccaatgtgcttctaaatgcaaaccaaaaatctggcaagtacttggtagcagcttctccattcatggatgctcctgttgctgtggataacttgactgccacagcaacattgcactacaccggcactcttgctgccacccccacaattctcaccaccccacctcccaaaaatgctacccaaattgccaacaacttcatcagctctcttagaggccttaactccaagaaataccctgtcaatgtcccattaacagttgatcactcacttatcttcactgttgggttgggaattaacccttgtccatcttgcaaagctgcaaatgggagcagggtggtggctgctatcaacaatgttacatttattatgccaaccattgccttacttcaagcacattatttcaacatcaaaggggtgttcaccactgatttccctgccaatccaccccatgttttcaactactcagggcctggaccagccaatttgaacaccgaaaccggcacaaaggtttacaggctaccattcaacgccacagttcaggtggtgctacaagacacaggaatcattgcacctgagaaccacccagttcatcttcatgggttcaatttctttgttgttggaagaggagtaggcaatttcaaccccaaaattgaccctaagaactttaaccttgttgatcctgttgaaaggaacactattggagtaccagctggagggtggactgcatttagattcagagcagataatccaggagtttggttcatgcactgccacttggaggtacacacaacatggggactaaagatggcctttttggtggacaatggcaaaggtcctaagcaatcagtgatacccccaccaaaagatcttcccaaatgctaatgtgtcaatcatcaattaattatgcaatacacaaaagaaaggccttccaatgccaaaacaaaagaagctttggagggatacagagaagccaggcaaaagaaaagtgagtgaagaagaaagggttatttaataagcgagtatcccaaatgttttttctttgagcaaataggagaatttgttcaaccacatttaataaaatggagcgagcattttagttttcctctttgcaaattcaattttttaagacacgttgtgtatgtattggaatcaacaagtgtatgctcttgtttgtttcaggaaatacaataagggttatttacttcgttaaaaaaaaaaaaaaagggcgtaaaaagactagtgagcaagaaaacccgggaattaataagaaaccggtccct

SEQ ID NO: 52171 - DNA, 483 bp, Glycine max
  Clone ID: PAT_MRT3847_18123C.1
gttgaatttctggttaagcctttatgggatgagggtctggattgcactagaggaaaagggcatcaagtatgagaatagacaagagaatattagtaacaagagccagttactcttgcaaatgaacccagttcacaagaaaataccagttctcttccacaatagcagacacatctgtgattcactcattgctgttgagtatattgatgaggtttggaatgatcaatctcccttgttgccttctgatccttaccagagatcacaggctagattctggtctaactatgttgacaccaaggtactttacttctctacagtgcttctttattgtgattatgattatttctgtttttcaatcagatgaaacttgaatgtgatcctatttatgtttttagtgctttttttcaattagaattagagtttcacctttggaatccatcatgacatttaatgggacacctttactacagatattactgagattaa

SEQ ID NO: 52172 - DNA, 1951 bp, Glycine max
  unsure (1)..(1951): unsure at all n locations
  Clone ID: PAT_MRT3847_18124C.1
ttaacngggggcggaccgctgcgagaagcgacagaagggtaccccctcgttacccaagacgggtcgtcactactcattagtatctttctattggatccactttagactttttctatttttggtaagctaggttttttttttctaattaacggaacggtttaattttgattgggtctcctccctcaccaaattaaccaaagcaatgaaactaaacaccaccaccacagaacaacaagaaatcttaatctttctcctcctctttgctccgctaacccctctctccgccacacgtcttcccattctcaaccactccttccccctcccccttcgagtccaagcttcgacccccccgtccctcgcctacctcgtctccggctccaagggcgacggcgccggcctcacccgcgtcctcctcgctctctaccaccccaacaatcgctacgtggtccacctcgacctcgagtcctcggcggaggagcgctccgatttggtgaggttcgtggagggccacgcgctgttcaagcggttcgggaatgtgagggttatcaagaaggcgaacctcgtcacgtacaggggacccaccatggtcgccaacacgctccacgccgccgcgatccttcttagggagctcgaggactgggattggttcattaatctcagcgcctccgattaccccctcgttacacaggatgatctgctgcacgcgttctcgcatttgccacgcgatcttaacttcattgatcataccagtgacattggctggaaagatcatcaacgggcgaggcctataattattgatccggggttgtatatgactaagaagcaagacgtgttctggattacgcagaggagaagtaggccaacggctttcaaacttttcacaggttcggcttggatggtactatcaagatctttcattgattactgtatatgggggtgggacaacctacctcggactgttctcatgtactacacaaatttcatatcttcccctgaagggtacttccacactgtcgtttgtaatgctcaagagttcaagaacacaaccgttaacagtgatcttcacttcatttcttgggacaatcctcccaggcaacacccccactacctttctcttgatgacatgaaaaggatggttgacagcaatgccccctttgcgaggaagttccacggagatgatccggtattggacaaaatcgacacagagctattatctcgaggtcctgggatggttgttcctggtggctggtgcataggaagcagggagaatgggagtgatccttgttctgtagttggtaatactactgtcctcaggcctggccctggttcagagaggctagaaaccctgatcaattcgttgttgtctgatgaaaattttcgaccaaaacagtgtgtatgacaagaagctactgccacttgctttagctttcatctctaaatttagttaatacggtcagtgagttcatgttccttttcagttgaaaatgtaaatattgagagtgaaaagcacaaacattattttttattaaattgacatgaattgaggcaaaaagaggctagaaactttgatcaaatcactgttgtctgatgaaaattttcgacctaaacaatgtgtatgacaagaagctactgcctctaaggaggttttcatctctagatttagttaacacgatcagtgaattcatgtgcctttttactaagaaatgtaaatattgagagtgtaaaacccaaacatgattttgattaaattgacatgaattgacagcagagctgccaactgaattaactaatctcctttttttttcttaaaaaaaatacttaactattctgaatggaccattttggtctttcaaggtttttggtgcctcaatgaggtcctttgagtgttctaccattttcaagaagtaggctattttttttctgattccgaatcccgggggtagatactaat

SEQ ID NO: 52173 - DNA, 156 bp, Glycine max
  Clone ID: PAT_MRT3847_18125C.1
ggcatacggcgtgagggccgacaaagattccaagtatccgaacatttggaatttgtatcacagttgagttggaagaatggcacttttctttgcagcattgaatatagtcctggggatgcgagctgcgggagccgggaatgattggaaggcacgcta

SEQ ID NO: 52174 - DNA, 742 bp, Glycine max
  Clone ID: PAT_MRT3847_18126C.1
gggcaatccagaagcgagccggagcgcggggcgcgagtcgaggagcccagccgagccgccgccgcctccccgccttcagcgagagccccggccgggggctcgccacaacgcgcccgggcctgcctccgcgtcaggccccgcgggcagtgccaggcagccagggggagggcaggcaagtgagcgccgggaggaggcggccggagcgagcgggcgccgcgcgtgtggcgtgaggggaagccgctggccgcccccttggccgtcccttcgctccccctccccgctccccgccccgatcgcggagggcaccatgtctgcgccgacggccaaagccagtaaaaaggagctcaactccaatcacgacggggccgacgagacctcagaaaaagaacagcaagaagcaattgaacatattgatgaagtacaaaatgaaatagacagacttaatgaacaagccagtgaggaaattttgaaagtagaacaaaaatataacaaactccgccaaccattttttcagaagaggtcagaattgatcgccaaaatcccaaatttttgggtaacaacatttgtcaaccatccacaagtgtctgcactgcttggggaggaggacgaggaggctctgcattatttgaccagagttgaagtgacagaatttggagacattaaatcaggttacagaatagatttttattttgatgaaaatccttactttgaaaataaagttctcttcaaagaatttcatctg

SEQ ID NO: 52175 - DNA, 2336 bp, Glycine max
  Clone ID: PAT_MRT3847_18127C.1
cggacgcgtggacaggtaagtcacatcacatgagagtgtagttggtcagtttttcacgagacaaagttctcccaaacacttcaacatggcttcttcagctatggaaacctgcaaatcagaggatttgcacatgcaggttgacattgagaagaacgcgaaggacataaggtctcagtgggtgcttaacgctcctgagcccccaagtccatggcgtgtggttgcagattctgtgagcaaaactatctcccactataaacataaactttcctctctcatagatcaaccctgcaccacactcctcctttcagttctgcaggtggtttttccaattcttgcttggggcagaaactacactgctactaagttcaggaaagatcttcttgcaggtctcactattgctagtctttgtattccccagagcattgggtatgccaccttggcacatcttgatcctcaatatggcctttatacaagtgtggtaccaccacttatctatgctgtaatgggaacctcgagggagatagcaattggtccagtggcagtggtttctcttctgttatcctcaatgatggagaaattagtagaccctgctactgatccagtgggttatacaaagctgattttgcttgctactctctttgctggtatctttcagacttccttcggactcctcaggcttgggttccttgtggatttcctatcccatgctgcaatagttggatttgtggcaggagcagccattgtgattgggcttcaacagttaaagggactcttaggaattacccattttacgaccaagaccgacatagtctctgtcatgaaagctgtttgggaagcagttcataatccatggaaccctcgaaattttatcctgggatgctcgttcttggtcttcatcctaacgacgagatttttgggtaaaaggaagaagaagctgttctggttggcatcaatctctcctcttgtatccgttgttctgtcaactctaattgtgtttctcacaagagctgataaaaatggagttaaaattgtgaaacatgtcaaaggggggttgaatccaagctccctccatcagttagacttcaacaacccctacattggagaagtggccaaaattggactagtggttgctgtcgttgcccttactgaatctattgctgttgggcgatcgtttgcatccatcaaaggataccaacttgatggaaacaaggagatgatgtcaataggtttgacaaacatcataggatctttcacctcctgctacgttgcaactggttcattctcccgtactgctgttaattatgcagctgggtgtgaaactttggtgtcaaacattgtgatggccataacggtgttgatatcactgcagtttttgacaaagctattgtattacactccaacagctattcttgcttctgtgattctctctgccctaccaggactcattgacctcagtgaagcttacaaaatttggaaggtggataagatagactttcttgcatgcgctggggcattctttggagtactgtttgcttctgtggagattggtctacttgttgcggtggtaatatctttttcaaagatcattctcatttcaattcgaccagggacagaaactctaggaaaaattccgggaactgatttgttctgcgatgtctatcagtatcctatggcagttaaggttcccggggttatgataatacgagtcaagtctgcgttgctttgctttgcaaatgccaatttcgttagagaaaggatcatcaaatgggtcactgaggaagaatcagaagatgacaagggaaattcaagaagcaccattcaactcgtaattcttgacacctccaatttggtgaacattgacacctctggaattactgctctagaggaactgcataaaagtttgtcttcacaaggaaaacagttagccattgcgaaccctaggtggcaagtgatacacaagctaaaggtgtccaactttgtcggcaaaatcggtggcagagtctttctgactgttgaagaagctgttggctgcaagagccgctgctaaattggataaacacacctgagtcttatgatgtatctcatgtgggaaaataaaaaacagtgtttaatatccatttgtctttgtggaaaatcataacactagtgcttgtgaattgttcccttgtatttccactcccaagtacgtacgttatgtacgaaatgggacatcagaataagtcatctcgtaattcatgttagagatgctgtgagtttctcttatgttcatgtatgtgcttaataaaatagcaatttgaagtgacgtgtttgttaataactcgagccgaatttcgagc

SEQ ID NO: 52176 - DNA, 796 bp, Glycine max
  Clone ID: PAT_MRT3847_18128C.1
ccacgcgtccgtgtagatctacaagataacgtctgcatttgcatagagacgaagcatgtctctgagcctcatccaccataaaccactttcttcttcttgcatcttctaccttcactcttccacttcacaccacattcacactctttcaaaacccttcttcctcttacactccaaaaccctcccatcatcactctctctctctgcatcaccatctaattcttcccctcactcttcaacaacccccattcccctcccatatctccaagaagaagaaggccatgacccagatgaaccaaactacaatttcttcgaaactagcaaatggatttcctcccaagaccctcaaagcgaagaaaaattgtaccttgaggaggaccctcacatctcgtggcaccttgccacggacctggatgaagaatctgaaatgagtttggagaaggaagaaatggggtgttttcaaaagagggaattgcctgaggctgagggaattgtgggagaaattgttgagcttgcaaggaacttgcctcaaaatttgactcttgaggaggcattggctgagtatgaaggaaggttcagtgaaaaagagtgctgggaggttctggaaattcttggggaggagcaccttctgctgtgttgtgtgtgtttctttcagtggatgagtctgcaggaaccatcacttgttactcctagggcttgtactgtgctgtttcccttgttgggaaaaggaggcatgggcgatgaggtgatggatttgttcagaaacttgccatcaagcaatgagttcagagatgttcat

SEQ ID NO: 52177 - DNA, 465 bp, Glycine max
  Clone ID: PAT_MRT3847_18129C.1
ctgaatcacacgtacgtgcaaacatgaataccaagcccggttttttcttgtgcttcctatgtgcactggttctgatatctgttgagggcactgacccattgaaagatgagacacaagaggaaccaaagacacagtctgatgcctggggaagaggtggaagaggggggcatgatggaagctggggacacggaggacactgggggcatggacgaggacgacaccgtggatgacatgtgggacgaggacacagtggaggacatggtggaagatgcacatgactgtggcgaaagggctgtaaatgtgagctgaagtaaaaactacaaatatatgaactgaacacactcatatacttgacgagactccatgtaataactcagttatatgtaagaaaatagacatactagcatggactatatactggcttgagctcacataaggtgaatgttattcgtctaccatgcatgt

SEQ ID NO: 52178 - DNA, 355 bp, Glycine max
  Clone ID: PAT_MRT3847_1812C.1
tatggacatggctacttcacccttgatggaccaaaatatgatgatgggaacaatgaaaatgaccacaatctgctccactgactccaaactcattggggctttgagggttcaaagcatccttgttgctgcttggtgaaacctgttgtgatgatgatgattcagttacattgttgttgaattctggaccagcactctcattatgtgcttgctcatctatggtgtggttatttcatacaatgtgggactggtaattataaagttcatcctcagggataggggacggaggagtctggctcattctctacatatgggatgagcgggtggatgtcgccttttgatctctgagtgctgttaa

SEQ ID NO: 52179 - DNA, 544 bp, Glycine max
  Clone ID: PAT_MRT3847_18130C.1
cggtcaggttgaaactcctaagggacccatgttggagcttaaaattactcaagctaaaagtgcacttgccaaaaacacagttagaggaacccttctgcgtagagatctattggcaaatttttttgacagagggcaattttacagtaagtgttgatttgcagggcactgataggatcaaaggaatggataaaatggtgggcacagttgtgtttcctgagaatacaggtgtagaattaggcctgtgctaaagaataggtgattttagcgagagcgggccagaatatggtattcacactatctggctctcaagagtgtgaattatggaattctgcttgcacatagcgaagacctatgtcatttaattcaaaacccagtgctcatgcatggaccctagaatttttgatgcgtccggatttcattggatattatttcaaaattgcatggactgcacaccccattgcatgatgtacaggtacaattgcttgcctattttctttaagaatgagttccccccccaattggggttggattcacaaattctttg

SEQ ID NO: 52180 - DNA, 1699 bp, Glycine max
  Clone ID: PAT_MRT3847_18131C.1
tttgttttggagggtagacctttaagggcttgttttggatccataaatatattgtcatgcatggctcctgattgtggtatgagaattactggtctagatagaattttcaaattatgcttaattacctgtgcttgtaattgaggaaagatctctatgaccagccttgcagcaatccggattgtctgtatttgcatgagattggctctcaagaagatagttttaccaaggatgaaataatttcagcatacactagaagtcgagttcaacaaatcactggtgccacaaacaatatgcaacggcggtcagggaatgtattacctccgagactggatgacaatatgttgactccatctgcgggaattctttgctaaaccattcttccctattgagaaattcatatcagacaccttcagctggaaaccttggtagtgcaggggacattgaatttatggaccctgctattttggcagttggcaaagggagacttcaaggtgcactgaacagcccggcactggacattcgatctaatttcatgccacaattaaattacttcgaaaatgatgccagactacaattattgatgcaaagatctctcgcaccacagcaaaaccttagattttctgaaattgggaatactttttctcaacttggcgattcctatgctgtttcttcaaggttagatcaatcccaagtcagtaatctaggcccattccaacagctgtctctgcagcagtctacaaatgcagtcttgtcaaatgggcaatgggatgggtggaatgaggtgcagagtggaaatggtttgggtgtggctgagcttttgagaaatgaaagacttggattcaataaattttattcaggatatgatgattcaaaatttcggatgccaaattctggggatctttacaacagaacattcgggatgtgaccttttgctagttatgttgtcattgtttggtgttggaaatggtaaaacctagcagaaatggacaaacaattttttgtgctgctgaggatgatggaactgattcttgctggcgtgtattgggctacctaatgatgaagctcccaagaagtgtaatttatggctacagttgttctggattagcagaagtgagctgttctgggattataagatatcaactgtcagtgctgacgtgatcaaactggcaggtagatcttagtgtttccctcatagtacagagcatggaaacaacaagatcggtgttatttattgtttgtaacttaccttttagattaactacccttgtgggtagaagtagaggtttgattcgactggtaaagggaaattgttttgaaatggatttagatgctacagtttgatactctgataatgggggtatgaaatagatcgctttataacttgaaaggtccatcatccttgtgatatgaatgaaactccgttgcgctgttttagcttctggccactttttaagagatcttttactaatgttggttctttgtgcgtaatttttataatcccagttattagttatacacacacacacacaacacaacagaacagtgtcatagtttgttgttgtaagctatatatgcattcatggcttctgctaattgtcctgctgctctgtttatcgcctttgcattgtcctgtcctgtgatcttgcaactggctatcaggcaatatttaacaacattactggagtgtgactcatgccac

SEQ ID NO: 52181 - DNA, 331 bp, Glycine max
  Clone ID: PAT_MRT3847_18132C.1
tacgcggccggttttgtggagcaaagcggaaggacggcttacgatgctcataacattaatcagccccacgagaaagatgcgccggagggaaattattcctttgatagtaagtgtcgctctagagcgaaaaaagattcctctaccaaagcacaagtgggtggtggcaagagcctcagatatgacatggttggcgctggatcacattctatggaagattgtcctgaagcggaagatcaagaaggacccaccaagattgatgcccgagagagacaaataaacaagcctgaagacactgagggacaggcacagaaggaaacaaattggattgaat
